United States Patent Application Publication US 2011/0183924 A1 - sequence listing, part 209

SEQ ID NO: 509773 - DNA, 302 bp, Homo sapiens
  misc_feature (91)..(91): n is a, c, g, or t
  misc_feature (299)..(299): n is a, c, g, or t
ggtttcgcgccatgtcgtttgctgagagcgggtggcggtcggctctgcggcgccgcggtcccggcaccccgggccctgaggcttgctctcngattcctcctttactcagggggacagctggggtgatggctgacccgacgaggaggagggatgcgaccaagtggcccgcgacctgcgggcggagttctcggctggggcgtggtcagagcccagaaagcgctcggtgctcccgccggacgggaacgggtcgcccgttctgcccgtttagcgcaatggtatcttttcccgcggcgggggcngca

SEQ ID NO: 509774 - DNA, 458 bp, Homo sapiens
ttatccgcgtttcttttttgaagggggaagcctagctgcagacgatctcttaatttttccccgctacaggactatgatgatggatatggcactgcttatgatgaacagagttatgattcctatgataacagctatagcaccccagcccaaagtggtgctgattactatgattacggacatggactcagtgaggagacttatgattcctacgggcaagaagagtggactaactcaagacacaaggcaccttcagcgaggacagcaaagggcgtctacagagaccagccatatggcagatactgattgtactgtctgatgttgtgaaatagccaatctccaccagtcctgtatactgttcaaagtaatttttttctatgaacaatccctttttaaataaatcaggaatgcggccggcgaacatccgcgttgaccacaacgatcttctctcatcctacact

SEQ ID NO: 509775 - DNA, 338 bp, Homo sapiens
  misc_feature (250)..(250): n is a, c, g, or t
  misc_feature (283)..(283): n is a, c, g, or t
taagatgaagtcttgctctgttgcctaggctggagtgcagtggcgtgatctcggctcaccgcaacctccacctcccaggttcaagcaattctcctgcctcagcctcctgagtagctggactacaggcacccaccaccatgcctgactaatttttgtatttttagtagagacgggggtttcaccatgttggccaggctggtcttgaactcctgacctcaggtgatccatactcctcggcctcccaaagcgntgggattacaggcatcagccactgcgcctgggnctagggctttcttttttaaaaaacaagtccttaacaaaagggggtttttaccagc

SEQ ID NO: 509776 - DNA, 208 bp, Homo sapiens
tcgtactaagattagcgaggagcgttctgggcaaagctctcttagtgagccagaattagacccttgttgatgagcccaggccctgggcgtgagcgaaactggctgctggactagctatgggctgtgttgcttgcgtgagtgcaaaaaagagcctcctcccgcccttgctgtgaccctgttcccgagcatggtggatccatctagatgt

SEQ ID NO: 509777 - DNA, 852 bp, Homo sapiens
  misc_feature (810)..(810): n is a, c, g, or t
  misc_feature (843)..(843): n is a, c, g, or t
ctccatttacaattatatcttgataatattgtttttacttttgttacggtgattatttatggtatatgcaatcttttatgattatcgagttactattcctttggtttggtataagccgtccgcctaatatggttctgttggctaacattcggccatgtagtagtttggagtttatgttttttggtgggtgagggattgtaattattctaggcgcgaggttcttttagtgaggggtggcaaagggatttactagggccctgccatatggcagatactgattgtactgtctgatgttgtgaaatagccaatctccaccagtcctgtatactgttcaaagtaatttttttctatgaacaatccctttttaaataaatcaaaatgcttaaaatctgaatggatggaacttaaaactactttgttgaaacatcaacctgggcagaaaaaaaaaaaaaaaagacatgtaaaattttgttatttccagtctgtatatgaaaaaataggtcatcaaaaggaaaaaaaataactttgattaactagtgttaaacaaaaaataggtttactaaatatgttaatctattcttttaacataagcctcacctttcattttaaaggtttccatagaatttagttattttatctttcagccatatgctagtttttttttctcttgccaacatgcgtaaaaagggaagccaattacaagtgcaaataatgtggtattcttttgtaactcaagtcttgaaatgttctgtagtgttaagcaaagtctcctcttgcttgatactaaataaacttttgaaagaattttgngtgtgtgagctaacaatttcatgggtttttttntattaaaaa

SEQ ID NO: 509778 - DNA, 870 bp, Homo sapiens
  misc_feature (828)..(828): n is a, c, g, or t
  misc_feature (861)..(861): n is a, c, g, or t
gtcaatctgttatttggatccacaagtatacatcttatttaaggtacttatcttagaataatgactatgatgatggatatggcactgcttatgatgaacagagttatgattcctatgataacagctatagcaccccagcccaaagtggtgctgattactatgattacggacatggactcagtgaggagacttatgattcctacgggcaagaagagtggactaactcaagacacaaggcaccttcagcgaggacagcaaagggcgtctacagagaccagccatatggcagatactgattgtactgtctgatgttgtgaaatagccaatctccaccagtcctgtatactgttcaaagtaatttttttctatgaacaatccctttttaaataaatcaaaatgcttaaaatctgaatggatggaacttaaaactactttgttgaaacatcaacctgggcagaaaaaaaaaaaaaaaagacatgtaaaattttgttatttccagtctgtatatgaaaaaataggtcatcaaaaggaaaaaaaataactttgattaactagtgttaaacaaaaaataggtttactaaatatgttaatctattcttttaacataagcctcacctttcattttaaaggtttccatagaatttagttattttatctttcagccatatgctagtttttttttctcttgccaacatgcgtaaaaagggaagccaattacaagtgcaaataatgtggtattcttttgtaactcaagtcttgaaatgttctgtagtgttaagcaaagtctcctcttgcttgatactaaataaacttttgaaagaattttgngtgtgtgagctaacaatttcatgggtttttttntattaaaaa

SEQ ID NO: 509779 - DNA, 877 bp, Homo sapiens
  misc_feature (835)..(835): n is a, c, g, or t
  misc_feature (868)..(868): n is a, c, g, or t
ttatccgcgtttcttttttgaagggggaagcctagctgcagacgatctcttaatttttccccgctacaggactatgatgatggatatggcactgcttatgatgaacagagttatgattcctatgataacagctatagcaccccagcccaaagtggtgctgattactatgattacggacatggactcagtgaggagacttatgattcctacgggcaagaagagtggactaactcaagacacaaggcaccttcagcgaggacagcaaagggcgtctacagagaccagccatatggcagatactgattgtactgtctgatgttgtgaaatagccaatctccaccagtcctgtatactgttcaaagtaatttttttctatgaacaatccctttttaaataaatcaaaatgcttaaaatctgaatggatggaacttaaaactactttgttgaaacatcaacctgggcagaaaaaaaaaaaaaaaagacatgtaaaattttgttatttccagtctgtatatgaaaaaataggtcatcaaaaggaaaaaaaataactttgattaactagtgttaaacaaaaaataggtttactaaatatgttaatctattcttttaacataagcctcacctttcattttaaaggtttccatagaatttagttattttatctttcagccatatgctagtttttttttctcttgccaacatgcgtaaaaagggaagccaattacaagtgcaaataatgtggtattcttttgtaactcaagtcttgaaatgttctgtagtgttaagcaaagtctcctcttgcttgatactaaataaacttttgaaagaattttgngtgtgtgagctaacaatttcatgggtttttttntattaaaaa

SEQ ID NO: 509780 - DNA, 131 bp, Homo sapiens
cgatggtttattgtcggcacgaaacgtcagatctacgtgtatcaatatcatcagtgcacacatggcattttggcgtaggtttggactcagggtgtagcctgcagcaatagggggacatcagtgacatgaag

SEQ ID NO: 509781 - DNA, 439 bp, Homo sapiens
ggaggaaaaaaccttcttccgaaggaggttttctccaaaatggggttataaaggcccctgttagaaagatgctccatttgcccccggtttttacaaagtcaaggacatttcaaaggtggtccccccccggttcctttttttgggggggtgggtcccttttttgccccccaaacttgcaaggggtgttttgggggccccctttttgtttcccaaaaaagttgttttcttccagttgggggtatcccctgggggggggtgggtgtttgccaaaacccaggggggccaaaacgggggcctgtttccgcccggggtttttccctccccctttttttagggttgccctgggtgaagggggaactcccaaattggggtttgggtttttttttaggggttttcttttgggccgggggggggggtttttttttaaccgctgggccca

SEQ ID NO: 509782 - DNA, 133 bp, Homo sapiens
acctgtgtgctccacctgttgctcatccccacctgtgtgctccaagttgcccaggaggccgagggggccttgggctccatcttggaacgcgtcctcccggggctcaaggtccctcacgcacgcaagaccggga

SEQ ID NO: 509783 - DNA, 160 bp, Homo sapiens
gtgacatcgtctttaaaccctgcgtggcaatccctgacgcaccgccgtgatgcccaggaaggaaaggcgacctggaagtccaactatttcttagatcatccactattggatgattatccgaaatgtttcatgtgggagcagacaatgtggctccaagcag

SEQ ID NO: 509784 - DNA, 403 bp, Homo sapiens
  misc_feature (198)..(198): n is a, c, g, or t
tctagccaataacaatcacacaaaggagatcatgtctcattcacattcacagtattcactcataggtgaatatatataaacacagtaatcacatttgctgccggctttaatgaaatagtgtggaagtatgtgaaagctcaacaaatgtgctacaaactgtactacatatttcatttttgcaattgaacagacctttgntatattatgttattttacaaaatcattagtagggatagaagatgctaactaagtcactataaacagaaaagtcactgttgtgttcatgagcccattttagagctaagacaatttgtcaagaaaacagaacagggaggaaaataggagtagtaggttgctgttctgtgcttcagcaaatgcttcaatagcatttgaatctgtagta

SEQ ID NO: 509785 - DNA, 771 bp, Homo sapiens
  misc_feature (59)..(59): n is a, c, g, or t
  misc_feature (271)..(271): n is a, c, g, or t
  misc_feature (273)..(273): n is a, c, g, or t
gggcccactggttgatgaacagatcgcacgactccaacactaaagacacgacgtcagcngtctccgacgatgggaaccgagaacaagtgtgtccaatagcgtcttccgatacatcatacgggccggtggaaagacagggcgaagagcgcagccggccgccgcggctgggccgggggagccaagccggccgaagatcgtgaaaccccaagaagaaccggaatggcacatgcacacgtcctgagctgggaatcccagaacgctcgatcactcngntcagaatgctgcagacctgtgtccaggtacggcagacacaagtggagagggttggaaatcaagaccaggggctccgtgcgcgtccgagggacgataggtataatcagcacattccacgtgtttgaacttaatggagtgcccttctgcaagcaagtggggtcggccggcaagccaagtgaaacaactcgtttgaggcgtcttcatctgttaaatgggttggcaaggacgcagatgcagggttagcaaagcaggggctcgaaacgggggcccaagaaggttgtcaaggcccctcgttggcgcccaaggatgttgcttgcgttggggattcccctttgaaaaggcacaacgggaattccaagaacgcttgtggaaaaaccccaacttgggttattggaacactttgcgaacttttggggaaaggcccccggatggggcccaggaacgggggtccacttttcgaaacggtcagtggccatgggtcagcttggggcaaagagg

SEQ ID NO: 509786 - DNA, 201 bp, Homo sapiens
cacgagggctaacataatgcctattgcaacggtcacattcatcacacccttttacagttttggaaaatttgtgatcctctcacttgcccccactgcaaactcacttcccacatagaccaccagtaacatttcttatccgatgcattcattacccaccccaagctcctgtcctcacagataaaactccttggtgacacacat

SEQ ID NO: 509787 - DNA, 728 bp, Homo sapiens
gtacggttcctcgcttctggtgagggtgccagatggccgctcgccaagtgcataggatggccggacattgttggaatgcaaatggtgaagaatcaaggtcgcgtcagtgctgatggtcataccaagcactctttgggcacagatctatgggccaaggaaatacgatcgaagagacttcgataggtgccatatgagctggtgcattggtttcacgattttggagcatattaccgccttcaagtgcagcgcaaacaacagtatttgactgtttgactaccctcgtgaccacgagtataatcgtcaaaaatttcgtgggagggcaccaaggactggagtgactcgagagggtcactgctctgtggccaagatttaatctgactcaggtagggaccattgagaattgcattggcttggcattgatacctaggtgcccctgtgaatacacggaggtctgatgccgaatgatgtgacagagggtaatagtatggggctatcaggaactggataggaaatggtgtctgggacttactcacctgataactactcctaccaatgcttgacttgtgcaccggatacggccatatcgtacccgtgtgtccgttcgggggattcaaatggcacgcgatctgtggtgaaccataaattttttcgtgctgctcgaaaggcagacatgaatttacgcccccaggccaagcttttgcgagcggaggtgatatcaagtaaatacc

SEQ ID NO: 509788 - DNA, 115 bp, Homo sapiens
  misc_feature (48)..(48): n is a, c, g, or t
  misc_feature (72)..(72): n is a, c, g, or t
ccaaccaggtggtgtgagccgcgggggctgccagaagcgggaggggtncactgccggaagagcagctgcccnccgacccctcatttgtggcctttagtaaacactgtgctttgta

SEQ ID NO: 509789 - DNA, 288 bp, Homo sapiens
  misc_feature (213)..(213): n is a, c, g, or t
tgctgaagtttatcctttagtaggttttttgagaagggattggctaacattcatctgaattctcacctgtttaaaatgtttggctattggctgcatgtggtggcttatgcctgtagtcccagcactttggagcgcaaggcagaaagattgcttgaggctaggagtgcaagactagcctgggcaacatagcaagacatttgtgcatactaactnggtggtggtggtggtgcatatttgcagtctcagctacttgggaggctgaggcaggaggatcgcttgagcccagga

SEQ ID NO: 509790 - DNA, 704 bp, Homo sapiens
agcgggttgaacaagatgggtgcggtggatctgacttatgctccggtctcgatcctgaacacgcagacgcatctccccgctgttggcttcctccccacaacccgttcccgtctctcagactctctggttatatgcttttgccgctgctgctgctgttatccatgtgactgctgtccgtgcgtatgtgtcaggatgtcgcccggggtgtctgcccgtctgccacctcagtcatgttctaccgactgaaattcctgacctattctcctgtctggatcggttctgtccccatcctatattgacttccggtgcacgattactattgcgaactggctatcgactggactcgtgatggagcctgtgctgcggcgttgcgctgttccctcacattggccagcttcctgcgtgcatgcaagctgcgtggggcttataatgccccgtgttgatactcccctgtccagatccggagttcaaacgaaatgggtgcttctcgagcaactgacatggctgcaatgcgaatacgatggaactcaatatactagattcaaggctggctgtgcgatccttgctgaatagactactcatgactagagagcatgtaacgtggactcgcttaagggaagaaccacgtaactcacttgccgaaagagcatggatcggaatgatcaaccgcgcgaaagtgggttccgttcatgaaggaaaaatcc

SEQ ID NO: 509791 - DNA, 840 bp, Homo sapiens
gagcggaatggaccgatcgatccttacagctgaacaaagtcagccacaaatgcagactaccagccggttacaattggagtcagagtcccgaatgacatgggcttgttaagtgctgtgctcggcatgtctggtacggggcccgctttgctttccctggtggccacttggattgtagtcctcttgcgggtggcactgttctgtggctgcgtggacattgataggccctcagcgtggcacacgatacatacgcttccttgacgaccctagtttctcgcaaaactagcccaagactattgagtactccgtcattcaactgtgatccagtgtccttcgaagtatgtcatctagtggaactggcctctttcttctgtccctttactggggccctcgctgctgggctagagaggcgttctagcagacaaccggcgccaggtctagcgggccatgcactctttgcgtcgcactttacagatgatctcacgcaatccttgccggggccaaatgggggccctgagcctgtcaagtgagttatacaggggctggcccagaaaagccggcgaacggcgcggttcccaagaaagcccatatattgataacgctcaatttcctattgggaagccgcggttgctgctcgacttgcttgatgggcgaaaacttggcttaggaacattccgggatcaaagttccgtaggggcatcgcgctagtgtgccctgacgccgttgttcgtggcctccttgggtgtttggcctgcctctggatgtgcccttgtgtacgttttagcttccgaggcacccttggagcaccttgccagtctatttggctttccccagtcaagaccg

SEQ ID NO: 509792 - DNA, 119 bp, Homo sapiens
ccccagcttctttagccaaggagcatggacctgcctcacctgcacgttggatgcacctgcgcctcacctacatttcacctgcgagcactcatcgacagctcacaaccgcatcacccgtt

SEQ ID NO: 509793 - DNA, 248 bp, Homo sapiens
  misc_feature (7)..(7): n is a, c, g, or t
  misc_feature (75)..(75): n is a, c, g, or t
acgtganaatgacatcacctgctgaagtggcacactgcctcttctcccagacagtgtctccgtgtgctgccagcncgacgacgacttccccgcgggacactgtgtgccaccacaggctggggaagaccaagtacaacgccaacaagacccctgacaagctgcagaggagccctgccctcctgtccaatgccgaatgcaagaagtcctggggcaggaggatcaccgacgtgatgatctgtgccggggca

SEQ ID NO: 509794 - DNA, 621 bp, Homo sapiens
gatccagaatggcccattcttgaataggattcacagtttacgaccccaatggatcctcaccagcctaatatctaccttagggttaggtacgaggtccatacgcggtgtgatcataagtttcctgcccgaaattacgtcaacactcttgccacgcattgtctgtacacctttatgccgcttgatccgtaggtgtcgccaaaggacgctaagtgcaggctaaacgcacctatgaggcgccggcccaaatagcattacacctaacgtcacttgttgcctaggtaactacacgcgggtcaacacttgcacgtgtctgcgcggtctgcctatcatactttctctcacaccgttgacactctaaatctcgagggaagccctacctgtgtgcaccacacactttggtcaatacctcaccattgtggccacgtctctggcgacgtcccaacttccagagcacagcttcttccctacaaagtggcgccacaggtctgggaaacacccgagtacacaggtgtgcccatccacgggcgtagggctccccaagtcggcctttgtgatcacccaacctttccttagcaaccgggcacccattcttcaaaaccactcggcgggaaagaacatccc

SEQ ID NO: 509795 - DNA, 571 bp, Homo sapiens
atcccagcacttagggagaccaaagtgggcggatcacttgagtgccagggttccagaccagcctagccaatatggcaaaacccagtctccactaaaaatacaaaaattagttgggcgggttggtgcatgcctgtaatccaagctactcaggaggctgagacatgagaatcatttgcaccctgaaggcagaagttccagtgagccgagatcacaccactgcactccagcctcagcgacagagcgagactatgtctcaaaaaaaaaaaaaaaaaaaacttttgggggaaccgggggtttttacctctttcaaaggtccctccatattaacattatgttttcccaggggggaaaggctactttaccaaggggagaaacgtggggccaattatggccttaattcacagggatcaaaggcgcaacactcctgcactttgcaacgccccagttgacatttgttttcccattgcgatagcagcaggtcaccctccgggaatatccctgtcagaatatattacccacttgggaacacctcacacaatccaccttggcgaactcctcttacaacgctgcg

SEQ ID NO: 509796 - DNA, 147 bp, Homo sapiens
ggggtagtgggcgtggagtagggcttcttctcgtagccctgtagttcttcaggttcagggtcatctggcaggtctcgcaatggaagcatgctttatgccagaacttatccagacaagaaccacacgagaacacacgccagcacaaga

SEQ ID NO: 509797 - DNA, 418 bp, Homo sapiens
taatactctcgagcacatgtggtagtggttaccacactgaataatatcgatgaacttgaccatcatcacagaaagttcacctagacactgacctaggtgattgattgtgttcgtgtggaggtgtgggagacagaggtatggctctgtcatccaggctggagtgcaatggcacaatcttggcttactgcaacctctgcctcccatgttcccatgaggaatgctcgaaccttagcctccagaatagctggtactataggcatgcaccaccacgctcggctgatttcagtattccagtagagacagtttcaccatgttgcccaggctggggtcaaactcctgagctcaggcagtccacctgcatcggagtcccaaagtgctaggattacaggtgtgagccaccgtgcctgatcctaactga

SEQ ID NO: 509798 - DNA, 165 bp, Homo sapiens
tgtaccaggtcagtcgctttggccctccgaccaaggtgcatgcgccagggcacctggtgagccgggcatagcaaatgcctggattcaaggcgcgtccccgagcccgaatattcaaagttcagcgatgttgcccgaggggcacacggcagccgtggcgtgtgagtt

SEQ ID NO: 509799 - DNA, 267 bp, Homo sapiens
  misc_feature (44)..(45): n is a, c, g, or t
  misc_feature (88)..(88): n is a, c, g, or t
  misc_feature (93)..(93): n is a, c, g, or t
  misc_feature (97)..(97): n is a, c, g, or t
  misc_feature (114)..(114): n is a, c, g, or t
  misc_feature (159)..(159): n is a, c, g, or t
  misc_feature (161)..(161): n is a, c, g, or t
  misc_feature (214)..(214): n is a, c, g, or t
  misc_feature (243)..(243): n is a, c, g, or t
aaatttttaatctttaattttacatttcctaaatatattttttnncgaaacatttgttctatagcttttccctttttttaagtaaggnatttnattnttttctgaattattttntctcgtgagtatattgatccagaaagacaacttgtattatgtgtntntcaaaatgagaaatctaaaagacgaaaagtctccaaagtctctggaatttganacactttgcataacgtataatagcctgtntaagagacagccaactatggcctg

SEQ ID NO: 509800 - DNA, 794 bp, Homo sapiens
  misc_feature (1)..(1): n is a, c, g, or t
  misc_feature (75)..(76): n is a, c, g, or t
  misc_feature (78)..(78): n is a, c, g, or t
  misc_feature (101)..(101): n is a, c, g, or t
  misc_feature (231)..(231): n is a, c, g, or t
nctggggttctgttcatggctgctttcctcaatgagtgttagtgtcatttcttcagacctttcaccaggtttttnngncgattgggggtggataaaaaaanaaataacttaacaattttgcagagatacatgtgcttccaaaataccagctgttacttatcctaaaaatgagagtacacccccttctgaagagctagagttggataagtggaaaactaccatgaaatctantgtgcgaggggagggtgtttcaacaatctcaagcaggaaggatgaagatcctctagctgccaccagagagttcattgagatgtggagattgcttggcaaagaagtaccagaacacatcactgaagaagagctcaaaacccttatggaatgtggttctaacacagcaaaaaaaaaatatttaaaatatttatatacgaaggaaaaagggaaaaaagctaggcgaataaaaaaggaaatgaaagcagcagcaagggaagaagcaaaaaatatcaagctggtagaaaccactgagggggataaacagaaaaactttctatttttacgactttgggataggaatatggacatagcaatgggctgggagggggcccaggccatgcaggttggacaacctttgggttttgcatgggttacgaaaatatatgaaacgaaaagaattgggaatactggttccagcttttagagggggaggagggacagaagaatggtggtctttcatatttattttggatctaaaaagaggggctttcgcaagaggtagtaacgggtcagaaaaggggcat

SEQ ID NO: 509801 - DNA, 177 bp, Homo sapiens
ttaattatcacaagtgctacagaggtaggtccccaaactttacaatccctcatttgttgctctcaaaaagatctctttttttaagaaaaagaggcttaagaataccgacaccagtgtataaatatccgtgtaaggctattgtacgaacatctacaattaacattctggacaaatgag

SEQ ID NO: 509802 - DNA, 295 bp, Homo sapiens
  misc_feature (290)..(290): n is a, c, g, or t
ataagattaatgggtcttacagcagaagtgagaaagggatggggcatctttaaataattttaattctcattatgcatatcacagtcttctacacacatacatctagaagttgattaaatactcagggtgttcttcgctttacagccacttaattctaaactactgagtttttcttgagaaaaaaaaatgaacttccatatgcagaatcccacttccgttcaccacctctaatccacaaatggatttcaacgtccaagtttaaatgccaggctagtgagttcagttatatnttaag

SEQ ID NO: 509803 - DNA, 269 bp, Homo sapiens
  misc_feature (41)..(41): n is a, c, g, or t
ctgagcgggtcagaattataggggaaaaaaagcccccaaanattgttcccccccccagcaaccccccgaaataatgagatcgggatcagtggagatggcgttgggggtgggaaaaaaaaatggatttatctttaaaatttttgcttaaaatttaaaataccccccgctttttaaccctcagctgccagcggtgcgcggcgccccagaacaggtaaaaggcgttggctgcaaccgaaagggtgggagaaaatgttgaaatcaagaaatta

SEQ ID NO: 509804 - DNA, 484 bp, Homo sapiens
cttgagatcaggagttcgagaccagcttggccaacatggtgaaaccccgtctctactaaaaataaaaaaattagtcaggtgtggtggtgcgtgcctgtaatcccagctactcgagaggctgaggcaggagaattgctttaacctgagaggtggaagcttgtggaggctgcagtgaaccaacggcaccactgcactccagcctgggtgagaaaaagaaaaaactaaggccaagaggaaaactacataaggcaatggtgagcagagatctgctaagacttactggtaacatctaagatgttttaattgcttttccttatcaattctgaggaataagttgcatatagtaagtttcctccatttcaggtatacaattccagttagttttgaccgttgtataatctgtgaagctaccgctccattaaagatatagaacattaccatcatgtccaaaaggttccttgtacccctttgcaatctacacacc

SEQ ID NO: 509805 - DNA, 951 bp, Homo sapiens
ggacatgagagaactactctcagttgagcattgaggggtggatcgatgatcatgacatcaatcttttctgatgacgatggcccttgacaagaggcgggctaaatcccctacagctacctcgtcgatcagggcgctgcacggaataggtggagcgtcacccgcgcagaaccatggccaggcatggtggagcctcgaaggctagaaaataaccagagggcctcctgccccccagaggacccagcgactcaaggtgacttgcggacccaggggccaacgttccacatagccttctagcgtgccttacatccggtactatcggtcaggctacatcatccagttccagtctccacgaggcactgtagcacagagcagctaggcacaaggagccccctagcacaagtgtgaccatctaaccagtccaaggaggccgggcacgcgcctaggcgaccgccgagtgacgctcgggctatcagggaggccgtggccggaagccatgccgctagatcaaagggccagcccacacatgaagcgcctcgcgccattgtacgagctactctcaagccgctagctgcactaggctccgcaaccggagaacgaagctgcatcggggagaagcttgggctggccgaggtacaactcggacagccgaaactccgctcgctcagaacgggccctccccaagacaagcggggcagcgtacaagcttcccagtggctaggaaccctggataggccaagcaagccggtggggcaaaggtagctagcactaccagaggcacgccctggaggaagccccctagggctaaagccaagggtcctaaagaacaccgcaccgaaagccccccagagacaccccagggcccagcggcccaccggaggcgaacaccccgagcgaccccagcgccagacgcaagggcccaaacgcgtagagccgtgcagcaacaccacacag

SEQ ID NO: 509806 - DNA, 397 bp, Homo sapiens
cacaggactcacgtatcaaggaaaaaacttgcacacaaaaatgaatattcaaatacacactatgggaccgggaacagcatttctactgaaatggcatatggcagctatttaaagctaacacatttatgactagtatcaacccttattgcttgcgcatattaaagcagaaacaaatgccacagttcccaaactacacatttggccaacattcccagcaaccatttctccaacatctgtgtgtccctgtggagccataaatttatacatcgaatattatttgcccaagaaactggccgcacattctaaccattaccggaattacttttatgaaggatgacttctagagcacaccataatactgctatacatcttaaatgcattttttaaacaccgcaaa

SEQ ID NO: 509807 - DNA, 161 bp, Homo sapiens
cttgaggtcgattctgaggaccccccccgtatatggagataaccaatggattcaaaatcaacaccgatgagattatacttcactcaattctgttaatggacaaatagaaggcctcattagtcctgatggttctcgtacaaaccccgctagaaactgcagag

SEQ ID NO: 509808 - DNA, 264 bp, Homo sapiens
  misc_feature (217)..(219): n is a, c, g, or t
caaaaattagaatatctacatatatatccgtgcctgttaagttttacttttttaaatttagtaaggatccattccccttcaatgtaagcttaaaataataggccaactaatatgctgtttggccttcttctcctaaagctccctgtcccattatttggccttgattaatacaggggccagtagtcagaatccgtaaaattttaataatccccttggnnngaaaagggcccagaagccaaacctaaggaattcccccttggcaga

SEQ ID NO: 509809 - DNA, 302 bp, Homo sapiens
aattcacaaaaacataaaacaaaaaaaaattaaaaaaataaaaaccccacctcaccaagctcagccaccaatttaaaaaggactgggacaatactttaaccattttccccttactcaaaattcagggcctgtcctcggaaatgctacagggatacagcccattaggagcccctgtaatggatactccctttatggtcaaggccccaagtctcattcccgggacatctaagcaccactcttaagactggtagcccccccctacaacaacaaaacaaaatttggtacatcccctaactatattc

SEQ ID NO: 509810 - DNA, 748 bp, Homo sapiens
  misc_feature (45)..(45): n is a, c, g, or t
cctaagcataacattgtgtccggccgcagttactttgatgaaaanaccgaccgtgagtgcctcccacaacagaaaactatttttagcggggtcaacgctccggggctcctcggtgattaacaactggttgagcacgcaattatttctttggcgtaaattggtctctgtagaaccgtcacgacactctctctttacatgtggacatcggacaaatggaaaagattgtttgaagacaaaacatagcacatacccacgtttgggatcgagcgggaggccgcacaaatgtacgacacacatcacgcgccggggggagcgcagccaatacatagattaggaaccgcaccacgtgctctccgcggcgccaccctcgaagaaaaagcaggggccaaaaaatgggccgccgcgcccttatatgaccagccggccagtggtgggtaaccgctcgcgcgcgtagcacacgtgtgcccaaacacatggtgggtacaaataaaagtgtgcggccacgccgcgcaaggttccgtcgcgagcaggcctccccgggtatgttccgcgcccttctccagtttagtcgcgcgaaatgcttttgtggaaaaaaattgtgggtatcccggggccgaataaataaaacgggtaagagatctagctccgccgcttcgtactcaccctactgagtcggagtgacggttgctagcagagtcactcgtcctgcgcatggtcgcccccatcaacgagttttctcgcccccaca

SEQ ID NO: 509811 - DNA, 104 bp, Homo sapiens
gggatactggacttctcaccaggcagaagagctcaggtgagaaggggcaggtgggaggcagaataagcagggacagcccctggacctcagaaggtccaggtatg

SEQ ID NO: 509812 - DNA, 214 bp, Homo sapiens
  misc_feature (41)..(41): n is a, c, g, or t
  misc_feature (64)..(64): n is a, c, g, or t
  misc_feature (86)..(86): n is a, c, g, or t
  misc_feature (127)..(127): n is a, c, g, or t
  misc_feature (130)..(130): n is a, c, g, or t
  misc_feature (140)..(140): n is a, c, g, or t
  misc_feature (149)..(149): n is a, c, g, or t
  misc_feature (153)..(153): n is a, c, g, or t
  misc_feature (170)..(170): n is a, c, g, or t
  misc_feature (176)..(176): n is a, c, g, or t
  misc_feature (182)..(182): n is a, c, g, or t
  misc_feature (192)..(192): n is a, c, g, or t
  misc_feature (198)..(198): n is a, c, g, or t
acggggattggtgcataatattctaaaatgaagacattcangctatacaaattacttccaagtntacatgaggtatgggaagattncagtaggtgtattatatgcacggtaccaaatgctgaccagngtngctccatttnttaaatctngaanagggtttctgtacttanctggtnggccangtatgccagnggtagnggggtaccgagctcgg

SEQ ID NO: 509813 - DNA, 519 bp, Homo sapiens
  misc_feature (339)..(339): n is a, c, g, or t
acggtttgccgtgttttcacccttctttgttctccaccggtctgggcagggtctgaggactccggagagcaaggcatgggtccgcctcgtgccgcaggttcctggcccacgccagccgtacccagtagcacaatgggtgagctctgaggacttcacaggggccccatcccctcacctagatgagggctaaccttggaatccagacaaaggtggaagtgacctagatgtgacctgaatgagctaatcatctaatgagagccagccctttgtcctgcccacatgaagggctttgctctacgcactgacaagttggacggctttttattgctttgttgccanttatctgaacatgagaggctgtaaggtgtaatctgcgagccctgcgcccagactgaaccagggcctcccttgaacatgagtattagacaaatgaaataagaacttatcttgcccagactatataatggcttggaaatgcatagtttcctgaacgatctcaataaaatacttttaaaagta

SEQ ID NO: 509814 - DNA, 732 bp, Homo sapiens
  misc_feature (134)..(134): n is a, c, g, or t
  misc_feature (262)..(262): n is a, c, g, or t
  misc_feature (264)..(265): n is a, c, g, or t
  misc_feature (269)..(269): n is a, c, g, or t
agcgggcctcgcgcggcagcgactctggcaggcgctgcagtgaagctggacccgcaggcgggcgtgcgtggagcgggggccgcggccgcgccgcagagatgtgactcgggccgaaggccagctggagcgtcggngctgcggggccgcgggggtcgaatgttcgtggcatcagagagaaagatgagagctcaccaggtgctcaccttcctcctgctcttcgtgatcacctcggtggcctctgaaaacgccagcacatcccgangnntgtnaggctggactcctccctcagtacgtgtccctgtgcgacctggacgccatctggggcattgtggtggaggcggtggccgggggcgggcgccctgatcacactggtcctgatgctcatcctccttggtgcggttgcccttcatcaaggagacaggcgcaacgaagagccctgtgggcctccactttctgttcctcctggggacctgggggctctttgggggcttgacgttttgctttcatccatccaggaggacgagaaccatctgcgtctgtccgaccggttcctctgggggcgttctcttttgcgctctggtttctcctggctggtggagccaggcatggcgcgtgcgggaggcttgggtgcggcattggcacggggcccacgggctggcagttgggtgggcttggggctgtgcctgatgctggtgacacgtcatcatcgctgtgcagtgggtggtggtcacc

SEQ ID NO: 509815 - DNA, 680 bp, Homo sapiens
ggagcggaggtctctcgagctgctgacgatggtcggccgaacgttgtcgcgtgcccgggccagatatctctgctctaggagctgtggcccgtgggcaaccgtggatttctggagcgcgcgcccgtgacgacccccagttttggggcgcgcgctctgatatcgggtggcggtgctgcctcgagagcgcgtcaggaggcttctgctgagcacgtagggccgtgtcgcggctcgttgctgctgggaaggttcgaggattggggtcctttctggtctggtgacgttcccgggcatccgtgggctcggcctggagagaaatccaatcagctttgctgtctggcttgcggttcctgctcctctgtgaggggggcgagattgcccgttctcctcgaagaatgccgttacttgaggcccaagtacggtgcgggtgcttggaatattagaagtcttaagaactcaggagaagcacgcagaaatacatgcaacatggtgactggaaccctacggactctgctatatgagataattccctaggagaacagcatctacatttgaagagtacatccgacgtaaaggcacggtctgtcccagaacaagaggatgacaggaatgtctggactcactggactctaaaggggccagaagcccttcaggagttccagcagacagcaccaataccatgg

SEQ ID NO: 509816 - DNA, 144 bp, Homo sapiens
aatactgtatacatgtaggagaatactgtgtgagaatactgtaggagaatacatgtaggagcaatactgtaggatgaatactgtaggagaatacatgtacagtaggagaaatacatgtaggaggaatactgtagagacgggtac

SEQ ID NO: 509817 - DNA, 554 bp, Homo sapiens
tgctgagatgcataccttttaccagcagcgtgtcatgcaagctgctcaaaagagcaacttcatgggtctagaaatcatgagataaacccccaatggtgacaggccatttggttcttccattctcccaggttttcctaagcatttttttttaagagaaaggtactgcgcctttatcatacaggtacagcagttttaaagggacaaaattcaagtcaagacagttaccaactctaatcaatacgattaccaaagcacgacagaggattaacaagaagcacaatcgtcagagaaccacagcaggagtcgggcatggctatgctatgtgcgtaccaccagtctagagccagccttcggtggagagcctggactggattggctgaagatagccggtgtccctgtaccaaagcgcttggacagcagaggagaagtcttagtcacttaccctcagaggctacccctgaggtctggaccaggtgttggttacgctcacactcttacacctgaaggttcataacgattatcttatgaggatgcttcacatggacgcagaaact

SEQ ID NO: 509818 - DNA, 740 bp, Homo sapiens
  misc_feature (159)..(159): n is a, c, g, or t
  misc_feature (162)..(163): n is a, c, g, or t
  misc_feature (193)..(193): n is a, c, g, or t
  misc_feature (263)..(263): n is a, c, g, or t
  misc_feature (269)..(269): n is a, c, g, or t
  misc_feature (271)..(271): n is a, c, g, or t
  misc_feature (275)..(275): n is a, c, g, or t
  misc_feature (321)..(321): n is a, c, g, or t
  misc_feature (332)..(332): n is a, c, g, or t
gcttcgacagagtcctgctcaatgatggaggctattatgatccagagacaggcgtgttcacagcgccactggctggacgctacttgctgagcgcggtgctgactgggcacggcacgagaaagtggaggccgtgctgtcccgctccaaccaggcgtggcncgnntagactccggtggctacgagcctgagggcntggagaataagccggtgcctgagagcagcccagcccggcaccctggccgtcttcagcctcatcctgccgntgcagncngggnacacggtctgcgtcgacctggtcatggggcagctggcgcactcggnaggagccgctnaccatcttcagcggggccctgctctatggggacccagaagcttgaaacaacgcgtagaactggggtcccagccgatagtgtctacggtccggtgaagacgacatggtgggggtgctggcgggctcctggggagtcttagcctgaagaccgggggcacctatggacctgggcgatgcgcctgacaccctgggccccgcaggcgggacacacggcgccccaagaagacgggcttctccccacgcccccggggcgcgcccggcttcaaggaagggctcgcgggcccgccattggcagacttttcgcgcctgagtgcggatcccccacaagaaaaccgccgtcacaggggccggccctgccggagggacagcccgattccatcggaaacaccgtccaggttcccgtcacaat

SEQ ID NO: 509819 - DNA, 104 bp, Homo sapiens
cgctcttcggtggctcatggtgtggcccttcgtgtggctcgtggagggctctctgggatggctcgtcgcgtggctcgtggtgtggctcattgaggtggcgcaga

SEQ ID NO: 509820 - DNA, 109 bp, Homo sapiens
tctgcgttcatcagaccagcgtcattgtgtgacacttcgttggactgctgtttttgataaccaacaagaggtcaattatagaaatccgctgtatgggacgaagactgcg

SEQ ID NO: 509821 - DNA, 114 bp, Homo sapiens
cggggaaacctgaacacccggcttcggaagctggacgagcagcaggagttcagtgccatcatcctggcaacagctggcctgcagcgcatgggctggcacaaccgggtggggcag

SEQ ID NO: 509822 - DNA, 241 bp, Homo sapiens
taggtgtgaagcgacgtaacacgagaaagcacatatccaaggtgcacccatacactacctgtcaaaaaggcttcgatacgggattatcctatttattacctcagaagtttgttcttcgcaggatttcctctgagtcttttaccactccagccttgcccctaacccccaattaggagggcactgggccccaacaggcattaacccgcttaatccccttagaagtcccactccttaaacacat

SEQ ID NO: 509823 - DNA, 740 bp, Homo sapiens
tggaacacttcaaaatccctcaaaaacggtttattatccaagtgagtttgagagtcccaaggggcttatcggtaggattcctggtagcagagcgcgggacaccagtggcctccaaaatatttgggactcgcagcgaacgatgggtcagctaccagcagggtccggtcatactgggatgaggatgtctttagatctccttcttggaacgcctacatccacatattatctggtaataggccaccagggtcttgcggacgatgggacctggacgagatacgcataaactctggggccacgtagaccaccacccttatacacgggacacaggatagtctacaccagcaaatcagttcctatgcccgaaaacgcaagaactgggtcctccagcaaggtctttgatacctgaaaagcggggtcgacggattcaaatactattatccagggggcccgaccgcgggtaacaaccttgtgtagtgagaacccaatgtgccgcagtttgggacagaggacgccccacagaagtgtacgcatgatacattacttagtggcgcatcccagaaaagaaaccgcttgtaaccgcgaatcgttgcatgagcggagacacacccgtgtgagaccacagagaatagtgagactcccgaagttcacacactcggaaactcattaaaacgtgtgttccggggggaccagggtaaaccgcgggaaaaccccgggaggattcttggcacccatgataaccc

SEQ ID NO: 509824 - DNA, 112 bp, Homo sapiens
atttaattttttttttcctttgagttttgtacttcaaccagcctacaagctggcccttgctaacaaatcagaaatatgccaattaatgattaaagactgtgattgcccccca

SEQ ID NO: 509825 - DNA, 200 bp, Homo sapiens
attcgcggccgcgtcgacccaacatggtgaaaccccgtctctactaaaaatacaaaaattagccaggcatggtggtgcatacctgtagtcccagctactcaggaggctgaggcaggagaactgtgggagaacctgggaggtggaggttaaatccagaggggcccgggcacataaacagttggttgctcggccgtgtatta

SEQ ID NO: 509826 - DNA, 408 bp, Homo sapiens
tcgcgcacgtgtcatcgggtatgcaatcatggtgtggtggactcacatcgtggtaatctcatgcactttgggaaggctgagatagaaggattgtttgcgtcaagaggtttgagagcagtctaggcaacatagagccccaactctaccaaaaatttaacaattagccaggcatgatggtgtgcacctgcggtcccagacttacttgggaggctgaggtgggaagatcactagagcctgaggaggtcgaggcagccgtgagccgggatacatgcccctgcactcgagcctaggtgacagagagaaagcaaaccccagtctcaaagaccaaaacaaaacaaagacacaaggagccatataaggttcagggcagcagaactcaaagacaaccagcgcatctgaaccaaatct

SEQ ID NO: 509827 - DNA, 433 bp, Homo sapiens
  misc_feature (84)..(84): n is a, c, g, or t
  misc_feature (289)..(289): n is a, c, g, or t
  misc_feature (362)..(362): n is a, c, g, or t
gcacaaggggattgcagcactcggtccgatttccccttgaggcaggcttttgctgatccatattcgctggtgtgtgcgtgatgngagagtctaagaagtcaagcaacaagtactttacaggaaaagctgaacagaaattggagtaccctcagagtactaagaagacgaaagttggattttaaggcccacccaggaggagggactcttgtaaacacaagttctgcttgagaccatgagagatgaaggtaaaccagaagtagaccagccctgaccaaccaaacctaaagtntagcctgggaattcatgtctatgttgttctctccaaagacagaggacaatcccatcatcttaggattctctgncaattttttcatacagtgtttggggttttaaggccaaagtccttcagggcttcacaggttaaccgggttcc

SEQ ID NO: 509828 - DNA, 430 bp, Homo sapiens
  misc_feature (26)..(26): n is a, c, g, or t
tcacaaaatgtcatcctggcacattntccaggaggaacggttttatttataaacaaataatcggagcattttcatttcgctatgatgatcgctgtaattggcagaatcacagtcgcgctggggctcgaggctcccggaggccggggaggtaggcacggcgcggaccaccctaggatcgccgccagagggcgccacgcgctccgttcgcgtctgctgctgccctgatgaaaacgctcacagcgcacgcgatacagacggagcaaatcctatgaacttctccagcccagtttagaacaagggaaaggggagcgcgcggtaccggctgtccactccgcggtcctcctagctcaagtcaccctgagtcttcccccagctgacaaaggcgatcggacgcacagccaggacccagaaccgtggatggatcactttg

SEQ ID NO: 509829 - DNA, 898 bp, Homo sapiens
  misc_feature (348)..(348): n is a, c, g, or t
ccgagggggcttttttgcccctccgggttgtttctcccccccgccctctcccgtgtcagttatcggtggaagtccttccttgcaccaacagtcaggatctcttcttcttgggaccactcatgtgaacaagcacggcacccacaagtcgatactttcctggggggttcttcctctcaccggtggcattcaaccctttcgggggtctttctataaggagagtcaatcgggtatgctcgagtcatgtgattgccagcaaatagctcgccccccacattacgccgcagcacgcactcggctggcgccacgcacaaaatctccccggttggagtgaaggcttcttctcccggnggattcccttacatgggggggaacactaccatcaggacactacgcaagcacagagatccgtccgcgccacccgtgcccccatcgccgaccattaggtggtggctcgcggaagacgcaatcccccgggtaacatccccttgggggccacgccgctgcgcacgcatcccaccaccacccggtcggagtctccgcagttcctcagacaaagcctcccactcccctggggggggggcggcgtggagtgttcagagcgcacccctgtgcgcgttctgatcacccgaggtctcggcctgcggcttttggccaatgtattctgcactttcgttcatgcaccgcctgtttgcggggcgctccccgctgtttcatcacgcccccggcccctcccccctccagtaggtctttttacacacagggggcctgtggggtctggtgcgtgccccccaatattcagagcccgtatatatcatcacccacgccaggccctccggggggtccaccccctcctttgcaaaccaccccccccccgccgatcgcccccccgcccaacatc

SEQ ID NO: 509830 - DNA, 157 bp, Homo sapiens
cccagtagtatctgcatacgtcccttcctctatatgcagaagttgttcaaagtcacagcacaagttaatggcagagcccgattatataaattccctgtagagcatagagttggtgagtcactatatatctctacgatatatggggcacagcttgcaa

SEQ ID NO: 509831 - DNA, 603 bp, Homo sapiens
taacataaaataaacccttagcacacccgtccacggggaagcaaagcctaagctgaccccggccacggggctggggggaccacatccaaggcatgaagtactggcagcacggggagcttgcaaaaaacggggacatgaatgtggtgggctgtctctgggcacgcaatgttgtccggggacagagcatgcggaaacctacaggcttgaaaatgaggtgttggcttgatgggcaagatttcagctgctctggctcacactacctctccagcaatctgggcacaacgcaggcacctgggcacatcccagctatgccatactattatctggttgaacgccacaactcaacagttttacccgtggacttcaccctgtgagagaggccctcctgtgcatgtgaagccctgccaatgacacagccgggagagcccctaggagggcgtgtcctcctaaggggggaggaaggggggctaaggaggctgctggctgaacatgcgatctggcagtcaataacgcacaggtggggggcctgacctcaaattataggactcctgccagggctgtttgactaaagtggcaaggcaatccatatcaaggtcgctgtgc

SEQ ID NO: 509832 - DNA, 252 bp, Homo sapiens
ctgactgcacaccactgctctggaggcgtccagggcgctcacggaggagctcccgcggcatctggctgcccggcacctcattgagaagtcagtgcgtaagatcgtctccttgcttggccgcgctccgaggctgaggtggagcagcacctgtccgcgagagccccgctcacggggcacagctgctaaccaagagagaccatgcttgcacttccggaaccatctgcttggtgactctgtggcgctcctctaccc

SEQ ID NO: 509833 - DNA, 284 bp, Homo sapiens
tttcccaactgtgcattcacgacataaagatacactatgggaccatctggtgcataaataccacttcctgtcatatataggctgacatgcactgggcactacacaatgtgatgatacctgcagctccaaagttccttaagaggatctgaccctggcaactgatgagggcaaaacgttcatccaagctgtgggcaacagaatggaggccacatggaaagctttcaccaggtgaacaccaggttcatagaggctagtaacattctcctgcacaacacaacacacgt

SEQ ID NO: 509834 - DNA, 1349 bp, Homo sapiens
  misc_feature (1130)..(1130): n is a, c, g, or t
gtgttgttccaccccatcgggtggggccttcatgtagttgtggcgttatttctatgactccaccgtggtggtcggtttgtttggtcccaccccgccgtgtgtgatgttgggttatgcttccgtgatggatggcgcctcccctcactttgtggtgtggtgccctcacatacaggaggggtgttcttctcgtggacgaaaagtttgtcctccatgcggaagtgtgtggttctccccacaatatgcgtgtctctatggagattgtctctcctctgggggtagtttcttccactgctgcagacctctatcggggggagcaccactgtattgtctcccgcaccccctcttttctggggtaagcccctgtttatactcctttctcttctctcgatcacccttcttgacgttggggccacacatcgggttgggggtctaacatacacagggttgtatacctgttttctaacacgtgtggcacaacgcaaacagggggtgttggtggcagctgtgtggtgctccgccacccaccactctgtgtgaagagtctccctccccgacccccttctgggagattttgggggcgcacacactgttgtttgataacctgtgtgttacacacaaggcggggcacagacgactttccccaatcataggaggtgtgtggtccaacaacacacagagaggcgcgcttctggctgtccacaagttgtatatgggagcacattgagtgttgtcacagaaagaacctctgttcaaagccccactctaaaagaatatattgtgtgtggtacacaactcttgttgtggtctttgtagagggtctattataggccacctgcgtgattgtcccaacgcgtcactctcccacaatggtgtgtcccgcagcgcccaccgcgagatacttctggggggccacccatcggaggtgttatatgaggctctccctcttgggaatattttgggagagcaccacagtgtttaaagccaagtgttgggagcttctctcgaagagcctctcctcggggtgtttatagtgcacagtgtgaaatatgttggcacaccttcttaaggaatattcttaaagagtgtcccacttgtgaaaggaaatgctcttacacgtctacacagagacntcttgtgacaccgtaccaagaaatatatgggccactcgtgcccaatttctcttgtaagaacccggggcaatctcggggtggggtgaatataaaggaattaccaaaacctgcaccagggggaagattattataagaggctgtcacaagatcccaccccccctgtgaaatactcccccaggcgtcccctctctggttaagaacccaggtacccccgggaaa

SEQ ID NO: 509835 - DNA, 272 bp, Homo sapiens
tgcagcgcaggcgaccagaggaccccggcaccatgtgctggcggacacttcggtcacttatgaagcatgttaataaatgtcacgataaaaaaaaaaaaaaaaaaaaaaaaaaaaaaaaaaaaaaaaaaaaaaaaaaaccccccctttttttaggggggggggggggggggggggggggaaaaaaggggggcccgggggggggggaaaggggggggggggggggccccccacccaaaaagggcccacaagagggggggggggtgaaccacgac

SEQ ID NO: 509836 - DNA, 488 bp, Homo sapiens
tgcagattaagcggctggcacagcctggacagtgaaacaggaatccgcggcagcgctgtcaagtgcaatgattacatataaaaaacaaaatggaacctggcctaagaatgtggcacagcttgcccagccctttcctgataatattctgggagaaactgcaccaggcatgacccggatgttcccggcactactagccatgcatcagcaaggggaaatggggaacgggaagaacagaaatgaaggagcgcgtgcgatttcagattcgacgcaaggcaaaaacgctgcatttgtggatacgttaggcggaaagccttttttgcaggatcggcttgagattattgtggacaagcgcagacataagcttgcactgattagcggtaacacgattattcggaattacgaggtagggcttgggggagatcgcacgccagagggctcgtttgtaatctcagacaaggttgttaatccaaatggtcgctccaacggcg

SEQ ID NO: 509837 - DNA, 431 bp, Homo sapiens
  misc_feature (34)..(34): n is a, c, g, or t
  misc_feature (68)..(68): n is a, c, g, or t
  misc_feature (72)..(72): n is a, c, g, or t
  misc_feature (74)..(74): n is a, c, g, or t
  misc_feature (82)..(82): n is a, c, g, or t
  misc_feature (87)..(87): n is a, c, g, or t
  misc_feature (92)..(92): n is a, c, g, or t
  misc_feature (104)..(104): n is a, c, g, or t
  misc_feature (115)..(115): n is a, c, g, or t
  misc_feature (119)..(119): n is a, c, g, or t
  misc_feature (121)..(121): n is a, c, g, or t
  misc_feature (123)..(123): n is a, c, g, or t
  misc_feature (130)..(130): n is a, c, g, or t
  misc_feature (140)..(141): n is a, c, g, or t
  misc_feature (149)..(149): n is a, c, g, or t
  misc_feature (151)..(151): n is a, c, g, or t
  misc_feature (171)..(171): n is a, c, g, or t
  misc_feature (173)..(173): n is a, c, g, or t
  misc_feature (177)..(177): n is a, c, g, or t
  misc_feature (208)..(208): n is a, c, g, or t
  misc_feature (213)..(213): n is a, c, g, or t
  misc_feature (227)..(228): n is a, c, g, or t
  misc_feature (231)..(232): n is a, c, g, or t
  misc_feature (235)..(235): n is a, c, g, or t
  misc_feature (244)..(244): n is a, c, g, or t
  misc_feature (254)..(254): n is a, c, g, or t
  misc_feature (257)..(257): n is a, c, g, or t
  misc_feature (267)..(267): n is a, c, g, or t
  misc_feature (271)..(271): n is a, c, g, or t
  misc_feature (274)..(274): n is a, c, g, or t
  misc_feature (280)..(280): n is a, c, g, or t
  misc_feature (289)..(289): n is a, c, g, or t
  misc_feature (390)..(390): n is a, c, g, or t
  misc_feature (406)..(406): n is a, c, g, or t
  misc_feature (415)..(415): n is a, c, g, or t
  misc_feature (418)..(418): n is a, c, g, or t
  misc_feature (430)..(430): n is a, c, g, or t
ctggtccgcctcggcccgggggcggccatcagcnccctcggcctcggctcgaagggcggggagctgcncgcncncctcggtncgaangaaancctccccttaangcacgtacgcncgcncngngcgcggngcccgcagtnngcaccgcncnctccttgcagaggagccgancncgcncagggaccgcacgcacggagctgcaccgganctccnggaaagcataaagnngcnnggncacgcagcngccgcagcanggnagcgcaccgnagcngcngcagcngcaatgggntgcatcgggaaaagtaagaaggaggaccagcgcaacgaggagaaggggcaggtgaggccaacaaaaagatcgagaagcagctgcagaaggacaagcaggtntaaagggaaaagaaangaatgatgntgntgggtgctggana

SEQ ID NO: 509838 - DNA, 174 bp, Homo sapiens
tggttacgtgtagaccgagcatgctgtcatcatcctacaatgtgcgcgtcggattattccgtgattattcgtccaaaatatcaagaggaccaatgttgtgaaaccctaccctagatgtagccaggtattttacctatctgtgttttgtgagtttttctgttgttccaaataatt

SEQ ID NO: 509839 - DNA, 890 bp, Homo sapiens
gactagcacgtagacacacggagcatatttcacctccgctaccataatcatcgctatcccacaccggcgtcaaagtatttgagctgactcgccacactccacggaagcaatatgaaaatgatctgctgcaggtgcgtctgagccctaggattcatctttcttttcaccgtaggtggcctgactggcagtgtattacgcaaacgtcgatcactagacatcgtactgacacgacacgtagctacgttgtagctcagcttccacgtatgtcctatcaataggagctgtattagccagtcataggaggcttcattcacctgatttcccctattctcaggctacagcctagaccaaactacgccaaaatccatttcactatcatattcatcggcgtaaatctaactttcgttcccacaactacttatctcggcttatccggaatgcccgcgacgataacgtcggactaccccgatgcatacagccacatgaaacatctatcatctgttaggctcattcatgtctctaacagcagtaatatgaactaatttcaagattgagaagccttcggttcgaagagagaagtcctaatagtaagaacgaagccttcagtaaccgggagtgactatatggatgccccacctacagacatcgaagagccgttgctacatctggacacaacggaagattcgacccaaggggttaagcaaccaggctccagactttcagacacaaaaaaacaaaagttggcggcgccaaaaacttataacaccgggcgggcccattgacaggccgggcccgaccgggagggcggtcacaaaaccgggcacgggaaccaaggcgatgcaccgcacccaccgccggtaacaacgaccagcacacacacacacacccac

SEQ ID NO: 509840 - DNA, 332 bp, Homo sapiens
cccccccccggggggggggggttccccgcccccggggtttttttttaaaacgcccccccccttttttttggggccccccggttccccaaaatttttttcccccgggggccatggggggttggggggtccccctttaaaaaacccccctttttttttcaaaaaaattttttccccccccccccccgggcccccttttttttttaaaaaaaagggttttggggggggggaaattaccccccgggggggggggggtttttttttttttttttttttttggggttttcttttttttttttccccccccctttcccttttttttggggcttttttta

SEQ ID NO: 509841 - DNA, 93 bp, Homo sapiens
gcctggtttagtgctgtaattgtcttattattttttttatatatatatttcttggagtaaacattttaaataaacaacaacattgtctactgt

SEQ ID NO: 509842 - DNA, 1191 bp, Homo sapiens
  misc_feature (439)..(439): n is a, c, g, or t
agcggagtgggcagtagtaagatccttcgcactgcaatgcactataggggcgctctctcggtgtgggcccgttttagactgatcgtgtgatgcttgcaatagaggtagtctggaagcgtctaagcctagacgggcattgtctcgtgaggcatgagctgatcaattggtcagcccgacatgacttgagcaaacctgtcagatcgaggcgtaggaggtcacctcgagacacggtgctggacaagaagacaagctatagacctagtcagaggtaatgtgcctgtaaaagacagctatgtcgtaacattgtgcacaagatccccggtgtcttgatgactaacagatcttgcacatttaacctgattaaccgtagaaatagcggtagttgcatatactgccaagaggatacgacgtttgcatcaacaatcgctctgggaaggcnccgtttacaaagatcgtccatctatccacaggattgtcaccatttaagagcgaaggttgaagaactaaaagaggcttgagtgatctccttgggtatgtgtcttgctgaaagatagaattggatctttcactggacacaagatcgaatcaaaggagtggatttagacagagaatatggtatttcaagaattcgagaggtgcgctgtaccattatctcttaagactagagagaattgtacttcgaagtggattacattgtgtttctaatcattcacggattgacgtcattataaggcaaggagttagagatcggtcgtaccacagggtagacactatagtaggtggacatcccatgaagtgtattgtcttgggaaccaacgcgacataaccaagataggtaaccaatctattaattaaagaatattgggaagcattgttacaccttgggagagggctttagccttaggacattgccatttccatggctatggatgcaaatatccttaactctaggggctaagaggcgaattccgattgggggaattgtttaggcgaatttaaccctacttggaaaggttaacatgggaaagggaacgaggctggtcagacgcaatgccagagaatgtgaaactaggacatttttaaaccaatagagatttctcttcagaagggggtaaagcgtaccgttggccttaaaggcggtactagactaaaagttaggaaaacagtggaaggttcaaaaagaatttgggg

SEQ ID NO: 509843 - DNA, 100 bp, Homo sapiens
tctagcactgtgcctggcatataaaagatacttagtatatatttattccctgaggggctgcgccagccccgtgtgctgctatgaaacttctaaaactagg

SEQ ID NO: 509844 - DNA, 339 bp, Homo sapiens
gcaagtctcaggagagtactgtgatgtgggtcatgtcagtcaagtgtagggactagtggaggagcggctgcatttgaagagcaggtaggtgcagaccaggtcatttatcctaagaagttggccctgtagcatgtagattaagtatgccacgtaggttgcgggcaactgaactgggcttcctgtttctgtgtttggtttgaccatcacagtgttgaagaactgttgaagtgaataccttgcagtttgctacagtttcccccggtctcccacattactctggcctccttacctcatgtaggttgcctgaccctctgagacctgtgtttgcttgtaccgctg

SEQ ID NO: 509845 - DNA, 341 bp, Homo sapiens
agttgatgttatcggcagcttactgttatctcacagactgagggcggtggccagtgtctggggcactgaatataacaatcagaagatcagatatctacttcaggaaaattgtagaaaaagggagggatggtgggaagctttggtgaaattacttgttctgatttctgcatgccttttaagttgctcttttcccttggaaatcatgggagtaatgtgatcaggtttaacacttttataacctcattcgagggttcttcacagcccttcactgctgcgacttcactaaatgggagaattgagaaagagaaacatgttttaagccataggattgatgtcgacgc

SEQ ID NO: 509846 - DNA, 358 bp, Homo sapiens
gaaatgagaaccagggtcggtaggggaccacagagtagtacaggtccagcatctgcccccggaagggaactactagcgggcggcccccaccagccggctcctctgaaagggcactctccagtccttccgtctgacggaggcagcccaccttgaccgggtcgcaggaactcggcccaccagtacctgaagatagggaagcaagaccaaggaatatggtttcctgatatgtttggtgatcacagcatctaaaccaggactttatagaaaagtggaagggggtctaattcactggaaaacaagcataaacctggactgcccaggcgaaggacacgtggtcaccctactgataggtctcccc

SEQ ID NO: 509847 - DNA, 681 bp, Homo sapiens
atagcgttcagaggatctcagataagcaggagaagtgaatatgagctcagacttgaaaactgaggaggagcataccaagggacaaggaggagaaaacaataagtttccaagtaaagaaggtataaaaggttagaagtgtactgataaacttagataggctttgaggcctttattacagcccaactgggcttctgtccatgacctaaaagatatttaatgtcagtcagccttgaaatgtaggaataaaatggctggcatctaagcagctttagtacaagaggtttatacaaataagcgaaggattgtatagcttccttctctttttttttctttttctttcttcagtctgacatgaactcaagttatccctaacataggtctacctcaaagaaatttcaggattattcagataacatggatatgtgccaaatccttagagctgttaagatgataatttcctgcgagataagcaggagaaaaaagcaaagagacgaagaacaaaaactctggccctcaggactccagagaaccgggaaggaggaggatttaaaacttgattcctattattctaacaaatggcagcatgaccataagcaaaaccagctcggtcaaactgacagcatcagatggtgaccttatctgaacagtgtagttcacttttattgtggctctgaagagagg

SEQ ID NO: 509848 - DNA, 1347 bp, Homo sapiens
gagttcctggcagaagcaactactactgacgaagccattgacaacagatgatctgaccattaagtctggctgactcacaggtcactccttgcgaagctggcttcagctcagcgtggcaacaacacacttgacacttgactgctcactgagcgcgagcatcaactccctcaagacttcttaacactcctgacagccacactcgcaccacacgtatgcttcgctgcaacacctctgacacaaacgcacacacacgcacagaaacacgcaccacacacgacagaacaccaaacagaacaagccatcactgactgaaactacccactgctcctctcgcctcgctcactctcccctaccccttccatactcaactccattggagtgagtctcccgatgctgctacggcccattctcccacatctcccacttctatttccaacaactgaagctgttccctaccacacttaacaccttatccgcaactcttcctaccaccacaccaccacaacaacacgcaaccagaaaacccaccactctctgccaagagcaagcgcagccataggaccacccagagaaaacaaaacccctcctaccaccacccacacccccacccctgagcgaccccccgcacagcccccacccgaccacaccaacccgcgcgccccggctcgtcgacaccaacaccccgaccccaccaaagaccacaccacccggggacacacagcacaaccccagcaaacacaccgacactcctcaccccccaccgatcaaacccaaccgccccgcaggacaacacacacacagaccttactccgacaccaaaccccacagcgccgcacgcccgagagcgccccatccaaccggcgacccaccaccccaccgcgccgccccctccccgccacgatccaccacatcaaaactaggcccgcccccacacggacggacccaacagagagccacagacaacacgaccagcccacaaccgaccccaacacacgaagacgaagaccaccaacaccaccagaagaacgacataaaccaagcaccagacaacaaagaacgaagccaacaatccaaacaccaacagacaaccgcagcgacatgcacccaaactcctaaaccctacaaactcctcacacgacactcatactcttactctactagccacatcttctatccccgcctatcacatccaccaacactactatatcacaccgtcgcaccctaaccacaatactgtcacatactacacataatagctaagcagtcaaaaatcaaaaatcgcatatcaaatagactaacactctacatctcaataactacaaccgtacactatcaactacttaacat

SEQ ID NO: 509849 - DNA, 511 bp, Homo sapiens
atcccagctctcagggaggctaagaggcgggaggatagcttgagcccaggagttcgagacctgcctgggcaatatagcgagaccccgttctcccaaaaaaaaaaaaaaaaaaaaaaaaaaaacattgtgtcggcgccgcgcccgcgggcccctcggaagaagagttttcgaagacaccaatgcggtgggggcgcgcgcgcgggcgcccaagagggtaaggggaaatggggccacaaacgctgtggtatcaccaatagagagagagactccgggcgacatagagacaaaggggcggggagtttctcacccaccaaaaaaaaaaagcgccgcgcggggggggaacaaccgcgagagcgcggttctggagaaaacaaaatctcccagagatggggagagtctatcgaggagggcgatcaattacaggggaaactcatcaaaacagcgggggagatccacaacggagaaggaccgcaaatatctcaaaaattaacgccccccgcccgcgggtcgt

SEQ ID NO: 509850 - DNA, 797 bp, Homo sapiens
tagctggtgcggcctgctgtgtgtgctgctgtgatgtggctgcctggcactcctgtgtccccgccgctccccgtccccggtgctcctatcccctgcctgctgtccccgtgcgtgagctgggcatatgctgccaccctgctggctgcctgtgcctgtgtgacctgctgtcttcctgtgtgttgatgcctgctgttccccctgctgtgtggcctgtgtgttgtgtgctttgtgtgtccactagcatgtcttgccctgctttcacctgctgctgtgtgactgctgttgcatcttctcccgttcccactccttctgtgggcccaatgatgctgcttggagcagctttgcatgtgctgtgaagccgatgctgagctgcttctgctttgccctgtggcttacgatccatgttgcatgcacctgattgtgccacacggttctgtgtccactgtgccatgtgccattctgacggctaccttgtctgctttgcctgatgctcctttgagaccattcttgctcggaggtccattgcactgcttgctgttgatgtgtgccgtgcatgccttccatgtgactcttgcttgtgtgtgtgactgccccttggctgggtggccaaaccctatgaggcccccttgggactgtggatgtttgtggctttggcccttgctgtgtggtggctggctccctgtgggattccgccgagatagcccaatgccccccctcgggggtcccttgggggactggaccttgttgctcccgacccttggaagtggatgggccccttggtaggctttgaacttgag

SEQ ID NO: 509851 - DNA, 478 bp, Homo sapiens
tatcaaattcatcttcagtcagagtctcccaatccccttccgtcttgaaccttaaactacatctgcctgtgggtccccagatttccagggccctgtagcttttctcagtataaaggcttcttccatggctggggtgagcagcctgagacatctgcaggggaggctccctagaaagagctgggtctttaataatctcctcccagggtgagagaggactgaaaacttacaggaaattagctctgataacagacccccttttcccacaggtgccaccccaggattcccacccattcacaaacatacccataaattgatgtgtccacactcctcccaggactaggcaccaccctcaggtgatctacctgcctcggactcccaaagtgctgggattacaggtgtgagccactgcgtccagtgtctcagttttatttttttctttattcaggtagacatatcatttagaaggtgctagagcatc

SEQ ID NO: 509852 - DNA, 349 bp, Homo sapiens
ccacatgctttatattttctggggttacactgtaaatattcttcactgaggcataataaatttgctacctatattttaagaagcttacttacatatacatatgataaaacaaactcagtgttacaaatttttataggggcaattattaaactcaaactgctgtttacttaaactgttatatttaagagcacaaatatcctaaaaatgaacgattatcggttactataaatatcttagaaacaaagctggttatatgcaggtctatttaaaaggttgtaaacagtttgaaaccacaaaaccgttttactaccttcaaatactgtggataattttaaatagtgctttacca

SEQ ID NO: 509853 - DNA, 914 bp, Homo sapiens
  misc_feature (1)..(1): n is a, c, g, or t
  misc_feature (40)..(40): n is a, c, g, or t
ngctcctacagctggcgctcccccctccccggattgttgngtctcccccccccgcctggtaatggggccgcccaaaatggcccctttctgtaaaaggtttaatgatcaataatatgaaaggaggtgggtgcgggccctattttgtcacaccccccctgtctgtatccgaattggtggaagctttcgaaaagaagaccgtgtttataagggtcggaccctgttacaagatatattattattccgtacgacgccgcgagtagtctctttttcaagcagagagacgggttttctaacctccctcaagagggccggcccccttatcaagaagcccccccccgtgcgtaatacccctcgtaaccccccgcgtgtgaaaaatcctcgcctttacacttgtttaaacgccccctcttgttcaccgcggcccttttctaatattcgccacgctcaccctacatgggctacaacagtattactctgtggcgactgcgatatatagtcgttgaaaaccactatctgtggtgagaaaatatacaaagaatgttaggacttcgagtacaccaagtgactgacaccaccatggttcgcggagagcccgcgctaatacaaaggacatatacgacaaagactagcgcatactagaagaagagtcaataaaactctactcctctttggaaggagaaagcaaaggaaaagatgttagcgcctccgaaaaatgatggcgacgccgccaataatacataagcccaacccttttgggaccaccaccaagctcaaaggggccccacaagggcacccacccttcgtgaggcgaaagaagtggaagaaaagagcccgacggaggacaaaaaaaaattctccacaagcttccaaaaaacaagggaccccctcaaacaaaatcctgggcggacataaca

SEQ ID NO: 509854 - DNA, 531 bp, Homo sapiens
  misc_feature (10)..(10): n is a, c, g, or t
tttttgcctngcggatcatcataaaagctgctacccctacccaagggttagaaacaccttacggaagaaatacaggcacacatgagagagacacagcttggcagattgtgttcatggccaaaaaaatacttgtcagcatgcttctctgagttcgtggaaacttttttgacaaagaggttaatgtgagtcttctgccacgtgacaaactgttgtttgcgatcatcttataatcatatatgtcattttcatgcttttctgagttttcccagtttattgctgatgatagcttttaccaaaaactaatgaattgtaggaagtttatgtcgcatacataaagaaaggaaacaaacacttcttattgctcttggaagatgtatttaattcaaattttacaatttggattcagcatgaattgcaataaatggatcttcggcagagttactaatagaaaactgagctgtgccatcactggaaacatagactttaattcctgtacaactgtcaccaactttatctccgcaaggcaaaaag

SEQ ID NO: 509855 - DNA, 644 bp, Homo sapiens
tgtacctgcctccctggcctgccgccaccgtcccagccacgtcagacactgtgttttcccgggctgtgaaccacctccccgttttttctcaggctcatgccttcaggaaatgctccacctcccgcaagtccacccccgagtctgcaggaggcttgtggagcttgtcgctcctccgcggccgccacctcatggctggtggctctttgggcgttcgttcctaatgcagatagaaagttgcccatcagcaaaactcacgggacggaggtgagcacctcggccccccagcacaggagtgacacaccgctacattgtacgacgtgggctcgcattccacggatgtttgccgtccacgaacgggggccacgacggagcactgcgcaccgcctcccatcaagcagcaccgagccagtgcgcccctcaggcagaacttgctagggcgcgctactgatggccgagggccgcacctcccagcagacccgcagagacaccgcgggctatcaaaaacagtaggcgaggagtgccccacacccccactgcgagaaaggacttctgcggaggcacacagctctgctatcgcttcaccccccgggaaggaggggaaacaacaccccgccgggggggggaagttggcgccccacataaca

SEQ ID NO: 509856 - DNA, 473 bp, Homo sapiens
  misc_feature (105)..(105): n is a, c, g, or t
gctggtcatcataaagtgtacctaaccagtagaacctacgagatacgccctgaagagacccgtgaattgggtcatgcaaaaaatatgtcgctgttctcagtcggnaacttttgccaagagtaatgtgagtcttctgccacgtgacaaactgttgtttgcgatcatcttataatcatatatgtcattttcatgcttttctgagttttcccagtttattgctgatgatagcttttaccaaaaactaatgaattgtaggaagtttatgtcgcatacataaagaaaggaaacaaacacttcttattgctcttggaagatgtatttaattcaaattttacaatttggattcagcatgaattgcaataaatggatcttcggcagagttactaatagaaaactgagctgtgccatcactggaaacatagactttaattcctgtacaactgtcaccaactttatctccgcaaggcaaaaag

SEQ ID NO: 509857 - DNA, 1260 bp, Homo sapiens
cgggttacgggatcgctgagggggttcgtgctggctcccagtgaggcgtgaacctgcttgaccatgagcctgtgggcttcatcgcgggccggccagctggcctatgctctggcgctggggcttcacggcttgctggcatcctgtcggctcacaagataatagccagctccccagtaaatgaacctgcccacggtgtcctgcgctcaggaagatgggtgtgaacctgacacgcagtctaacaaggagacggtgaagcacagcgacgtcctgttatctggctagtgaagccacatatcatccccgttcatccttggatgagattggggccgactgtgcaaaggccaagacacatcgtaggatctccgtgatgccggctggtgtcgaccagtcagctctagatggagaaaagaacgcgtgatggacattaccagaccaggaccccaaatgcttgattcgcctgcagtgtaccaacaagcacctgatggtagatgcacggaaggccgcgaacaagtcgctaccggcccaaggcgcaaccccgaagtgccacctgcggaaggcgacgggaacaggagcacagcctcaccttgggcacaaagcatcccatagagcccagcaggcaaagaggcctaacctgagcaccagaagcgctcgcgcacagaacagcaacgaaccagtcggcaacggccgagaaaccaggggcacctcaagcaggacacaaccacagggcacaccagggaaccaagaagacagatatccagatgaggcaaccggcggacgacgccaactaagcgcccagaaacgacaaggcgggagcagccaagacatcgggacaccaacagccacagggagaccacacgcacccaacaccgacacgagcggaggggaacacgaagggccaaggagagacagcgaacaacacaccggcacaaaagacaagccacacacaaagaggcagcaacgggaaacagaacggaccacacgacgcgagcgcagagcgaaaagagggggacacacaggatgagtgaggacaacagcagccaggggagggagggaagacacagagcgaaacaccgaacgcgcacgacggaagccgacgaccgtcagaggacagccggagagcgtggaacaaccggggcaacacgggcacccagacacgagagacagacgaagggaaggcacaccgcaggaggccagcgaacagaacagggaccagccgaagcgagcgccaggagcagagcccgaccgacagctggaccgagc

SEQ ID NO: 509858 - DNA, 203 bp, Homo sapiens
ggcgggtgaaaaaggttagaagccagatacttaagagaagaaacccgaagccaagaagggtttattcttggttgcaagggtaaaaaggggaaccctaaagctaaaaagcccaagaaggggaagccccacttcagccgcaacccctctctttactagaggaatttgcaggatttccgacctgtccacgtatctcagagaggcca

SEQ ID NO: 509859 - DNA, 133 bp, Homo sapiens
taatcaaaacaaacaaaaacacaaaacacattctaaatactagagataactttacttaaattcttcattttagcagtcatgatatcataggtcctgtaggcttgtacctggggaatatccaccatattattgc

SEQ ID NO: 509860 - DNA, 449 bp, Homo sapiens
cgcttcgcgcttcttgctggaaatctgggccgcgatgcggtccagatcgcgctggccctggctggagagcttgcggccaccgtccgcgtgccgctcgatcatcttgatggcttcgagggcctggacggccttgcgggtggcgctaccgtcggcccggcagaagtgggacggtcgcacaccgtggcgctggcggccaccgtagatgcggcagatcgacccgatgccggccgggctgtggtggtacaggcggcgcaggatcgaggcacagcggacgtagaaccagtccgggtcggtcggggccagctccttgaacttggcggtcttgatcagatccacatactccggcaccttcagctttccagacttcttgaggaaaagggcaacaccctcaaccactttgtcttgatcaacgtcctttacggtgattccaggcatcttcactgcggccg

SEQ ID NO: 509861 - DNA, 165 bp, Homo sapiens
ccacgactggttttcatttaaggagtggtgttggtcggggctgattgctttcccctggccttttgccttggttggtgctgctgttgctgggtggttttcccgggatggactgtttactggtggttattgtttaaggtttactggggtttggtttttttgttcctc

SEQ ID NO: 509862 - DNA, 407 bp, Homo sapiens
tctgtgccgcagttacgtcgatccatgtatttggtatgtgaatagagctgcagtgaacatatttgtgcatgtgtctttatggtcagtaatgattaatattatgcataatccaaaactgtacttattaaacaataacctcccaagcccttctgcccacaagctctgcctcctgggttcaagtaattactcatgcctcaggctcctgattagctggaattacaggcgcaggccaccatgcttggctaacttttgtatctttatccagagactaggtttcaccatgttggcaggggtggtcttgaactctgtacctcaggtgatacatccgtcttagcctcccaaagttctggtattaccggcctgatccatggtgcctggccagtatcttgtctactcattctgtaaac

SEQ ID NO: 509863 - DNA, 182 bp, Homo sapiens
gggctggcgaagagagatcggggtgcatggtaagcagcgcctcaacagccaggacatgtaggcaacacgagcaggcacagctgcgtgcaccaactgtccacactgctcacacaagccaggcccgcagtgccttcggagagctagcaggttacattcaggcagatggccctcttcccaccagt

SEQ ID NO: 509864 - DNA, 164 bp, Homo sapiens
gtttcggtcgctcggaccatcgcgcgaaggtgtgtcgatctccacccgctgggtcagcctcttgtttaaggcctcaatctcctcgtcctccagggagtctgtcgttgggcggtggtcacactccctgaagatcttccggtgcatagtctgtcgtccgacgcgga

SEQ ID NO: 509865 - DNA, 173 bp, Homo sapiens
aacgcacacgttattttctctgtatctgagtacggagcgaaacgattgatttggcggctgggagttgcagttcaattctcagcattaagaagaacacgaagcggttcgcacgcgtgccggtttatttgatgtgtcgcatatgggcgaatttgaagtgaaaggacaagacagcc

SEQ ID NO: 509866 - DNA, 391 bp, Homo sapiens
  misc_feature (391)..(391): n is a, c, g, or t
actgtccaaggtgctgaagaattacaaataaatcaggttttatccattcctcaaagacaaaaccactgaagaaattattgaaagtgttatgatagaaataaggagaaccatgagggaataatataagtagtgaacaagtaatttatttttattaattttaattttaatacaaaatttagatttaagcaatcacttgtttcagcagtgaaatactctcatgggtcagactctcctgctagaatttaggtagtagctcattttacaactacagcaaaataagccaaacagtttgtgctgccaaataagaaatctatttcgattagtgtcaggcctagggctttttcatttacttgaactgcacatgcaaggattaagtctccaagtttggtgn

SEQ ID NO: 509867 - DNA, 225 bp, Homo sapiens
cctttccccctttttttttttaaaaccccccccccgcttaacccaatggttaataaagggaaggcccaaaaaaaccccgtttaagatttttttccaaaacccccccttttttgaaaaacccttggggcccttatttttggcttcaaacggggattttgggggggggccattccttttaattaaagggaaaatttcatggtccaaaaaaggaacccctttttccca

SEQ ID NO: 509868 - DNA, 125 bp, Homo sapiens
ttttgaggttgtggtgcgtcctgtagtccaagtagctgggatacaaacatgcgccacaacatccagctaatttgtgtatttggagtagagatcgatttcaccatgttgtcaggcttgtttcgact

SEQ ID NO: 509869 - DNA, 105 bp, Homo sapiens
tcctaaccagggtcgtacgatgtataacacagaaatgtgtttaagagaggtttagacacgatggatgatggattaaaaacaggatgtgcttgaacccggagggcg

SEQ ID NO: 509870 - DNA, 330 bp, Homo sapiens
ttcatctaagcctgagagtgctatagtagtaacaaataatagataaaatcacctgacaacacaccgaaagagacccacacactacatatccaaacacattacagcataacccatactagtcgttaatgccagcacagtaggccagaccaccccccaagatacaatacttaactatccccacacgctctatacttagacggcacacagataacagtatcaaataatgacactatccttgcccaaattaatgcactggtacacccagtggctcatatttaactacccccagcttcccaatacaaactggggggaacaacactaaatcatagg

SEQ ID NO: 509871 - DNA, 378 bp, Homo sapiens
  misc_feature (53)..(53): n is a, c, g, or t
  misc_feature (280)..(280): n is a, c, g, or t
  misc_feature (343)..(343): n is a, c, g, or t
tatgacacctttacccgggatgaaaaagtaggagaattgcttgggcccgggangtagaggttgcagtgagccaagatcgtgccactgcacactcccagcctgggcaacagagagagactccgtctcaaagaaagaaagaaattgcactaattccttaacatcatctaatatccagttcaatgtacacattttcctggttgtttcatgaataactttttacagttggttcgtttgaaccaggatccaaacaagatctgcctcagcctcctgcgtagtgggnattacaggcacttgccaccatgcccggccaatctttttgtatttttagtagagacggggtttncaccgtgttggggcaggctggtcttcggaacttct

SEQ ID NO: 509872 - DNA, 545 bp, Homo sapiens
cctagccagtaatatgagtctgtgtgctgaggatgagaaatggggtggtgggcagatgcctctcatttcccatactgctgcaaagctgggggacgtaagagtagaggggatatatgcggatatgttgtgtggctaggtgagaatggaaccgtgtatatgccccccaaaagcataaacagagccgtggtggttggataacaatgtagacacaaaagctatttaattaatcatgtatggcagagcaagagaggaatccgggacccatcttgtaaagaaagagaaataggttcaactattctttctttctcaagcgaataccaaggttctacgtgacgataccacctcatctctgtttagaagatgcacaattatcaatgctgaaaaccctcacatggaagtgacaaaatatgcaagaattagtcattggggctcagattactcacacttaacctgcgatgctaattatcctctgctcctccaggtctcctgagcagattaacatcctaagttccaaggaaagtcaaaaggctacaaggaagggcagg

SEQ ID NO: 509873 - DNA, 385 bp, Homo sapiens
tgcagggccttctgaatcggtccgagagctctctctctgccttcttggtcttctcctcgatagtcctgcaggctgtcggtgctcagcggtgtgggaacttcgtagcttgcttgcctgtgcgcgcttgcgcggaaatggcttcaagacgattatacccaagaagcaagccaaagctatggggcctaccccgagtagcctgacagggatattcccagcaaagcagtctgccctatggcgtgcctagtcccagtgttactagccagtccagggacacttcagggtatggccagagcagctatgctactaatggtcagagccagaacacaggctatggactgcagtcaagtccccaaggatatggggccacctgtcgggctagtcgggg

SEQ ID NO: 509874 - DNA, 149 bp, Homo sapiens
agccggtcccctagttagaagttcactagcagcatactcataaaagcccaaagcgaaacacctcaagtgtccatcaaccgatgaatggataaacaaaagtgtaatatatccacacaatagaatcttattcgtcaataaaaaggaatgaa

SEQ ID NO: 509875 - DNA, 1268 bp, Homo sapiens
gcgcagtgagtgaaacacgtacctgcgctggatgtgcctggtcttgcagtgatgctggtggtgactgctggtgtgtgctgtgggcttgtgtgtgtgacctgctggctggtggctggtggcctggtgtgctcagagtgggtgggctttggagatcagagtggtcgactgctgcttctgttgcctggactctggtttcctgccctggagcaatgcctggggcctggtctggcagctggtgcctgccatggatgtccactgctgggcgcgggcatctgtgatagcctgaggcgctacagaaccatgctagcctggcttggagaacgtgtggctctggatcacctttctggtgcgatcccaagatcctctttctgttctacttccccgcggcctactactgcctccctgcctgtgtgggcatcagcggtgctctggatcatgcctcatcaccgatgtggctcaacctcatcttcaatgtgtgtttctattatttggagacatggccctttttggttgggtccatgagtcttggttactacagtccaggctccagcccagtgttcaccagttccccctcttcttgtgaggactggtccaggcatgcccttctggacacctgcattgatcacagtgagcagtcctctggcccagtaattgacgtggccatgtcatacgcatggttgtccactctcggccccggagcccgatggagtaacgtgtgatagactacaccctggataatcgagcccttctttattggacgcgtatgcttgtttctagaatcttacctcttacggcacatttccttaacacgggttgcttgtgctgggccctaatcaaacctgtccacatcttacttgtgtgccggtgctgattaactcccacgaagatgcctaatgaccccggacaggctatgaccctactattgctgtgcacgacagtggtgcccatcattgttaggtagcccctcaccctcactggcataagtatcgacaacaacattctccgccacctacaccgcatatgaccagccacactcactaaagcactctctctttatccttccctcttcacacccaacaaaaattctcaacaccatccgatctattcaatcacaccaacacatcactccaatcttaccacccctcaaccaagatccgatagtcctcactccgactccatcctctctctcgatcttcactgatcagcaccaacacctacatctagatccacacaacattctcattactcactatcattactcccctcac

SEQ ID NO: 509876 - DNA, 147 bp, Homo sapiens
gcaccccacaacaggccccggtgtgttgtgttcccctttgctgtttagccttgatcttcacacaatgagaactgagttgggtttgttttcatgtcaaagtaaattgactaatcccttagatgcccaagagttctgctgtgtgctgtc

SEQ ID NO: 509877 - DNA, 309 bp, Homo sapiens
  misc_feature (196)..(196): n is a, c, g, or t
  misc_feature (251)..(251): n is a, c, g, or t
  misc_feature (270)..(270): n is a, c, g, or t
gttttcgtggctgctgttgggggcaaaaattaacgcccccggtctttgcctctgaacgggaaagtctgtgtgtatgtgttttccccggaatcacacaccaccccaccctcctcctgtcccgtggtttcatcatatctctttgcataccccatgttttccccagttgtcccctggagtttggggggacatccccccncaggcatccttttcaaggggaaaccaaaaaaggcatcaggatgggtgggtttttnattgtggcaacgtttgcanccgttcccgattcaataaatattggatgaatttaaccga

SEQ ID NO: 509878 - DNA, 276 bp, Homo sapiens
aaacggattttttttttttccccggctggtttcaggctcctgggctcaaatggtcctcctccctcagctttcaaaagcccaggcccagttttaactttttccccttccctcatgccccacaaaaggttttataccctttaataaaatgcccttcataaaattggttttgttggtgggccagtttttttaactggaaatttttaattcccccttaaatttttttttttcccgtttcccttaactaattttccaataaaagatggtttttggtgtcca

SEQ ID NO: 509879 - DNA, 165 bp, Homo sapiens
tcggcaaaattcgcatcacatttaactctgtttagtgatgagtggggaggggtgggaggacagggtttggtgccggcgtgcagggtgggctagcccaaggccacccttcctgggagactgtctgggtggaagacaccgcgcagtaggggccgtgttagcatgggg

SEQ ID NO: 509880 - DNA, 939 bp, Homo sapiens
  misc_feature (480)..(480): n is a, c, g, or t
  misc_feature (513)..(513): n is a, c, g, or t
  misc_feature (516)..(516): n is a, c, g, or t
  misc_feature (529)..(529): n is a, c, g, or t
  misc_feature (537)..(537): n is a, c, g, or t
  misc_feature (555)..(555): n is a, c, g, or t
  misc_feature (568)..(568): n is a, c, g, or t
  misc_feature (587)..(587): n is a, c, g, or t
  misc_feature (596)..(596): n is a, c, g, or t
  misc_feature (605)..(605): n is a, c, g, or t
  misc_feature (616)..(616): n is a, c, g, or t
  misc_feature (620)..(620): n is a, c, g, or t
  misc_feature (636)..(637): n is a, c, g, or t
  misc_feature (641)..(641): n is a, c, g, or t
  misc_feature (656)..(656): n is a, c, g, or t
  misc_feature (663)..(663): n is a, c, g, or t
  misc_feature (669)..(669): n is a, c, g, or t
  misc_feature (672)..(673): n is a, c, g, or t
  misc_feature (678)..(678): n is a, c, g, or t
  misc_feature (689)..(689): n is a, c, g, or t
  misc_feature (695)..(696): n is a, c, g, or t
  misc_feature (698)..(698): n is a, c, g, or t
  misc_feature (708)..(708): n is a, c, g, or t
gtgctggtggccagatggagaggcgctggccgcacttcccgtcggggagagagtgtaatatggcgaagacctacgattacctgttcaagctgctgctgatcggggactcgggggtggggaagacctgtgtcctgttccgcttctccgaggacgccttcaactccacttttatctccaccataggaattgactttaaaattaggaccatagagctcgatggcaagagaattaaactgcagatatgggacacagccggtcaggaacggtttcggacgatcacaacggcctactacaggggtgcaatgggcatcatgctggtctacgacatcaccaacgagaagtccttctgacaacatccggaattggattcggaacattgaagagcatgcctctgcagacgtggagaagatgatactggggaataagtgtgatgtgaatgacaagagacaggtgtccaaggaacggggagaaaagctggcnctcgactatgggatcaagttcatggagaccagngcnaaggccaacatcnatgtgganaatgcatttttcactctngccaggatatcanagcaaaaatggacaaaaanttggaaggnaacagcccncaggggagcanccanggagtcaaaatcacannggancagcagaaagaggancagcttnttccgntgnngtctnctgtgaggaanaccgcnnantctgagcctngctcagccagctgactgtgctgcccgggcagctccagctctgatgttgcacccggtggccggctcgattggaacatgttatttgtcagtaccggctggtctttccacttcgaaatggagaagtccacattgccggtccatgtctctgcagataggcaatggcctgctcttaggcgagggaaagtgggggggggccgaaggccaacagggtggccccacacaggacgaagga

SEQ ID NO: 509881 - DNA, 873 bp, Homo sapiens
  misc_feature (536)..(536): n is a, c, g, or t
  misc_feature (569)..(569): n is a, c, g, or t
  misc_feature (572)..(572): n is a, c, g, or t
  misc_feature (585)..(585): n is a, c, g, or t
  misc_feature (593)..(593): n is a, c, g, or t
  misc_feature (611)..(611): n is a, c, g, or t
  misc_feature (624)..(624): n is a, c, g, or t
  misc_feature (643)..(643): n is a, c, g, or t
  misc_feature (652)..(652): n is a, c, g, or t
  misc_feature (661)..(661): n is a, c, g, or t
  misc_feature (672)..(672): n is a, c, g, or t
  misc_feature (676)..(676): n is a, c, g, or t
  misc_feature (692)..(693): n is a, c, g, or t
  misc_feature (697)..(697): n is a, c, g, or t
  misc_feature (712)..(712): n is a, c, g, or t
  misc_feature (719)..(719): n is a, c, g, or t
  misc_feature (725)..(725): n is a, c, g, or t
  misc_feature (728)..(729): n is a, c, g, or t
  misc_feature (734)..(734): n is a, c, g, or t
  misc_feature (745)..(745): n is a, c, g, or t
  misc_feature (751)..(752): n is a, c, g, or t
  misc_feature (754)..(754): n is a, c, g, or t
  misc_feature (764)..(764): n is a, c, g, or t
gtgctggtggccagatggagaggcgctggccgcacttcccgtcggggagagagtgtaatatggcgaagacctacgattacctgttcaagctgctgctgatcggggactcgggggtggggaagacctgtgtcctgttccgcttctccgaggacgccttcaactccacttttatctccaccataggaattgactttaaaattaggaccatagagctcgatggcaagagaattaaactgcagatatgggacacagccggtcaggaacggtttcggacgatcacaacggcctactacaggggtgcaatgggcatcatgctggtctacgacatcaccaacgagaagtccttctgacgaaacatctctggagacatgtggttctccgacacttgttggagcaccgcgctcttgtgtgagagctgtgctgaaaaaagattattatattctccgcgggaaccccaggttggtgtggttggtggacttgggcccacggagaacccaagtgttccccagggaacgcggggagaaaaaaagctggcnctcgactatgggatcaagttcatggagaccagngcnaaggccaacatcnatgtgganaatgcatttttcactctngccaggatatcanagcaaaaatggacaaaaanttggaaggnaacagcccncaggggagcanccanggagtcaaaatcacannggancagcagaaagaggancagcttnttccgntgnngtctnctgtgaggaanaccgcnnantctgagcctngctcagccagctgactgtgcctgttctgagtgagcccctcactcagccggggagccttccacctccaaagccccgccacgccagggccacggggccccggccaccaaat

SEQ ID NO: 509882 - DNA, 192 bp, Homo sapiens
  misc_feature (32)..(32): n is a, c, g, or t
taaatattagttacacattcagacattccaantgatacaaagtacttggaaacagttacagacctcaccaagctaggttagggagacatgaagtccaacagacatctgaaatagctagtgaaggcaaacatatatacaaacatagcaatagataagcttacacgaacttgacctatatactacagaggtagg

SEQ ID NO: 509883 - DNA, 102 bp, Homo sapiens
attccaggggtttccttccagctcacattttatccatttccttagatattgttgtaaatttgccttggtttgggggggtcttttgggagggggggtttcact

SEQ ID NO: 509884 - DNA, 871 bp, Homo sapiens
  misc_feature (74)..(75): n is a, c, g, or t
  misc_feature (103)..(103): n is a, c, g, or t
cacttaaagggaaccagggaccacacttgtagggcacaaacccccgcgccagacagaaagaaaaggggcagganncttcacgcgcccaataaaaaaaagaccncaggaacgagacccccacagccccaccaacaaccccaaggaaggcgcacggaggggagggaagccagcccccggcccgcttggtcgggggccctccccccttcccgatgcccacactcactcaatttttacttataatttaattttttgttttaatagtaagttctatattaacgacttcctaaagcatcccaatacggagtccactctccacgaggaccccagcaaactcccaagtaggcacacgtacacaccataacagtgccccgtggaattgggggcagtggccccctaccttcccctctctccagccctcccactcaacccctaagatccccatatagtctcaccacgaacgtatcgaagattcgatagatataagggcgatccgatattttagacctttactgagtctactccccgctccgcgagtcagcaagattgcttatatacgtacctacgcaattttatgttgcggttagttatcagtttgattctcctcgtgttcccgtacgcgcctgcagatagtcgtagcggactgccgcgcctggcctcgcgcgcgaaccctcacttccccggaccgagcacgagccccagccccagcgctgcttctcgctgccacacatcacgcccagtattcctgatgcacaactataggtttctataaagtcaatttccccatgttactctttatgcggtcgcattaactactaaactctcgttccttttcgcactatagaacataccacaccgaccacgatccagaagg

SEQ ID NO: 509885 - DNA, 148 bp, Homo sapiens
ccagtagtttgtgatgggtccagtagtttgtgatggctccccagcagagacggaatattgatctagatcacacatcacaactacacctatcacacccatcacaaactactggggggaccgtgctgaaactccctatcatggtcctact

SEQ ID NO: 509886 - DNA, 761 bp, Homo sapiens
tattcccaaaactccgcacgtgtgcggacgcagagactcgtacccatgtccctggttaactcgttactctgaacgagtgcagtgcaggcggctcgatagatggatgagcgctgtgatcgcgcctgtcgctgaggtgcgctgttagtgaccactgtcgtctcttgagacgagctctagaatacagacagagcgtgacaccgtagagtacgtaagcgatcgtcgagagcggctgcaggagagagtagaagacggcgtgggtgagacgtaatcgcttgccgcggggatcaatcctaatgtgcttaattgggctcgccattcctcatacgcacttctttacagtaaggagacgaggtcaaacgactgcaatcccttaccatcaagatcaatttgtactaccaaatggtgactgacaaacctaacgaagttaacagacgatctagcgggggaacgtaagtacttcatacgtcctagcataggctttgccggcatgtatacatatcgctaggaaaccacggcgaaccatgcgaacttccttgtaccgttagatcaagtgcgagttagtacgtacccggattggatactcgccccattgcagtaataaataagatctatcagtcacaatggatcgtcattgactagcgtcgagtgaagcttagtgccccaacagtatagggcttataaaaaacgagtattggcctatttcccggatgctactatagtcagtagggtactttcattcgataggtgaccgggggtaatac

SEQ ID NO: 509887 - DNA, 115 bp, Homo sapiens
tttgggttaaaaatcttgaatttaaaacttctacctgtagatattaagtttagcttcttagtattttatgtgtgcacagtggccttaaaagtaacgatgaaaatcttggggtgtt

SEQ ID NO: 509888 - DNA, 682 bp, Homo sapiens
  misc_feature (49)..(49): n is a, c, g, or t
  misc_feature (98)..(98): n is a, c, g, or t
  misc_feature (100)..(101): n is a, c, g, or t
cccgggcgcgacgcgctgggtcaggacgcggttctagaaccgggtgatngaactaaaccttcgccgcaccgagtttgcagtacggccgtcacccgcancnntgcctgctgtgcggttggagaaatcaggccctacgggcctccgtagtcacctctctatagtgggcgtggccgaggccgggtgtgaccctgcgggagccttccgttgccagcgaacagtgttcaagctttcactctactcagttccctgagggtcaatcgaagtattgtggaggacggcagcggagccagttgtgaagaaaggcatctcacagctcggacacttatgtgcgagccaatacacaaactggttgtcagggaaagggtactcccaaaattaggcccaagatggcaaagttgggtccaagtggggggtcagaccagctatgaatatctccaaaaagtgcacctcgtggatttttttaccgagaaaactgtggtcgtaatgtgggttttggcgttggccttattgtgacttccctttgggctagagggtttcaaacattaaagaaagctaggtgtatccgcgtggtttcagtgggattaggttggctccttctattatccaaaaaaagcatccggtgttgtgcccaggtcaaggggggaaaagattatatggatgggggttaacagaggaatatata

SEQ ID NO: 509889 - DNA, 8672 bp, Homo sapiens
gcctccacacggctccgtcgggcgccgcgctcttccggcagcggtacgtttggagacgccgggaacccgcgttggcgtggttgactagtgcctcgcagcctcagcatgggggaacatggcctggagctggcttccatgatccccgccctgcgggagctgggcagtgccacaccagaggaatataatacagttgtacagaagccaagacaaattctgtgtcaattcattgaccggatacttacagatgtaaatgttgttgctgtagaacttgtaaagaaaactgactctcagccaacctccgtgatgttgcttgatttcatccagcatatcatgaaatcctccccacttatgtttgtaaatgtgagtggaagccatgagcgcaaaggcagttgtattgaattcagtaattggatcataacgagacttctgcggattgcagcaactccctcctgtcatttgttacacaagaaaatctgtgaagtcatctgttcattattatttctttttaaaagcaagagtcctgctatttttggggtactcacaaaagaattattacaactttttgaagacttggtttacctccatagaagaaatgtgatgggtcatgctgtggaatggccagtggtcatgagccgatttttaagtcaattagatgaacacatgggatatttacaatcagctcctttgcagttgatgagtatgcaaaatttagaatttattgaagtcactttattaatggttcttactcgtattattgcaattgtgttttttagaaggcaagaactcttactttggcagataggttgtgttctgctagagtatggtagtccaaaaattaaatccctagcaattagctttttaacagaactttttcagcttggaggactaccagcacaaccagctagcacttttttcagctcatttttggaattattaaaacaccttgtagaaatggatactgaccaattgaaactctatgaagagccattatcaaagctgataaagacactatttccctttgaagcagaagcttatagaaatattgaacctgtctatttaaatatgctgctggaaaaactctgtgtcatgtttgaagacggtgtgctcatgcggcttaagtctgatttgctaaaagcagctttgtgccatttactgcagtatttccttaaatttgtgccagctgggtatgaatctgctttacaagtcaggaaggtctatgtgagaaatatttgtaaagctcttttggatgtgcttggaattgaggtagatgcagagtacttgttgggcccactttatgcagctttgaaaatggaaagtatggaaatcattgaggagattcaatgccaaactcaacaggaaaacctcagcagtaatagtgatggaatatcacccaaaaggcgtcgtctcagctcgtctctaaacccttctaaaagagcaccaaaacagactgaggaaattaaacatgtggacatgaaccaaaagagcatattatggagtgcactgaaacagaaagctgaatcccttcagatttcccttgaatacagtggcctaaagaatcctgttattgagatgttagaaggaattgctgttgtcttacaactgactgctctgtgtactgttcattgttctcatcaaaacatgaactgccgtactttcaaggactgtcaacataaatccaagaagaaaccttctgtagtgataacttggatgtcattggatttttacacaaaagtgcttaagagctgtagaagtttgttagaatctgttcagaaactggacctggaggcaaccattgataaggtggtgaaaatttatgatgctttgatttatatgcaagtaaacagttcatttgaagatcatatcctggaagatttatgtggtatgctctcacttccatggatttattcccattctgatgatggctgtttaaagttgaccacatttgccgctaatcttctaacattaagctgtaggatttcagatagctattcaccacaggcacaatcacgatgtgtgtttcttctgactctgtttccaagaagaatattccttgagtggagaacagcagtttacaactgggccctgcagagctcccatgaagtaatccgggctagttgtgttagtggattttttatcttattgcagcagcagaattcttgtaacagagttcccaagattcttatagataaagtcaaagatgattctgacattgtcaagaaagaatttgcttctatacttggtcaacttgtctgtactcttcacggcatgttttatctgacaagttctttaacagaacctttctctgaacacggacatgtggacctcttctgtaggaacttgaaagccacttctcaacatgaatgttcatcttctcaactaaaagcttctgtctgcaagccattccttttcctactgaaaaaaaaaatacctagtccagtaaaacttgctttcatagataatctacatcatctttgtaagcatcttgattttagagaagatgaaacagatgtaaaagcagttcttggaactttattaaatttaatggaagatccagacaaagatgttagagtggcttttagtggaaatatcaagcacatattggaatccttggactctgaagatggatttataaaggagctttttgtcttaagaatgaaggaagcatatacacatgcccaaatatcaagaaataatgagctgaaggataccttgattcttacaacaggggatattggaagggccgcaaaaggagatttggtaccatttgcactcttacacttattgcattgtttgttatccaagtcagcatctgtctctggagcagcatacacagaaattagagctctggttgcagctaaaagtgttaaactgcaaagttttttcagccagtataagaaacccatctgtcagtttttggtagaatcccttcactctagtcagatgacagcacttccgaatactccatgccagaatgctgacgtgcgaaaacaagatgtggctcaccagagagaaatggctttaaatacgttgtctgaaattgccaacgttttcgactttcctgatcttaatcgttttcttactaggacattacaagttctactacctgatcttgctgccaaagcaagccctgcagcttctgctctcattcgaactttaggaaaacaattaaatgtcaatcgtagagagattttaataaacaacttcaaatatattttttctcatttggtctgttcttgttccaaagatgaattagaacgtgcccttcattatctgaagaatgaaacagaaattgaactggggagcctgttgagacaagatttccaaggattgcataatgaattattgctgcgtattggagaacactatcaacaggtttttaatggtttgtcaatacttgcctcatttgcatccagtgatgatccatatcagggcccgagagatatcatatcacctgaactgatggctgattatttacaacccaaattgttgggcattttggctttttttaacatgcagttactgagctctagtgttggcattgaagataagaaaatggccttgaacagtttgatgtctttgatgaagttaatgggacccaaacatgtcagttctgtgagggtgaagatgatgaccacactgagaactggccttcgattcaaggatgattttcctgaattgtgttgcagagcttgggactgctttgttcgctgcctggatcatgcttgtctgggctcccttctcagtcatgtaatagtagctttgttacctcttatacacatccagcctaaagaaactgcagctatcttccactacctcataattgaaaacagggatgctgtgcaagattttcttcatgaaatatattttttacctgatcatccagaattaaaaaagataaaagccgttctccaggaatacagaaaggagacctctgagagcactgatcttcagacaactcttcagctctctatgaaggccattcaacatgaaaatgtcgatgttcgtattcatgctcttacaagcttgaaggaaaccttgtataaaaatcaggaaaaactgataaagtatgcaacagacagtgaaacagtagaacctattatctcacagttggtgacagtgcttttgaaaggttgccaagatgcaaactctcaagctcggttgctctgtggggaatgtttaggggaattgggggcgatagatccaggtcgattagatttctcaacaactgaaactcaaggaaaagattttacatttgtgactggagtagaagattcaagctttgcctatggattattgatggagctaacaagagcttaccttgcgtatgctgataatagccgagctcaagattcagctgcctatgccattcaggagttgctttctatttatgactgtagagagatggagaccaacggcccaggtcaccaattgtggaggagatttcctgagcatgttcgggaaatactagaacctcatctaaataccagatacaagagttctcagaagtcaaccgattggtctggagtaaagaagccaatttacttaagtaaattgggtagtaactttgcagaatggtcagcatcttgggcaggttatcttattacaaaggttcgacatgatcttgccagtaaaattttcacctgctgtagcattatgatgaagcatgatttcaaagtgaccatctatcttcttccacatattctggtgtatgtcttactgggttgtaatcaagaagatcagcaggaggtttatgcagaaattatggcagttctaaagcatgacgatcagcataccataaatacccaagacattgcatctgatctgtgtcaactcagtacacagactgtgttctccatgcttgaccatctcacacagtgggcaaggcacaaatttcaggcactgaaagctgagaaatgtccacacagcaaatcaaacagaaataaggtagactcaatggtatctactgtggattatgaagactatcagagtgtaacccgttttctagacctcataccccaggatactctggcagtagcttcctttcgctccaaagcatacacacgagctgtaatgcactttgaatcatttattacagaaaagaagcaaaatattcaggaacatcttggatttttacagaaattgtatgctgctatgcatgaacctgatggagtggccggagtcagtgcaattagaaaggcagaaccatctctaaaagaacagatccttgaacatgaaagccttggcttgctgagggatgccactgcttgttatgacagggctattcagctagaaccagaccagatcattcattaccatggtgtagtaaagtccatgttaggtcttggtcagctgtctactgttatcactcaggtgaatggagtgcatgctaacaggtccgagtggacagatgaattaaacacgtacagagtggaagcagcttggaaattgtcacagtgggatttggtggaaaactatttggcagcagatggaaaatctacaacatggagtgtcagactgggacagctattattatcagccaaaaaaagagatatcacagctttttatgactcactgaaactagtgagagcagaacaaattgtacctctttcagctgcaagctttgaaagaggctcctaccaacgaggatatgaatatattgtgagattgcacatgttatgtgagttggagcatagcatcaaaccacttttccagcattctccaggtgacagttctcaagaagattctctaaactgggtagctcgactagaaatgacccagaattcctacagagccaaggagcctatcctggctctccggagggctttactaagcctcaacaaaagaccagattacaatgaaatggttggagaatgctggctgcagagtgccagggtagctagaaaggctggtcaccaccagacagcctacaatgctctccttaatgcaggggaatcacgactcgctgaactgtacgtggaaagggcaaagtggctctggtccaagggtgatgttcaccaggcactaattgttcttcaaaaaggtgttgaattatgttttcctgaaaatgaaaccccacctgagggtaagaacatgttaatccatggtcgagctatgctactagtgggccgatttatggaagaaacagctaactttgaaagcaatgcaattatgaaaaaatataaggatgtgaccgcgtgcctgccagaatgggaggatgggcatttttaccttgccaagtactatgacaaattgatgcccatggtcacagacaacaaaatggaaaagcaaggtgatctcatccggtatatagttcttcattttggcagatctctacaatatggaaatcagttcatatatcagtcaatgccacgaatgttaactctatggcttgattatggtacaaaggcatatgaatgggaaaaagctggccgctccgatcgtgtacaaatgaggaatgatttgggtaaaataaacaaggttatcacagagcatacaaactatttagctccatatcaatttttgactgctttttcacaattgatctctcgaatttgtcattctcacgatgaagtttttgttgtcttgatggaaataatagccaaagtatttctagcctatcctcaacaagcaatgtggatgatgacagctgtgtcaaagtcatcttatcccatgcgtgtgaacagatgcaaggaaatcctcaataaagctattcatatgaaaaaatccttagagaagtttgttggagatgcaactcgcctaacagataagcttctagaattgtgcaataaaccggttgatggaagtagttccacattaagcatgagcactcattttaaaatgcttaaaaagctggtagaagaagcaacatttagtgaaatcctcattcctctacaatcagtcatgatacctacacttccatcaattctgggtacccatgctaaccatgctagccatgaaccatttcctggacattgggcctatattgcagggtttgatgatatggtggaaattcttgcttctcttcagaaaccaaagaagatttctttaaaaggctcagatggaaagttctacatcatgatgtgtaagccaaaagatgacctgagaaaggattgtagactaatggaattcaattccttgattaataagtgcttaagaaaagatgcagagtctcgtagaagagaacttcatattcgaacatatgcagttattccactaaatgatgaatgtgggattattgaatgggtgaacaacactgctggtttgagacctattctgaccaaactatataaagaaaagggagtgtatatgacaggaaaagaacttcgccagtgtatgctaccaaagtcagcagctttatctgaaaaactcaaagtattccgagaatttctcctgcccaggcatcctcctatttttcatgagtggtttctgagaacattccctgatcctacatcatggtacagtagtagatcagcttactgccgttccactgcagtaatgtcaatggttggttatattctggggcttggagaccgtcatggtgaaaatattctctttgattctttgactggtgaatgcgtacatgtagatttcaattgtcttttcaataagggagaaacctttgaagttccagaaattgtgccatttcgcctgactcataatatggttaatggaatgggtcctatgggaacagagggtctttttcgaagagcatgtgaagttacaatgaggctgatgcgtgatcagcgagagcctttaatgagtgtcttaaagacttttctacatgatcctcttgtggaatggagtaaaccagtgaaagggcattccaaagcgccactgaatgaaactggagaagttgtcaatgaaaaggccaagacccatgttcttgacattgagcagcgactacaaggtgtaatcaagactcgaaatagagtgacaggactgccgttatctattgaaggacatgtgcattaccttatacaagaagctactgatgaaaacttactatgccagatgtatcttggttggactccatatatgtgaaatgaaattatgtaaaagaatatgttaataatctaaaagtaatgcatttggtatgaatctgtggttgtatctgttcaattctaaagtacaacataaatttacgttctcagcaactgttatttctctctgatcattaattatatgtaaaataatatacattcagttattaagaaataaactgctttcttaatacataaaaacaaagaaaacaaaatattttattactaacaaacaaaaaaaataaatatgtactgggccttctttagcctaaagcgggggagatttttggagcccctctccttttaatgggggttaattttatgatcctttatttcactaatttcctagatcttggtattctggtttcgggagagagggattactcctccctgaatgggggatattatgtttttcgcacaaaataagggataaacccaagaagaaaaacatgtgaccaaatagcccaccaaaaggcccctatacttaaatatgggcccactttgtgggattttttcaaataggtaccacccccttaccaagatattaaaaaatcagctttcaagtaatggtgaggaaaaccctaaaagaaaaaaaaataacgcgttatttcccggaaatttgtttttgttctt

SEQ ID NO: 509890 - DNA, 615 bp, Homo sapiens
ttagccacagatgacgcggagaaccctaataccaaaaccaggaaaggacataaccaaaaattatatccttgatgaacatagacgctaaaatgggtaacaaaatactatctaactgaatccaataacatatcaaaaagataatccaccatgatcaagtgagtttcataccagggatccaggaatggtttaacaaatgcaagtcaataaatgtgatacaccacactgacagaattaaaaacaaaaatcacatgatcatctcaatagatgcagcagaaaaagcattctacaaaatccagcatccctttatgattaaaactatcagcaaaattggcatacaagggacatatctcaatacaataaaagccatccctgacaaacccacagacccacaacataatactgattggggaaaaattgaaagtattccctctaagaactggaataagacaaggatgttcactctcaccactcctctttaacacagcactggaagtcctagccagagcaatcagagaagagaaagaaacaaagggcatccaaatcagtaaagaggaatttaaactgtcactgtttgatgctgatatgattgcttaccttgaaaccctaaagactctc

SEQ ID NO: 509891 - DNA, 8151 bp, Homo sapiens
gcctccacacggctccgtcgggcgccgcgctcttccggcagcggtacgtttggagacgccgggaacccgcgttggcgtggttgactagtgcctcgcagcctcagcatgggggaacatggcctggagctggcttccatgatccccgccctgcgggagctgggcagtgccacaccagaggaatataatacagttgtacagaagccaagacaaattctgtgtcaattcattgaccggatacttacagatgtaaatgttgttgctgtagaacttgtaaagaaaactgactctcagccaacctccgtgatgttgcttgatttcatccagcatatcatgaaatcctccccacttatgtttgtaaatgtgagtggaagccatgagcgcaaaggcagttgtattgaattcagtaattggatcataacgagacttctgcggattgcagcaactccctcctgtcatttgttacacaagaaaatctgtgaagtcatctgttcattattatttctttttaaaagcaagagtcctgctatttttggggtactcacaaaagaattattacaactttttgaagacttggtttacctccatagaagaaatgtgatgggtcatgctgtggaatggccagtggtcatgagccgatttttaagtcaattagatgaacacatgggatatttacaatcagctcctttgcagttgatgagtatgcaaaatttagaatttattgaagtcactttattaatggttcttactcgtattattgcaattgtgttttttagaaggcaagaactcttactttggcagataggttgtgttctgctagagtatggtagtccaaaaattaaatccctagcaattagctttttaacagaactttttcagcttggaggactaccagcacaaccagctagcacttttttcagctcatttttggaattattaaaacaccttgtagaaatggatactgaccaattgaaactctatgaagagccattatcaaagctgataaagacactatttccctttgaagcagaagcttatagaaatattgaacctgtctatttaaatatgctgctggaaaaactctgtgtcatgtttgaagacggtgtgctcatgcggcttaagtctgatttgctaaaagcagctttgtgccatttactgcagtatttccttaaatttgtgccagctgggtatgaatctgctttacaagtcaggaaggtctatgtgagaaatatttgtaaagctcttttggatgtgcttggaattgaggtagatgcagagtacttgttgggcccactttatgcagctttgaaaatggaaagtatggaaatcattgaggagattcaatgccaaactcaacaggaaaacctcagcagtaatagtgatggaatatcacccaaaaggcgtcgtctcagctcgtctctaaacccttctaaaagagcaccaaaacagactgaggaaattaaacatgtggacatgaaccaaaagagcatattatggagtgcactgaaacagaaagctgaatcccttcagatttcccttgaatacagtggcctaaagaatcctgttattgagatgttagaaggaattgctgttgtcttacaactgactgctctgtgtactgttcattgttctcatcaaaacatgaactgccgtactttcaaggactgtcaacataaatccaagaagaaaccttctgtagtgataacttggatgtcattggatttttacacaaaagtgcttaagagctgtagaagtttgttagaatctgttcagaaactggacctggaggcaaccattgataaggtggtgaaaatttatgatgctttgatttatatgcaagtaaacagttcatttgaagatcatatcctggaagatttatgtggtatgctctcacttccatggatttattcccattctgatgatggctgtttaaagttgaccacatttgccgctaatcttctaacattaagctgtaggatttcagatagctattcaccacaggcacaatcacgatgtgtgtttcttctgactctgtttccaagaagaatattccttgagtggagaacagcagtttacaactgggccctgcagagctcccatgaagtaatccgggctagttgtgttagtggattttttatcttattgcagcagcagaattcttgtaacagagttcccaagattcttatagataaagtcaaagatgattctgacattgtcaagaaagaatttgcttctatacttggtcaacttgtctgtactcttcacggcatgttttatctgacaagttctttaacagaacctttctctgaacacggacatgtggacctcttctgtaggaacttgaaagccacttctcaacatgaatgttcatcttctcaactaaaagcttctgtctgcaagccattccttttcctactgaaaaaaaaaatacctagtccagtaaaacttgctttcatagataatctacatcatctttgtaagcatcttgattttagagaagatgaaacagatgtaaaagcagttcttggaactttattaaatttaatggaagatccagacaaagatgttagagtggcttttagtggaaatatcaagcacatattggaatccttggactctgaagatggatttataaaggagctttttgtcttaagaatgaaggaagcatatacacatgcccaaatatcaagaaataatgagctgaaggataccttgattcttacaacaggggatattggaagggccgcaaaaggagatttggtaccatttgcactcttacacttattgcattgtttgttatccaagtcagcatctgtctctggagcagcatacacagaaattagagctctggttgcagctaaaagtgttaaactgcaaagttttttcagccagtataagaaacccatctgtcagtttttggtagaatcccttcactctagtcagatgacagcacttccgaatactccatgccagaatgctgacgtgcgaaaacaagatgtggctcaccagagagaaatggctttaaatacgttgtctgaaattgccaacgttttcgactttcctgatcttaatcgttttcttactaggacattacaagttctactacctgatcttgctgccaaagcaagccctgcagcttctgctctcattcgaactttaggaaaacaattaaatgtcaatcgtagagagattttaataaacaacttcaaatatattttttctcatttggtctgttcttgttccaaagatgaattagaacgtgcccttcattatctgaagaatgaaacagaaattgaactggggagcctgttgagacaagatttccaaggattgcataatgaattattgctgcgtattggagaacactatcaacaggtttttaatggtttgtcaatacttgcctcatttgcatccagtgatgatccatatcagggcccgagagatatcatatcacctgaactgatggctgattatttacaacccaaattgttgggcattttggctttttttaacatgcagttactgagctctagtgttggcattgaagataagaaaatggccttgaacagtttgatgtctttgatgaagttaatgggacccaaacatgtcagttctgtgagggtgaagatgatgaccacactgagaactggccttcgattcaaggatgattttcctgaattgtgttgcagagcttgggactgctttgttcgctgcctggatcatgcttgtctgggctcccttctcagtcatgtaatagtagctttgttacctcttatacacatccagcctaaagaaactgcagctatcttccactacctcataattgaaaacagggatgctgtgcaagattttcttcatgaaatatattttttacctgatcatccagaattaaaaaagataaaagccgttctccaggaatacagaaaggagacctctgagagcactgatcttcagacaactcttcagctctctatgaaggccattcaacatgaaaatgtcgatgttcgtattcatgctcttacaagcttgaaggaaaccttgtataaaaatcaggaaaaactgataaagtatgcaacagacagtgaaacagtagaacctattatctcacagttggtgacagtgcttttgaaaggttgccaagatgcaaactctcaagctcggttgctctgtggggaatgtttaggggaattgggggcgatagatccaggtcgattagatttctcaacaactgaaactcaaggaaaagattttacatttgtgactggagtagaagattcaagctttgcctatggattattgatggagctaacaagagcttaccttgcgtatgctgataatagccgagctcaagattcagctgcctatgccattcaggagttgctttctatttatgactgtagagagatggagaccaacggcccaggtcaccaattgtggaggagatttcctgagcatgttcgggaaatactagaacctcatctaaataccagatacaagagttctcagaagtcaaccgattggtctggagtaaagaagccaatttacttaagtaaattgggtagtaactttgcagaatggtcagcatcttgggcaggttatcttattacaaaggttcgacatgatcttgccagtaaaattttcacctgctgtagcattatgatgaagcatgatttcaaagtgaccatctatcttcttccacatattctggtgtatgtcttactgggttgtaatcaagaagatcagcaggaggtttatgcagaaattatggcagttctaaagcatgacgatcagcataccataaatacccaagacattgcatctgatctgtgtcaactcagtacacagactgtgttctccatgcttgaccatctcacacagtgggcaaggcacaaatttcaggcactgaaagctgagaaatgtccacacagcaaatcaaacagaaataaggtagactcaatggtatctactgtggattatgaagactatcagagtgtaacccgttttctagacctcataccccaggatactctggcagtagcttcctttcgctccaaagcatacacacgagctgtaatgcactttgaatcatttattacagaaaagaagcaaaatattcaggaacatcttggatttttacagaaattgtatgctgctatgcatgaacctgatggagtggccggagtcagtgcaattagaaaggcagaaccatctctaaaagaacagatccttgaacatgaaagccttggcttgctgagggatgccactgcttgttatgacagggctattcagctagaaccagaccagatcattcattaccatggtgtagtaaagtccatgttaggtcttggtcagctgtctactgttatcactcaggtgaatggagtgcatgctaacaggtccgagtggacagatgaattaaacacgtacagagtggaagcagcttggaaattgtcacagtgggatttggtggaaaactatttggcagcagatggaaaatctacaacatggagtgtcagactgggacagctattattatcagccaaaaaaagagatatcacagctttttatgactcactgaaactagtgagagcagaacaaattgtacctctttcagctgcaagctttgaaagaggctcctaccaacgaggatatgaatatattgtgagattgcacatgttatgtgagttggagcatagcatcaaaccacttttccagcattctccaggtgacagttctcaagaagattctctaaactgggtagctcgactagaaatgacccagaattcctacagagccaaggagcctatcctggctctccggagggctttactaagcctcaacaaaagaccagattacaatgaaatggttggagaatgctggctgcagagtgccagggtagctagaaaggctggtcaccaccagacagcctacaatgctctccttaatgcaggggaatcacgactcgctgaactgtacgtggaaagggcaaagtggctctggtccaagggtgatgttcaccaggcactaattgttcttcaaaaaggtgttgaattatgttttcctgaaaatgaaaccccacctgagggtaagaacatgttaatccatggtcgagctatgctactagtgggccgatttatggaagaaacagctaactttgaaagcaatgcaattatgaaaaaatataaggatgtgaccgcgtgcctgccagaatgggaggatgggcatttttaccttgccaagtactatgacaaattgatgcccatggtcacagacaacaaaatggaaaagcaaggtgatctcatccggtatatagttcttcattttggcagatctctacaatatggaaatcagttcatatatcagtcaatgccacgaatgttaactctatggcttgattatggtacaaaggcatatgaatgggaaaaagctggccgctccgatcgtgtacaaatgaggaatgatttgggtaaaataaacaaggttatcacagagcatacaaactatttagctccatatcaatttttgactgctttttcacaattgatctctcgaatttgtcattctcacgatgaagtttttgttgtcttgatggaaataatagccaaagtatttctagcctatcctcaacaagcaatgtggatgatgacagctgtgtcaaagtcatcttatcccatgcgtgtgaacagatgcaaggaaatcctcaataaagctattcatatgaaaaaatccttagagaagtttgttggagatgcaactcgcctaacagataagcttctagaattgtgcaataaaccggttgatggaagtagttccacattaagcatgagcactcattttaaaatgcttaaaaagctggtagaagaagcaacatttagtgaaatcctcattcctctacaatcagtcatgatacctacacttccatcaattctgggtacccatgctaaccatgctagccatgaaccatttcctggacattgggcctatattgcagggtttgatgatatggtggaaattcttgcttctcttcagaaaccaaagaagatttctttaaaaggctcagatggaaagttctacatcatgatgtgtaagccaaaagatgacctgagaaaggattgtagactaatggaattcaattccttgattaataagtgcttaagaaaagatgcagagtctcgtagaagagaacttcatattcgaacatatgcagttattccactaaatgatgaatgtgggattattgaatgggtgaacaacactgctggtttgagacctattctgaccaaactatataaagaaaagggagtgtatatgacaggaaaagaacttcgccagtgtatgctaccaaagtcagcagctttatctgaaaaactcaaagtattccgagaatttctcctgcccaggcatcctcctatttttcatgagtggtttctgagaacattccctgatcctacatcatggtacagtagtagatcagcttactgccgttccactgcagtaatgtcaatggttggttatattctggggcttggagaccgtcatggtgaaaatattctctttgattctttgactggtgaatgcgtacatgtagatttcaattgtcttttcaataagggagaaacctttgaagttccagaaattgtgccatttcgcctgactcataatatggttaatggaatgggtcctatgggaacagagggtctttttcgaagagcatgtgaagttacaatgaggctgatgcgtgatcagcgagagcctttaatgagtgtcttaaagacttttctacatgatcctcttgtggaatggagtaaaccagtgaaagggcattccaaagcgccactgaatgaaactggagaagttgtcaatgaaaaggccaagacccatgttcttgacattgagcagcgactacaaggtgtaatcaagactcgaaatagagtgacaggactgccgttatctattgaaggacatgtgcattaccttatacaagaagctactgatgaaaacttactatgccagatgtatcttggttggactccatatatgtgaaatgaaattatgtaaaagaatatgttaataatctaaaagtaatgcatttggtatgaatctgtggttgtatctgttcaattctaaagtacaacataaatttacgttctcagc

SEQ ID NO: 509892 - DNA, 461 bp, Homo sapiens
  misc_feature (48)..(48): n is a, c, g, or t
  misc_feature (83)..(83): n is a, c, g, or t
  misc_feature (86)..(86): n is a, c, g, or t
  misc_feature (93)..(94): n is a, c, g, or t
  misc_feature (194)..(194): n is a, c, g, or t
  misc_feature (205)..(205): n is a, c, g, or t
ggtagaattgaaggcctccccccgggagatgtttggggatcttctccnatgctaagattggagatatttatctgcttatcccngcnacccccnnacccctctgctttctacacaaggcccctcagatgcctgctttttacgagttcaggaaggacctgaggcttctttcctcttggtaaagaagacacagtgcntttgagtgaancggaggcctgcatgcagttcaccaggtagcgagccacgcctgacttggatattttatagggagaagatctgaaacaactgggtgattctgcagctctggagatattcattaagccatacttcttttaatatttttgtcaatcacgctcattcctttaggtgtgaggtgggcacagatagctggtcgcagtgcaatgacacacctgtgaagtttgctcgttttcctgtcactggattgatcgaaggtcgttcctata

SEQ ID NO: 509893 - DNA, 8290 bp, Homo sapiens
gcctccacacggctccgtcgggcgccgcgctcttccggcagcggtacgtttggagacgccgggaacccgcgttggcgtggttgactagtgcctcgcagcctcagcatgggggaacatggcctggagctggcttccatgatccccgccctgcgggagctgggcagtgccacaccagaggaatataatacagttgtacagaagccaagacaaattctgtgtcaattcattgaccggatacttacagatgtaaatgttgttgctgtagaacttgtaaagaaaactgactctcagccaacctccgtgatgttgcttgatttcatccagcatatcatgaaatcctccccacttatgtttgtaaatgtgagtggaagccatgagcgcaaaggcagttgtattgaattcagtaattggatcataacgagacttctgcggattgcagcaactccctcctgtcatttgttacacaagaaaatctgtgaagtcatctgttcattattatttctttttaaaagcaagagtcctgctatttttggggtactcacaaaagaattattacaactttttgaagacttggtttacctccatagaagaaatgtgatgggtcatgctgtggaatggccagtggtcatgagccgatttttaagtcaattagatgaacacatgggatatttacaatcagctcctttgcagttgatgagtatgcaaaatttagaatttattgaagtcactttattaatggttcttactcgtattattgcaattgtgttttttagaaggcaagaactcttactttggcagataggttgtgttctgctagagtatggtagtccaaaaattaaatccctagcaattagctttttaacagaactttttcagcttggaggactaccagcacaaccagctagcacttttttcagctcatttttggaattattaaaacaccttgtagaaatggatactgaccaattgaaactctatgaagagccattatcaaagctgataaagacactatttccctttgaagcagaagcttatagaaatattgaacctgtctatttaaatatgctgctggaaaaactctgtgtcatgtttgaagacggtgtgctcatgcggcttaagtctgatttgctaaaagcagctttgtgccatttactgcagtatttccttaaatttgtgccagctgggtatgaatctgctttacaagtcaggaaggtctatgtgagaaatatttgtaaagctcttttggatgtgcttggaattgaggtagatgcagagtacttgttgggcccactttatgcagctttgaaaatggaaagtatggaaatcattgaggagattcaatgccaaactcaacaggaaaacctcagcagtaatagtgatggaatatcacccaaaaggcgtcgtctcagctcgtctctaaacccttctaaaagagcaccaaaacagactgaggaaattaaacatgtggacatgaaccaaaagagcatattatggagtgcactgaaacagaaagctgaatcccttcagatttcccttgaatacagtggcctaaagaatcctgttattgagatgttagaaggaattgctgttgtcttacaactgactgctctgtgtactgttcattgttctcatcaaaacatgaactgccgtactttcaaggactgtcaacataaatccaagaagaaaccttctgtagtgataacttggatgtcattggatttttacacaaaagtgcttaagagctgtagaagtttgttagaatctgttcagaaactggacctggaggcaaccattgataaggtggtgaaaatttatgatgctttgatttatatgcaagtaaacagttcatttgaagatcatatcctggaagatttatgtggtatgctctcacttccatggatttattcccattctgatgatggctgtttaaagttgaccacatttgccgctaatcttctaacattaagctgtaggatttcagatagctattcaccacaggcacaatcacgatgtgtgtttcttctgactctgtttccaagaagaatattccttgagtggagaacagcagtttacaactgggccctgcagagctcccatgaagtaatccgggctagttgtgttagtggattttttatcttattgcagcagcagaattcttgtaacagagttcccaagattcttatagataaagtcaaagatgattctgacattgtcaagaaagaatttgcttctatacttggtcaacttgtctgtactcttcacggcatgttttatctgacaagttctttaacagaacctttctctgaacacggacatgtggacctcttctgtaggaacttgaaagccacttctcaacatgaatgttcatcttctcaactaaaagcttctgtctgcaagccattccttttcctactgaaaaaaaaaatacctagtccagtaaaacttgctttcatagataatctacatcatctttgtaagcatcttgattttagagaagatgaaacagatgtaaaagcagttcttggaactttattaaatttaatggaagatccagacaaagatgttagagtggcttttagtggaaatatcaagcacatattggaatccttggactctgaagatggatttataaaggagctttttgtcttaagaatgaaggaagcatatacacatgcccaaatatcaagaaataatgagctgaaggataccttgattcttacaacaggggatattggaagggccgcaaaaggagatttggtaccatttgcactcttacacttattgcattgtttgttatccaagtcagcatctgtctctggagcagcatacacagaaattagagctctggttgcagctaaaagtgttaaactgcaaagttttttcagccagtataagaaacccatctgtcagtttttggtagaatcccttcactctagtcagatgacagcacttccgaatactccatgccagaatgctgacgtgcgaaaacaagatgtggctcaccagagagaaatggctttaaatacgttgtctgaaattgccaacgttttcgactttcctgatcttaatcgttttcttactaggacattacaagttctactacctgatcttgctgccaaagcaagccctgcagcttctgctctcattcgaactttaggaaaacaattaaatgtcaatcgtagagagattttaataaacaacttcaaatatattttttctcatttggtctgttcttgttccaaagatgaattagaacgtgcccttcattatctgaagaatgaaacagaaattgaactggggagcctgttgagacaagatttccaaggattgcataatgaattattgctgcgtattggagaacactatcaacaggtttttaatggtttgtcaatacttgcctcatttgcatccagtgatgatccatatcagggcccgagagatatcatatcacctgaactgatggctgattatttacaacccaaattgttgggcattttggctttttttaacatgcagttactgagctctagtgttggcattgaagataagaaaatggccttgaacagtttgatgtctttgatgaagttaatgggacccaaacatgtcagttctgtgagggtgaagatgatgaccacactgagaactggccttcgattcaaggatgattttcctgaattgtgttgcagagcttgggactgctttgttcgctgcctggatcatgcttgtctgggctcccttctcagtcatgtaatagtagctttgttacctcttatacacatccagcctaaagaaactgcagctatcttccactacctcataattgaaaacagggatgctgtgcaagattttcttcatgaaatatattttttacctgatcatccagaattaaaaaagataaaagccgttctccaggaatacagaaaggagacctctgagagcactgatcttcagacaactcttcagctctctatgaaggccattcaacatgaaaatgtcgatgttcgtattcatgctcttacaagcttgaaggaaaccttgtataaaaatcaggaaaaactgataaagtatgcaacagacagtgaaacagtagaacctattatctcacagttggtgacagtgcttttgaaaggttgccaagatgcaaactctcaagctcggttgctctgtggggaatgtttaggggaattgggggcgatagatccaggtcgattagatttctcaacaactgaaactcaaggaaaagattttacatttgtgactggagtagaagattcaagctttgcctatggattattgatggagctaacaagagcttaccttgcgtatgctgataatagccgagctcaagattcagctgcctatgccattcaggagttgctttctatttatgactgtagagagatggagaccaacggcccaggtcaccaattgtggaggagatttcctgagcatgttcgggaaatactagaacctcatctaaataccagatacaagagttctcagaagtcaaccgattggtctggagtaaagaagccaatttacttaagtaaattgggtagtaactttgcagaatggtcagcatcttgggcaggttatcttattacaaaggttcgacatgatcttgccagtaaaattttcacctgctgtagcattatgatgaagcatgatttcaaagtgaccatctatcttcttccacatattctggtgtatgtcttactgggttgtaatcaagaagatcagcaggaggtttatgcagaaattatggcagttctaaagcatgacgatcagcataccataaatacccaagacattgcatctgatctgtgtcaactcagtacacagactgtgttctccatgcttgaccatctcacacagtgggcaaggcacaaatttcaggcactgaaagctgagaaatgtccacacagcaaatcaaacagaaataaggtagactcaatggtatctactgtggattatgaagactatcagagtgtaacccgttttctagacctcataccccaggatactctggcagtagcttcctttcgctccaaagcatacacacgagctgtaatgcactttgaatcatttattacagaaaagaagcaaaatattcaggaacatcttggatttttacagaaattgtatgctgctatgcatgaacctgatggagtggccggagtcagtgcaattagaaaggcagaaccatctctaaaagaacagatccttgaacatgaaagccttggcttgctgagggatgccactgcttgttatgacagggctattcagctagaaccagaccagatcattcattaccatggtgtagtaaagtccatgttaggtcttggtcagctgtctactgttatcactcaggtgaatggagtgcatgctaacaggtccgagtggacagatgaattaaacacgtacagagtggaagcagcttggaaattgtcacagtgggatttggtggaaaactatttggcagcagatggaaaatctacaacatggagtgtcagactgggacagctattattatcagccaaaaaaagagatatcacagctttttatgactcactgaaactagtgagagcagaacaaattgtacctctttcagctgcaagctttgaaagaggctcctaccaacgaggatatgaatatattgtgagattgcacatgttatgtgagttggagcatagcatcaaaccacttttccagcattctccaggtgacagttctcaagaagattctctaaactgggtagctcgactagaaatgacccagaattcctacagagccaaggagcctatcctggctctccggagggctttactaagcctcaacaaaagaccagattacaatgaaatggttggagaatgctggctgcagagtgccagggtagctagaaaggctggtcaccaccagacagcctacaatgctctccttaatgcaggggaatcacgactcgctgaactgtacgtggaaagggcaaagtggctctggtccaagggtgatgttcaccaggcactaattgttcttcaaaaaggtgttgaattatgttttcctgaaaatgaaaccccacctgagggtaagaacatgttaatccatggtcgagctatgctactagtgggccgatttatggaagaaacagctaactttgaaagcaatgcaattatgaaaaaatataaggatgtgaccgcgtgcctgccagaatgggaggatgggcatttttaccttgccaagtactatgacaaattgatgcccatggtcacagacaacaaaatggaaaagcaaggtgatctcatccggtatatagttcttcattttggcagatctctacaatatggaaatcagttcatatatcagtcaatgccacgaatgttaactctatggcttgattatggtacaaaggcatatgaatgggaaaaagctggccgctccgatcgtgtacaaatgaggaatgatttgggtaaaataaacaaggttatcacagagcatacaaactatttagctccatatcaatttttgactgctttttcacaattgatctctcgaatttgtcattctcacgatgaagtttttgttgtcttgatggaaataatagccaaagtatttctagcctatcctcaacaagcaatgtggatgatgacagctgtgtcaaagtcatcttatcccatgcgtgtgaacagatgcaaggaaatcctcaataaagctattcatatgaaaaaatccttagagaagtttgttggagatgcaactcgcctaacagataagcttctagaattgtgcaataaaccggttgatggaagtagttccacattaagcatgagcactcattttaaaatgcttaaaaagctggtagaagaagcaacatttagtgaaatcctcattcctctacaatcagtcatgatacctacacttccatcaattctgggtacccatgctaaccatgctagccatgaaccatttcctggacattgggcctatattgcagggtttgatgatatggtggaaattcttgcttctcttcagaaaccaaagaagatttctttaaaaggctcagatggaaagttctacatcatgatgtgtaagccaaaagatgacctgagaaaggattgtagactaatggaattcaattccttgattaataagtgcttaagaaaagatgcagagtctcgtagaagagaacttcatattcgaacatatgcagttattccactaaatgatgaatgtgggattattgaatgggtgaacaacactgctggtttgagacctattctgaccaaactatataaagaaaagggagtgtatatgacaggaaaagaacttcgccagtgtatgctaccaaagtcagcagctttatctgaaaaactcaaagtattccgagaatttctcctgcccaggcatcctcctatttttcatgagtggtttctgagaacattccctgatcctacatcatggtacagtagtagatcagcttactgccgttccactgcagtaatgtcaatggttggttatattctggggcttggagaccgtcatggtgaaaatattctctttgattctttgactggtgaatgcgtacatgtagatttcaattgtcttttcaataagggagaaacctttgaagttccagaaattgtgccatttcgcctgactcataatatggttaatggaatgggtcctatgggaacagagggtctttttcgaagagcatgtgaagttacaatgaggctgatgcgtgatcagcgagagcctttaatgagtgtcttaaagacttttctacatgatcctcttgtggaatggagtaaaccagtgaaagggcattccaaagcgccactgaatgaaactggagaagttgtcaatgaaaagatggcaagttcttcaaattcatttaagtaacgtgaagtttgtgcttcaaagggtacttcccttgatctgattttctggatatgagaaatagcctcacaaggatcctgatgaactctctctttagtggacctcattaaaggccaagacccatgttcttgacattgagcagcgactacaaggtgtaatcaagactcgaaatagagtgacaggactgccgttatctattgaaggacatgtgcattaccttatacaagaagctactgatgaaaacttactatgccagatgtatcttggttggactccatatatgtgaaatgaaattatgtaaaagaatatgttaataatctaaaagtaatgcatttggtatgaatctgtggttgtatctgttcaattctaaagtacaacataaatttacgttctcagc

SEQ ID NO: 509894 - DNA, 1484 bp, Homo sapiens
gcatttgcccacagactgcggaggacgaatcagtggcccagccagacgttaaagggctgcagcggttgaggtgagaggcacctctgctacttgttagggaggggtggctgcttggaaataggcccaggggctctagacagccatcggacctctccctcctgagcttgccttactagttaggtaggcttatctatacttagaacccacctgctgtaacagaggttcttcagattaccgtagggtattcccactcttgcacttcctgtacaactacgctccccagcagcacgaacttcgctgcggccctgcagcgtgcaacttcctgctcatatggcaggacagcacaccctcggcacacttacagctcatgcctggcacgctcctctgcacgctctccctagcacacggcatcagtccagcgcgccacgcccatctaaagctttagcgcgtacctccagaacccaaattcacacgcttgttagctcacctacacacaccacagcacaagccctaggtacgtcacttcaccttaaacctactccatcgtcgctccgttagacactagtcatccgcgcacacaatagtacactaggcggtccacacaataggccgcgatgcagcatatcgccataacagcggcgcctgccctagacggccttagccctcactgcgcacgccccacacacgcgcgcttagccccacttaacccacgacgcgacttgctcgggcccacaaaaccaaaagtggctaggccttcgggtacgacaaggattactctccctcagataagaagccactacccaaattaggggccagccatacacttaggcgcagcacttagcagcatgccaccccacttagggcactaccagcacgagtcgtggccccaccaccaacaagcaccttacgagcagcaatcatacatgtatacccacccacagcatctaccactctagaccattgagggcacacgagacgggcacgtctcgcgccaacaccgagcgcttccggcgtcgcacccgcccagtatccctcagtgtgcaatccataacgcccacccacaatcaacccccccccgaatttattattatcctctttctctgccatcagaccacccactcctacacaacgacgtttactacaccctagcccgcccgggacaactgactttccctatcacaccttatcatagcaggatcactccccttttagccaaaaaacgcaataccaacaaaaactgacttcctcgcaagaactagaagtagtcataccgacactattactaacatcccacattaatacactttacagctgcaaaacctttcaactcacccgccaccacacatccatataacttttccccatatcaggactctcatcgccacaagatatcccccatctacacgcaacacaaacgtgctcttctcatccccgctatcctccaacgcctatacacccccaacagataaacatcacaccacgtg

SEQ ID NO: 509895 - DNA, 428 bp, Homo sapiens
tggtctgttgttgcgatagagaagagacacgacacttaaacagtattttttacaaaatttttgctcagctgtatgtgggacccgcttaatcttcccaagtctgcttcaaatgccaaatgatcatagaatggtccacattgagtttttcagcaacttcttttatggttgtaagaggatcagcttctgtgattgatctcccaactggtcgttgtcaacttctgatggccggtcattgcactcctcatcttcaaggctctcgtctcctttgtaaaacttcttgaaccaacattgcactgtacgtttcattagcagctccttggccaaatgcgttgttgatgttgcgagttgtctccagtgctttacaatccattttgaccttgaataagaaaattgctcgaatttgctttttgtctaacatcattttcact

SEQ ID NO: 509896 - DNA, 2246 bp, Homo sapiens
ggtgacctcaggacttccggagacgactttacaagaagttagctattccttttccacatcaaagatgagtctgctttgactttgctctgcctagataaaggtcacatacttttgattccctaatcatctattcatattttacttcccagcatagcgtgggatttccttaggtaggtatcctatgttcttttttataggatgtgaccgcgtgcctgccagaatgggaggatgggcatttttaccttgccaagtactatgacaaattgatgcccatggtcacagacaacaaaatggaaaagcaaggtgatctcatccggtatatagttcttcattttggcagatctctacaatatggaaatcagttcatatatcagtcaatgccacgaatgttaactctatggcttgattatggtacaaaggcatatgaatgggaaaaagctggccgctccgatcgtgtacaaatgaggaatgatttgggtaaaataaacaaggttatcacagagcatacaaactatttagctccatatcaatttttgactgctttttcacaattgatctctcgaatttgtcattctcacgatgaagtttttgttgtcttgatggaaataatagccaaagtatttctagcctatcctcaacaagcaatgtggatgatgacagctgtgtcaaagtcatcttatcccatgcgtgtgaacagatgcaaggaaatcctcaataaagctattcatatgaaaaaatccttagagaagtttgttggagatgcaactcgcctaacagataagcttctagaattgtgcaataaaccggttgatggaagtagttccacattaagcatgagcactcattttaaaatgcttaaaaagctggtagaagaagcaacatttagtgaaatcctcattcctctacaatcagtcatgatacctacacttccatcaattctgggtacccatgctaaccatgctagccatgaaccatttcctggacattgggcctatattgcagggtttgatgatatggtggaaattcttgcttctcttcagaaaccaaagaagatttctttaaaaggctcagatggaaagttctacatcatgatgtgtaagccaaaagatgacctgagaaaggattgtagactaatggaattcaattccttgattaataagtgcttaagaaaagatgcagagtctcgtagaagagaacttcatattcgaacatatgcagttattccactaaatgatgaatgtgggattattgaatgggtgaacaacactgctggtttgagacctattctgaccaaactatataaagaaaagggagtgtatatgacaggaaaagaacttcgccagtgtatgctaccaaagtcagcagctttatctgaaaaactcaaagtattccgagaatttctcctgcccaggcatcctcctatttttcatgagtggtttctgagaacattccctgatcctacatcatggtacagtagtagatcagcttactgccgttccactgcagtaatgtcaatggttggttatattctggggcttggagaccgtcatggtgaaaatattctctttgattctttgactggtgaatgcgtacatgtagatttcaattgtcttttcaataagggagaaacctttgaagttccagaaattgtgccatttcgcctgactcataatatggttaatggaatgggtcctatgggaacagagggtctttttcgaagagcatgtgaagttacaatgaggctgatgcgtgatcagcgagagcctttaatgagtgtcttaaagacttttctacatgatcctcttgtggaatggagtaaaccagtgaaagggcattccaaagcgccactgaatgaaactggagaagttgtcaatgaaaaggccaagacccatgttcttgacattgagcagcgactacaaggtgtaatcaagactcgaaatagagtgacaggactgccgttatctattgaaggacatgtgcattaccttatacaagaagctactgatgaaaacttactatgccagatgtatcttggttggactccatatatgtgaaatgaaattatgtaaaagaatatgttaataatctaaaagtaatgcatttggtatgaatctgtggttgtatctgttcaattctaaagtacaacataaatttacgttctcagcaactgttatttctctctgatcattaattatatgtaaaataatatacattcagttattaagaaataaactgctttcttaata

SEQ ID NO: 509897 - DNA, 8581 bp, Homo sapiens
gcctccacacggctccgtcgggcgccgcgctcttccggcagcggtacgtttggagacgccgggaacccgcgttggcgtggttgactagtgcctcgcagcctcagcatgggggaacatggcctggagctggcttccatgatccccgccctgcgggagctgggcagtgccacaccagaggaatataatacagttgtacagaagccaagacaaattctgtgtcaattcattgaccggatacttacagatgtaaatgttgttgctgtagaacttgtaaagaaaactgactctcagccaacctccgtgatgttgcttgatttcatccagcatatcatgaaatcctccccacttatgtttgtaaatgtgagtggaagccatgagcgcaaaggcagttgtattgaattcagtaattggatcataacgagacttctgcggattgcagcaactccctcctgtcatttgttacacaagaaaatctgtgaagtcatctgttcattattatttctttttaaaagcaagagtcctgctatttttggggtactcacaaaagaattattacaactttttgaagacttggtttacctccatagaagaaatgtgatgggtcatgctgtggaatggccagtggtcatgagccgatttttaagtcaattagatgaacacatgggatatttacaatcagctcctttgcagttgatgagtatgcaaaatttagaatttattgaagtcactttattaatggttcttactcgtattattgcaattgtgttttttagaaggcaagaactcttactttggcagataggttgtgttctgctagagtatggtagtccaaaaattaaatccctagcaattagctttttaacagaactttttcagcttggaggactaccagcacaaccagctagcacttttttcagctcatttttggaattattaaaacaccttgtagaaatggatactgaccaattgaaactctatgaagagccattatcaaagctgataaagacactatttccctttgaagcagaagcttatagaaatattgaacctgtctatttaaatatgctgctggaaaaactctgtgtcatgtttgaagacggtgtgctcatgcggcttaagtctgatttgctaaaagcagctttgtgccatttactgcagtatttccttaaatttgtgccagctgggtatgaatctgctttacaagtcaggaaggtctatgtgagaaatatttgtaaagctcttttggatgtgcttggaattgaggtagatgcagagtacttgttgggcccactttatgcagctttgaaaatggaaagtatggaaatcattgaggagattcaatgccaaactcaacaggaaaacctcagcagtaatagtgatggaatatcacccaaaaggcgtcgtctcagctcgtctctaaacccttctaaaagagcaccaaaacagactgaggaaattaaacatgtggacatgaaccaaaagagcatattatggagtgcactgaaacagaaagctgaatcccttcagatttcccttgaatacagtggcctaaagaatcctgttattgagatgttagaaggaattgctgttgtcttacaactgactgctctgtgtactgttcattgttctcatcaaaacatgaactgccgtactttcaaggactgtcaacataaatccaagaagaaaccttctgtagtgataacttggatgtcattggatttttacacaaaagtgcttaagagctgtagaagtttgttagaatctgttcagaaactggacctggaggcaaccattgataaggtggtgaaaatttatgatgctttgatttatatgcaagtaaacagttcatttgaagatcatatcctggaagatttatgtggtatgctctcacttccatggatttattcccattctgatgatggctgtttaaagttgaccacatttgccgctaatcttctaacattaagctgtaggatttcagatagctattcaccacaggcacaatcacgatgtgtgtttcttctgactctgtttccaagaagaatattccttgagtggagaacagcagtttacaactgggccctgcagagctcccatgaagtaatccgggctagttgtgttagtggattttttatcttattgcagcagcagaattcttgtaacagagttcccaagattcttatagataaagtcaaagatgattctgacattgtcaagaaagaatttgcttctatacttggtcaacttgtctgtactcttcacggcatgttttatctgacaagttctttaacagaacctttctctgaacacggacatgtggacctcttctgtaggaacttgaaagccacttctcaacatgaatgttcatcttctcaactaaaagcttctgtctgcaagccattccttttcctactgaaaaaaaaaatacctagtccagtaaaacttgctttcatagataatctacatcatctttgtaagcatcttgattttagagaagatgaaacagatgtaaaagcagttcttggaactttattaaatttaatggaagatccagacaaagatgttagagtggcttttagtggaaatatcaagcacatattggaatccttggactctgaagatggatttataaaggagctttttgtcttaagaatgaaggaagcatatacacatgcccaaatatcaagaaataatgagctgaaggataccttgattcttacaacaggggatattggaagggccgcaaaaggagatttggtaccatttgcactcttacacttattgcattgtttgttatccaagtcagcatctgtctctggagcagcatacacagaaattagagctctggttgcagctaaaagtgttaaactgcaaagttttttcagccagtataagaaacccatctgtcagtttttggtagaatcccttcactctagtcagatgacagcacttccgaatactccatgccagaatgctgacgtgcgaaaacaagatgtggctcaccagagagaaatggctttaaatacgttgtctgaaattgccaacgttttcgactttcctgatcttaatcgttttcttactaggacattacaagttctactacctgatcttgctgccaaagcaagccctgcagcttctgctctcattcgaactttaggaaaacaattaaatgtcaatcgtagagagattttaataaacaacttcaaatatattttttctcatttggtctgttcttgttccaaagatgaattagaacgtgcccttcattatctgaagaatgaaacagaaattgaactggggagcctgttgagacaagatttccaaggattgcataatgaattattgctgcgtattggagaacactatcaacaggtttttaatggtttgtcaatacttgcctcatttgcatccagtgatgatccatatcagggcccgagagatatcatatcacctgaactgatggctgattatttacaacccaaattgttgggcattttggctttttttaacatgcagttactgagctctagtgttggcattgaagataagaaaatggccttgaacagtttgatgtctttgatgaagttaatgggacccaaacatgtcagttctgtgagggtgaagatgatgaccacactgagaactggccttcgattcaaggatgattttcctgaattgtgttgcagagcttgggactgctttgttcgctgcctggatcatgcttgtctgggctcccttctcagtcatgtaatagtagctttgttacctcttatacacatccagcctaaagaaactgcagctatcttccactacctcataattgaaaacagggatgctgtgcaagattttcttcatgaaatatattttttacctgatcatccagaattaaaaaagataaaagccgttctccaggaatacagaaaggagacctctgagagcactgatcttcagacaactcttcagctctctatgaaggccattcaacatgaaaatgtcgatgttcgtattcatgctcttacaagcttgaaggaaaccttgtataaaaatcaggaaaaactgataaagtatgcaacagacagtgaaacagtagaacctattatctcacagttggtgacagtgcttttgaaaggttgccaagatgcaaactctcaagctcggttgctctgtggggaatgtttaggggaattgggggcgatagatccaggtcgattagatttctcaacaactgaaactcaaggaaaagattttacatttgtgactggagtagaagattcaagctttgcctatggattattgatggagctaacaagagcttaccttgcgtatgctgataatagccgagctcaagattcagctgcctatgccattcaggagttgctttctatttatgactgtagagagatggagaccaacggcccaggtcaccaattgtggaggagatttcctgagcatgttcgggaaatactagaacctcatctaaataccagatacaagagttctcagaagtcaaccgattggtctggagtaaagaagccaatttacttaagtaaattgggtagtaactttgcagaatggtcagcatcttgggcaggttatcttattacaaaggttcgacatgatcttgccagtaaaattttcacctgctgtagcattatgatgaagcatgatttcaaagtgaccatctatcttcttccacatattctggtgtatgtcttactgggttgtaatcaagaagatcagcaggaggtttatgcagaaattatggcagttctaaagcatgacgatcagcataccataaatacccaagacattgcatctgatctgtgtcaactcagtacacagactgtgttctccatgcttgaccatctcacacagtgggcaaggcacaaatttcaggcactgaaagctgagaaatgtccacacagcaaatcaaacagaaataaggtagactcaatggtatctactgtggattatgaagactatcagagtgtaacccgttttctagacctcataccccaggatactctggcagtagcttcctttcgctccaaagcatacacacgagctgtaatgcactttgaatcatttattacagaaaagaagcaaaatattcaggaacatcttggatttttacagaaattgtatgctgctatgcatgaacctgatggagtggccggagtcagtgcaattagaaaggcagaaccatctctaaaagaacagatccttgaacatgaaagccttggcttgctgagggatgccactgcttgttatgacagggctattcagctagaaccagaccagatcattcattaccatggtgtagtaaagtccatgttaggtcttggtcagctgtctactgttatcactcaggtgaatggagtgcatgctaacaggtccgagtggacagatgaattaaacacgtacagagtggaagcagcttggaaattgtcacagtgggatttggtggaaaactatttggcagcagatggaaaatctacaacatggagtgtcagactgggacagctattattatcagccaaaaaaagagatatcacagctttttatgactcactgaaactagtgagagcagaacaaattgtacctctttcagctgcaagctttgaaagaggctcctaccaacgaggatatgaatatattgtgagattgcacatgttatgtgagttggagcatagcatcaaaccacttttccagcattctccaggtgacagttctcaagaagattctctaaactgggtagctcgactagaaatgacccagaattcctacagagccaaggagcctatcctggctctccggagggctttactaagcctcaacaaaagaccagattacaatgaaatggttggagaatgctggctgcagagtgccagggtagctagaaaggctggtcaccaccagacagcctacaatgctctccttaatgcaggggaatcacgactcgctgaactgtacgtggaaagggcaaagtggctctggtccaagggtgatgttcaccaggcactaattgttcttcaaaaaggtgttgaattatgttttcctgaaaatgaaaccccacctgagggtaagaacatgttaatccatggtcgagctatgctactagtgggccgatttatggaagaaacagctaactttgaaagcaatgcaattatgaaaaaatataaggatgtgaccgcgtgcctgccagaatgggaggatgggcatttttaccttgccaagtactatgacaaattgatgcccatggtcacagacaacaaaatggaaaagcaaggtgatctcatccggtatatagttcttcattttggcagatctctacaatatggaaatcagttcatatatcagtcaatgccacgaatgttaactctatggcttgattatggtacaaaggcatatgaatgggaaaaagctggccgctccgatcgtgtacaaatgaggaatgatttgggtaaaataaacaaggttatcacagagcatacaaactatttagctccatatcaatttttgactgctttttcacaattgatctctcgaatttgtcattctcacgatgaagtttttgttgtcttgatggaaataatagccaaagtatttctagcctatcctcaacaagcaatgtggatgatgacagctgtgtcaaagtcatcttatcccatgcgtgtgaacagatgcaaggaaatcctcaataaagctattcatatgaaaaaatccttagagaagtttgttggagatgcaactcgcctaacagataagcttctagaattgtgcaataaaccggttgatggaagtagttccacattaagcatgagcactcattttaaaatgcttaaaaagctggtagaagaagcaacatttagtgaaatcctcattcctctacaatcagtcatgatacctacacttccatcaattctgggtacccatgctaaccatgctagccatgaaccatttcctggacattgggcctatattgcagggtttgatgatatggtggaaattcttgcttctcttcagaaaccaaagaagatttctttaaaaggctcagatggaaagttctacatcatgatgtgtaagccaaaagatgacctgagaaaggattgtagactaatggaattcaattccttgattaataagtgcttaagaaaagatgcagagtctcgtagaagagaacttcatattcgaacatatgcagttattccactaaatgatgaatgtgggattattgaatgggtgaacaacactgctggtttgagacctattctgaccaaactatataaagaaaagggagtgtatatgacaggaaaagaacttcgccagtgtatgctaccaaagtcagcagctttatctgaaaaactcaaagtattccgagaatttctcctgcccaggcatcctcctatttttcatgagtggtttctgagaacattccctgatcctacatcatggtacagtagtagatcagcttactgccgttccactgcagtaatgtcaatggttggttatattctggggcttggagaccgtcatggtgaaaatattctctttgattctttgactggtgaatgcgtacatgtagatttcaattgtcttttcaataagggagaaacctttgaagttccagaaattgtgccatttcgcctgactcataatatggttaatggaatgggtcctatgggaacagagggtctttttcgaagagcatgtgaagttacaatgaggctgatgcgtgatcagcgagagcctttaatgagtgtcttaaagacttttctacatgatcctcttgtggaatggagtaaaccagtgaaagggcattccaaagcgccactgaatgaaactggagaagttgtcaatgaaaagatggcaagttcttcaaattcatttaagtaacgtgaagtttgtgcttcaaagggtacttcccttgatctgattttctggatatgagaaatagcctcacaaggatcctgatgaactctctctttagtggacctcattaagtgagtaatagctctgtggtgatgtagtctcaatgagctaaacttgtcacaagtgaaagaagacagcagccccattttgataaaggtctggcaaagtaacttaaacacctgtcttgaatgaactgggtttggttcacgcacatggctcaagtgcttcaccaaagaaataagcggcagctggtttgcaactgcaaaagggaaagttggctgttgtaggggttattttaatacctggagttctgctggaacataagtcatatttggagtccaggctcttggcggaaaagtcgatggcagatggcacagcaacagtctccaccccgtggccctcctctttgtgctcgtgggctgcagcgcagcccaccagcccacccagcaccacctctgagaattattcttctaataacgttattcttccttttgcattcagatatgcttaagaaattgtacagttccaagtagctcacttagaacacccatttgcatgtactaacataatgtaaatattaggcagtacagcattgttatttgaatattcattgaaatgtttaagtcctaaacacttccaaagcagattt

SEQ ID NO: 509898 - DNA, 239 bp, Homo sapiens
gtgcagtcaaggtatacatcagaggcagccgtaagatccatctggctattatcctctgttgtgtccagtcagtcgtctcccagcaatgtgctactttccagcccaaagtggctctccttagctccactgtcataatctctttcgatcttacttgcccttccatactttctcacatgtggctccccctgaatttggcttcctttgtgagctcattcttttcgccaaggatcagatgctcc

SEQ ID NO: 509899 - DNA, 422 bp, Homo sapiens
cggccacacgagcgcccaccccccgcaccccaacccccaaaaaaaaaaaaacctaggccaagacccatgttcttgacattgagcagcgactacaaggtgtaatcaagactcgaaatagagtgacaggactgccgttatctattgaaggacatgtgcattaccttatacaagaagctactgatgaaaacttactatgccagatgtatcttggttggactccatatatgtgaaatgaaattatgtaaaagaatatgttaataatctaaaagtaatgcatttggtatgaatctgtggttgtatctgttcaattctaaagtacaacataaatttacgttctcagcaactgttatttctctctgatcattaattatatgtaaaataatatacattcagttattaagaaataaactgctttcttaata

SEQ ID NO: 509900 - DNA, 449 bp, Homo sapiens
gcagtatgaccgtcctctcagaactcactagtggtatcttctctgacgagatagatacctggaattgggacactcacccaggacacactatggtgcttcagccacagtgaaaggcactatctgagattggaaccacagtaagatgtgccttgcttcccacttcgccttctgccatgattgtaagtttcctagagacctaccccagacatgcagaactagctcggaccatggtgcagtcccactttttcccctgcccccctactcctgtgagactggctgcggggagggatcataggatacttgtctgccggctatctggaacccacgcaagtaagcctgctgtcaatggaggaggacatagatacccgcaaaatcaacaacagtatcctgcgcgaccacagctaatgcgaccgaagctgacattatctctacggtagaattcaaccacc

SEQ ID NO: 509901 - DNA, 5406 bp, Homo sapiens
  misc_feature (5312)..(5312): n is a, c, g, or t
  misc_feature (5317)..(5317): n is a, c, g, or t
  misc_feature (5319)..(5319): n is a, c, g, or t
  misc_feature (5323)..(5324): n is a, c, g, or t
  misc_feature (5329)..(5329): n is a, c, g, or t
  misc_feature (5375)..(5375): n is a, c, g, or t
  misc_feature (5380)..(5380): n is a, c, g, or t
gcctccacacggctccgtcgggcgccgcgctcttccggcagcggtacgtttggagacgccgggaacccgcgttggcgtggttgactagtgcctcgcagcctcagcatgggggaacatggcctggagctggcttccatgatccccgccctgcgggagctgggcagtgccacaccagaggaatataatacagttgtacagaagccaagacaaattctgtgtcaattcattgaccggatacttacagatgtaaatgttgttgctgtagaacttgtaaagaaaactgactctcagccaacctccgtgatgttgcttgatttcatccagcatatcatgaaatcctccccacttatgtttgtaaatgtgagtggaagccatgagcgcaaaggcagttgtattgaattcagtaattggatcataacgagacttctgcggattgcagcaactccctcctgtcatttgttacacaagaaaatctgtgaagtcatctgttcattattatttctttttaaaagcaagagtcctgctatttttggggtactcacaaaagaattattacaactttttgaagacttggtttacctccatagaagaaatgtgatgggtcatgctgtggaatggccagtggtcatgagccgatttttaagtcaattagatgaacacatgggatatttacaatcagctcctttgcagttgatgagtatgcaaaatttagaatttattgaagtcactttattaatggttcttactcgtattattgcaattgtgttttttagaaggcaagaactcttactttggcagataggttgtgttctgctagagtatggtagtccaaaaattaaatccctagcaattagctttttaacagaactttttcagcttggaggactaccagcacaaccagctagcacttttttcagctcatttttggaattattaaaacaccttgtagaaatggatactgaccaattgaaactctatgaagagccattatcaaagctgataaagacactatttccctttgaagcagaagcttatagaaatattgaacctgtctatttaaatatgctgctggaaaaactctgtgtcatgtttgaagacggtgtgctcatgcggcttaagtctgatttgctaaaagcagctttgtgccatttactgcagtatttccttaaatttgtgccagctgggtatgaatctgctttacaagtcaggaaggtctatgtgagaaatatttgtaaagctcttttggatgtgcttggaattgaggtagatgcagagtacttgttgggcccactttatgcagctttgaaaatggaaagtatggaaatcattgaggagattcaatgccaaactcaacaggaaaacctcagcagtaatagtgatggaatatcacccaaaaggcgtcgtctcagctcgtctctaaacccttctaaaagagcaccaaaacagactgaggaaattaaacatgtggacatgaaccaaaagagcatattatggagtgcactgaaacagaaagctgaatcccttcagatttcccttgaatacagtggcctaaagaatcctgttattgagatgttagaaggaattgctgttgtcttacaactgactgctctgtgtactgttcattgttctcatcaaaacatgaactgccgtactttcaaggactgtcaacataaatccaagaagaaaccttctgtagtgataacttggatgtcattggatttttacacaaaagtgcttaagagctgtagaagtttgttagaatctgttcagaaactggacctggaggcaaccattgataaggtggtgaaaatttatgatgctttgatttatatgcaagtaaacagttcatttgaagatcatatcctggaagatttatgtggtatgctctcacttccatggatttattcccattctgatgatggctgtttaaagttgaccacatttgccgctaatcttctaacattaagctgtaggatttcagatagctattcaccacaggcacaatcacgatgtgtgtttcttctgactctgtttccaagaagaatattccttgagtggagaacagcagtttacaactgggccctgcagagctcccatgaagtaatccgggctagttgtgttagtggattttttatcttattgcagcagcagaattcttgtaacagagttcccaagattcttatagataaagtcaaagatgattctgacattgtcaagaaagaatttgcttctatacttggtcaacttgtctgtactcttcacggcatgttttatctgacaagttctttaacagaacctttctctgaacacggacatgtggacctcttctgtaggaacttgaaagccacttctcaacatgaatgttcatcttctcaactaaaagcttctgtctgcaagccattccttttcctactgaaaaaaaaaatacctagtccagtaaaacttgctttcatagataatctacatcatctttgtaagcatcttgattttagagaagatgaaacagatgtaaaagcagttcttggaactttattaaatttaatggaagatccagacaaagatgttagagtggcttttagtggaaatatcaagcacatattggaatccttggactctgaagatggatttataaaggagctttttgtcttaagaatgaaggaagcatatacacatgcccaaatatcaagaaataatgagctgaaggataccttgattcttacaacaggggatattggaagggccgcaaaaggagatttggtaccatttgcactcttacacttattgcattgtttgttatccaagtcagcatctgtctctggagcagcatacacagaaattagagctctggttgcagctaaaagtgttaaactgcaaagttttttcagccagtataagaaacccatctgtcagtttttggtagaatcccttcactctagtcagatgacagcacttccgaatactccatgccagaatgctgacgtgcgaaaacaagatgtggctcaccagagagaaatggctttaaatacgttgtctgaaattgccaacgttttcgactttcctgatcttaatcgttttcttactaggacattacaagttctactacctgatcttgctgccaaagcaagccctgcagcttctgctctcattcgaactttaggaaaacaattaaatgtcaatcgtagagagattttaataaacaacttcaaatatattttttctcatttggtctgttcttgttccaaagatgaattagaacgtgcccttcattatctgaagaatgaaacagaaattgaactggggagcctgttgagacaagatttccaaggattgcataatgaattattgctgcgtattggagaacactatcaacaggtttttaatggtttgtcaatacttgcctcatttgcatccagtgatgatccatatcagggcccgagagatatcatatcacctgaactgatggctgattatttacaacccaaattgttgggcattttggctttttttaacatgcagttactgagctctagtgttggcattgaagataagaaaatggccttgaacagtttgatgtctttgatgaagttaatgggacccaaacatgtcagttctgtgagggtgaagatgatgaccacactgagaactggccttcgattcaaggatgattttcctgaattgtgttgcagagcttgggactgctttgttcgctgcctggatcatgcttgtctgggctcccttctcagtcatgtaatagtagctttgttacctcttatacacatccagcctaaagaaactgcagctatcttccactacctcataattgaaaacagggatgctgtgcaagattttcttcatgaaatatattttttacctgatcatccagaattaaaaaagataaaagccgttctccaggaatacagaaaggagacctctgagagcactgatcttcagacaactcttcagctctctatgaaggccattcaacatgaaaatgtcgatgttcgtattcatgctcttacaagcttgaaggaaaccttgtataaaaatcaggaaaaactgataaagtatgcaacagacagtgaaacagtagaacctattatctcacagttggtgacagtgcttttgaaaggttgccaagatgcaaactctcaagctcggttgctctgtggggaatgtttaggggaattgggggcgatagatccaggtcgattagatttctcaacaactgaaactcaaggaaaagattttacatttgtgactggagtagaagattcaagctttgcctatggattattgatggagctaacaagagcttaccttgcgtatgctgataatagccgagctcaagattcagctgcctatgccattcaggagttgctttctatttatgactgtagagagatggagaccaacggcccaggtcaccaattgtggaggagatttcctgagcatgttcgggaaatactagaacctcatctaaataccagatacaagagttctcagaagtcaaccgattggtctggagtaaagaagccaatttacttaagtaaattgggtagtaactttgcagaatggtcagcatcttgggcaggttatcttattacaaaggttcgacatgatcttgccagtaaaattttcacctgctgtagcattatgatgaagcatgatttcaaagtgaccatctatcttcttccacatattctggtgtatgtcttactgggttgtaatcaagaagatcagcaggaggtttatgcagaaattatggcagttctaaagcatgacgatcagcataccataaatacccaagacattgcatctgatctgtgtcaactcagtacacagactgtgttctccatgcttgaccatctcacacagtgggcaaggcacaaatttcaggcactgaaagctgagaaatgtccacacagcaaatcaaacagaaataaggtagactcaatggtatctactgtggattatgaagactatcagagtgtaacccgttttctagacctcataccccaggatactctggcagtagcttcctttcgctccaaagcatacacacgagctgtaatgcactttgaatcatttattacagaaaagaagcaaaatattcaggaacatcttggatttttacaggtctgaagttaatatagtgaatttaataatgaaaattaatgtggccagtcttttatgtttatgttgttcattttattgaatgttttatatgctatgcttagaagcttatagattagtggggagagataaacatcaatttggtataatattttaagtacagtaacacacatgtaccntgagnangganncttanctcatccatgtggaatagggtgggagatggaagcggatgagccagnggtcnggaatggcttcttggagatggtgtct

SEQ ID NO: 509902 - DNA, 1003 bp, Homo sapiens
agcgggttaacgtcaaaggacagaccgcctatttgcgtagcgcgtggtctccataaggttcgtaatggcagctgaaaaattctctgcgctgtcataccgactgtcttgtatacctgtgactcctgtgttaccgtgcctaggatgagaccccttcgcgtcctcttttcctggctgtcattctgtaggccctgctgcattacccgtcatcacctcgtggctatgacacaatatgtgagctttggaacgcgatgcatgcctaggctacagcagcgtacttgtccggggctgggtgcacacgaggcattctacccaatcatagctctctgccttggaagacattgcatgaacgttcatcatctcgcttttacctccgtggtacttcgcgttcatctgccaaacaccggttctctgtctcgaaaacgacacagttggatatatccatatgcgtagagtattagttcaaaccagtcattgatcccagttgaagggaaacacttttcatgacacgatagttccagtggaacgcttctaatatgatggtctcagaagaaagggctaccatctctatcgtgcatatgaatagacgatttaaaccatgacgtttccacaagaaatttttataatgatctctacaaatatgagggaacttcagtcgtgttcagctcggatacttgccttaccacacaacgtcatggcatacttactggccccggtatattttaagatattgaccaaaagctcgctgaggggggggaaaggctgataaataacacgttcgtctgggagaaaccaagtactgaggacctgcatcctgcacacgccgcttacaggctttacgaattcaaggcttaaacttaaaaccaattctcctatcgattaaattgccacagccaaagtagcttataaccccttacctagtcttgctttacattaccatacgtgtggctctacacctggaagtgactttgaacacggtgggatgcctactttcctggacactaat

SEQ ID NO: 509903 - DNA, 152 bp, Homo sapiens
gaggcccaatgctgggcgtgttgtggagcccccgacggcgcgttctcattgagacctgtgagctgcccgccaattgtgcctgcagggtggaagagaaatgagcactcatcatttctggcccaccagagactgccagtaagtgctgcctggtg

SEQ ID NO: 509904 - DNA, 1597 bp, Homo sapiens
  misc_feature (975)..(975): n is a, c, g, or t
gcagtacgtgtggtttgtgacgaagcacgcctacatgagattggatgtaggtattttgtagaaaatgttgtgtctgctgtcagccaagctggttggctcccccatgttgtgtgttgaggtcgtcccctctggccgctgaaaaactctctctgcagaagggggtctctcagcacgtgcccccgaccgagagagtgcgcttactctatacattccgtggggggtgttggagaaaaacaagaactttctgcttattaggcgccccccaggagcaaattattgtgggaggaattctgtggtgcagaacccctcccactacggagaatgaggtggtgacactttttctcgtgcccatctgcgttgtgggtgtttggctgtggccttatccccgcccggggccgttgtttttgctcacaaaagaaaccaaatgggggttaatttagcgcgagccgccaattctcgttggtgtgaagatgcgttgagttgtgaagccccacaaggaaggggattacctctggggggggaaatatttgtgctggcctgcaccgttgtgtactccctgtttgtggtcttgtgttgtgtgccttggcgaaagtatattgttgctccattgggggggtggtagcaaaaaaggtagtgggttctataatttgtaagaaggacattttcttggttgcccgcgtttcccgtgtcccccgcagatgggccaacaaagtgtgtcccacccccccaaggagtggtaggcacacagcccctggtttaggtttaccattaagagttctttctctgtgtcaacacgttcttctaatatgcgccctgggtctccccactgcgtttctgaagacactgtggtttgttctttgttgcgattgggggaacaaaatggggccctcttccataaatactgtggtttttttctgcacaaaagtccacagggagagccttgagcccacaggagggcacacacactataaaggnttgttggtacaatggcaacatgcacatataggccacacacacattgcacactccacatcttcgggagacaattctctgtataagaaaacacactgtgtaatatacatgtcactgtgttcacagcacagtgaggtgaactcttggtgaaaagtggtgttgagagagagtgtgttacacacgagagcttctcttggaacacaaacgcccgagtgtcttgaagtgtctgttacacacaaattataagggagaacacacagactgccagatttgtgggaagattataccagaagaatagggatatccaaacacccaggataccttctgtgtgccacaagatatgtaatagtggccacatggaacattaataccaggccagggaaaaaagaccccagacccacttgttctcacagatatgttttttgtataattgtagccaaaatcctgaaaccaataggggtgccttcccagtctcatcataaccaaataggccaattttggctgggtggcggtgggttcatagcctataataccccagtgctttacaaggctgaggcaggaggctcttttgagaataggagttcaagaccagcctgggcaacatagcaagatcctgtctctccca

SEQ ID NO: 509905 - DNA, 315 bp, Homo sapiens
cactgtatggcggatagaaggattcattgccctgggaggttttgcctggcattctgcagaagcattgctgtatcttaccagacaggaatacagatgaagacccccaggcccagggaattcgatcactggctgagaactcacagctaaggagggggagcctgggattccttcctggtgctcacacccgagacccttttgtcactgtgttcaaaggcactgctgcacagacgtgattcttctttcaacgaacatctccaggacttctcccggggtctgtgacctcatctataattaaagggaaagagatcttcctga

SEQ ID NO: 509906 - DNA, 917 bp, Homo sapiens
gtgagactccgtctcagaaaaaaaaaaaaaaagaacaaatttataggggatcatgggtaacgataaggcattattatatgaatgaatatacggctttaaatggttttacccatgggcacaaaaggaaaatatttaaaatactttggtagtcaacaaggctttaacatctttaagggggaataactactattagaagcaggtttgtcacagaaatgttgtcaactccattctaaccttatcttcgtggttttatgaggtaacacataattttcaccatggtggtctagggttcaaaaaaaaaaaaacaaatatcttcaggtggaccagggggctttggtttacaggtggttccaatggtttggtaaggtcgagaatgggttaataataatgtgtgggcctggttataaccgggtcccagaaactcgggtgccaggtgtcccattaatacaaagcaccgacgcaacaaatctgggtggggagcccgtgggtgggctactactcttcaaacaaaaactctgtccagtggctaggacaaccggggtggtaactcaatataagacaggtgtggcgtctggacgagaaccctgttatccgtggtatttgggcccacaaaccaccccagcggtgcaatatctggccattggagggcaagagacgaccttcccattttacctgtggaaaacatctcgtggccaaagggggatttagacctcaggagagcggcaggcaactttcaagagacattcgtgggcagcgcaaggtatatatatactcgcgggcgccacaaaattaactgctggaaaacctcgaggacgaaatcccgtggggggtcgaaacacggggctacaaaaaatttattatccccaaaattttttagaccgttgcggggaacctgggctcaaattaacccaccaaga

SEQ ID NO: 509907 - DNA, 749 bp, Homo sapiens
tccgcgtcgcctctgtcgcccgcgctggctaccgtggactcccggctgcacgctctgttggcctcgccatgccggtggacctcagcaagtggtccgggcccttgagcctgcaagaagtggacgagcagcgcgagacccggtgatgtcacctacgccgggttcggctggtggacgatgcgtgggcaaagtgctgacgcccacccaggttaagaatagacccaccagcatttcgtgggatggtcttgattcagggaagctctacaccttggtccttgaccagacccggatgctcccagcaggaaggatcccaaatacagcagaatggccatcattctcctgggtggtcaacattgaacggcgcaagtgacattcacgcatgtgcgcacaagtccttctccgatatatgtgggctcggggcctcccaagggcacaaggcctttccaacccgcataatgtctggccttggttaaaccgagcatggacaggccgctaaagttgtgacctgagcccatccttcagcgaaccgatcttggagaccaccgtggcaaattcaaggttggcgtccttccgttaaaacgtatgacgctcaggggcccggtggctgaccacgtgttaccaggccgagttgggatgactatgtgcccgaagctgtaccgagcagctgtctggcgaacgtaacgcggtcagcttggggacctgacctgttctggaaggccccaatgccatgtccccagttcagcggtggctgt

SEQ ID NO: 509908 - DNA, 539 bp, Homo sapiens
  misc_feature (103)..(103): n is a, c, g, or t
ctagggaaggccttgcaggaggccccagtgcgttccctgaagacctgctcactcacctctcagctcctgcacgtccccgttcctccagctgaaccttccaccncactcccttccattctgtttcagctactggcttagagctcccacctccagaaggcctttctccgtacggcctatccagccaccaccacctcacaccctgcctcctgcactgtaatccatctgccctgatagactggaaaacaccttcaacgcaggaattactccccatggatccgcagcacttagcccagtgcccagcacagagaaggggctcgatgatagtagctgaatgactaaattctatacatcagtcacttgtgaattcattgtccatcctccgccctgctcccgcaaccactccacctgagcacacagatcttcgtccagccaccatggactccacagcccatccagctaggagctcagccaagtctctggtgcagaacagacaccatctcaatgtccagctgcagaattcctgaaatcgctgtcgacgc

SEQ ID NO: 509909 - DNA, 440 bp, Homo sapiens
acaggggtacccgttccaccgccatcgatcacccccccccggaatctttccaaacgcccccgcaagtgaatttctctgtaagactgttaaaccaggtggggaataataatatcaacgtgggacccgcaacattcctcttgcttcattggaatgggtgtctcctcccccgttacctcccgcccgaagtggtcatgtggcacacctcacgagggttagtcggttagtgacagcactagttggaagcggcccgaggtgctcccccccgttcaaaggcagatgtggtacagatgcttacgacaaagcatgtgtgcccctaggcatcgtgtgttcggagccctgtttcgtgggtggtcaacagcccctctgtctgctggctacagggatgagcacgctgagtgatccccatcacagcattctgcagccccgcaccaaacataaca

SEQ ID NO: 509910 - DNA, 323 bp, Homo sapiens
tttcaaatttgggtatagacaataaagaactgaagtgctcactactcagtgatttggaaattttgatgcttgtataaatgtcagataattaatttccaaaggcgtatgtattaagtaaatgctggaaaaattggcctcattaacatatttacagacttttacttaatacatacgcctttggaaatatgttaatgaggccaatttttccagcatttataattatttttttcacttgttaggaagcttttgttatgtattttctgttaatagtacctaaaattgcaacttctaaacccaaataaaaagaaaatatttataggaaa

SEQ ID NO: 509911 - DNA, 239 bp, Homo sapiens
gctggctgtctttccacgacgagaacacacaatcacacgatcactatgagacaccagagacgataaggtgggaagaacaacacacacgacacacacggaagacaaaacacacacaagatacacaagcagcacaacacacaaccacacaacattcagtgaccacacaacacagtggacacaaacattgcacacacaacacacaacccaacacacaaccacacggtgaccatatcgcgtca

SEQ ID NO: 509912 - DNA, 902 bp, Homo sapiens
gatacagtcaacaaaccactgaacaggtatcctttaaaaggaatgtcatgctgtcttcatatctaagtgagcaggaagatgatacctatctggaaacaataggcgagacctggaaatggaacctgtgatctggggatataccatgtagttttgcttgcatgtttcactggtggaggcacagagcttcacttgtatgatgctcgagtactgtctggccgaattatcccgtgccctcgtttgactactctgatgtagaatgcactgcctattagagtctggagtgagtgacgagttcaccccacagagttctcagggagggaagagtttagaggtgagtcgtgctgcgagaattcgagtagtctctggcaaggacagcgtgttgcgtgtcctggaacgtatcctcgacgactgagaaggaaatcctaggtggcgacatggaggagcatgccgtccgtcgtgcatattccctggcgataagaagacgtaggaaagcatatcgccagacagagtggaactctggaacagaattttctagtccagttatggagatgcgccgagagggttaaggatcgggggcgccagtgcatacaaaggactatcccgaatttacacgatcgggttccggacagaaaaaatcggctgacagtggcggctcacaggacttttggcataccgtggccgaaattctaggacattgaacaaaagctatccttttcatccgaggacaggacggagcactcaatggggtgacattgttgcgctatggatattgctgtgcgtttctctggtgatattcccgatttgagtggaaattctagaagttggagtggggccatatggcatcgcccgatctaaaatgcatagacagacatggcccattggggcttgatggcaggtgggtc

SEQ ID NO: 509913 - DNA, 423 bp, Homo sapiens
  misc_feature (55)..(55): n is a, c, g, or t
  misc_feature (73)..(73): n is a, c, g, or t
  misc_feature (77)..(77): n is a, c, g, or t
  misc_feature (80)..(80): n is a, c, g, or t
  misc_feature (93)..(93): n is a, c, g, or t
  misc_feature (107)..(107): n is a, c, g, or t
  misc_feature (111)..(111): n is a, c, g, or t
  misc_feature (141)..(141): n is a, c, g, or t
ctagttttagaagtatcatagcattctcaaaaaaaaaaaaaaaatttctcttctnccggtaatgggtagtccngaangtnagatatttttttnccagggggtcaaanggtncctaagtatatgatggcgagtggaaaaatnggggacagaaatcaggtatgggcagtttctccatttccattggggtgtgaatttttaatataaaggcggagacgtaaagcataatggcaagtcaaaaggttccagtgaccaagttccagcggtccacctttatactcttcataaataacccggtaaaattttccgggacaaggccagcattgggattttttaaaaacacgtaatttccttatggatggcacctaatgggtgttggtagcattttcatcatacagtagatcccatccattcactatacttttc

SEQ ID NO: 509914 - DNA, 328 bp, Homo sapiens
cacgtctgtatgtcctggaaggagacgctgagatatctgttcacactgtactgactcggacattgacggcgcatcactctggacgagtatcgaaatgtggtcgaggagctgctgacgggaaaccctcacatcgagaaggagtccgatcgatccatcgccgacggggccaatgataggaggcggccagcgtgtgcatggggcagatggagcctgatcaggtgtaagaggggatcaccttcgaggacttcctgaagatctggcagtgtgatcgacattgagaccaagatgcacgaccgcttacttaccattggaaaccatggacctctga

SEQ ID NO: 509915 - DNA, 285 bp, Homo sapiens
  misc_feature (223)..(223): n is a, c, g, or t
  misc_feature (236)..(236): n is a, c, g, or t
ggaggtcgcagtgagccgagaccgggccactgcactccagcctgggagacagagcgagactctgtctcaagaaaaaaaaaaaatcaatttgtaccattccttgccccaccctgccgaacttattgaaagagcatcgctttcctcacttttctcctctaacagaaaagcacttagatgaggctacagggagccagagttcttttgacttggtgggtaccggagnttggaagagtctngattgagtattccttggcctttggggagcttgctctatgcaaagtcacc

SEQ ID NO: 509916 - DNA, 444 bp, Homo sapiens
ggagagggtaaatgaatgtggatcatgtaacaaggaggcgtcatcttgtgtgctgggagacgctcagtactgggggatctatttgtatcgtgaaatccctgtacagatgccagatctttatccattgctctctttatccaagggtagagagtctcgaggaagtgctttctagatcccttgcatgttcaccttcggagttttgcttcacagcgtttcacagactctatttgagaactctcaaaagttctgtctctgtctctgtccctgtccctttcaacagaatcagaaattagtctctctctttccctatccaagtctctccttttgtctcgttctctctctcgttctcgttctcgcaatctatctcgatccctgttgcgtggccaatctttatcagcatctcggtcccattctctctgcctcgtatctctcctctctctctcg

SEQ ID NO: 509917 - DNA, 155 bp, Homo sapiens
catcaaacctgccagcgattgaaatggaacatcgagaagtcgtggtgattggcgcgggcccttccggcgccatcgccgccgccttgctcaacgcctcgattgcactgatcgcacactgctcatcgatatccgaagtagggtttagggtttgatga

SEQ ID NO: 509918 - DNA, 95 bp, Homo sapiens
  misc_feature (86)..(86): n is a, c, g, or t
  misc_feature (88)..(88): n is a, c, g, or t
aaaacaggagtcccactgattactgtagaattatttttgaaatgggctattggtggaattacagaaccaaggagctttagggctgnanagagatc

SEQ ID NO: 509919 - DNA, 210 bp, Homo sapiens
ggcgcatggctggtcacggcagcaggcctgtgcatggggctctgctagtgctggatcgatcgagcgggaagcacggggtggtggaacggtacacggacgccgtcaaactctccccgtaacttgataccgcatattaccgatgtctctgtatcctgatttccaccttgccagggtccacggcgcacagctttcagtcatcctggatcactt

SEQ ID NO: 509920 - DNA, 259 bp, Homo sapiens
  misc_feature (96)..(96): n is a, c, g, or t
aaaaatttttttaaaaaagggttatttttcccacagaattcaaaaataagttcctaaggggcgggaaattaaaactcccccctgtgtcagtcaaantgaaagggctcatttcaaaaccccccatttttagtttgtcaaaactgccctgggggcttattgctggtttttaaaggggtttttaactcaaaagaaaaatgtttaggaaaagttttttttttcaaaattgggggtctttacaactgattaaccagtagtttta

SEQ ID NO: 509921 - DNA, 276 bp, Homo sapiens
aggataaatgagtagtataatctatcatttaaattagggaagtccgttggagtagacctatagctatcttacatattataattagtagctataaaccatatggtgaaccttctcctctaattctatgagaataaagacccagatttaaaacatgtcctaagctgcttactctgatccctacctacttctcatcctggcgtctaatctgccttttatttaattttcttccccccatcccccattctttgtacttgctcattcactctatcccctttt

SEQ ID NO: 509922 - DNA, 880 bp, Homo sapiens
ggcttgttctctatggaatacgacaatgtgtgtcgcaggatcagtcattcacatgtcgctcatcgaaatgtgtatattccggggtaaaacttattatcgtggtgtgaggagtgcatgatatcagtggcagagcttggcctgacaatggctgtttctcctagtccaggcaaactattttatgatcgacaaatgcatgcatcctgtatcgtcgaatgtctgctaattctttaagattttccaaatgtcccacttaatgccattggagatgtaatttaccagtgtgtttcaacccctgtgataacgatgtatcgattgaggagaacgctattatcatttgatcatcagtatggattaaaatatagggaatgactgattacagggacgagtgatgggtgggcgggtggaagaccactatgggaatcgtgtaatgtggggataagatttttttaataagagttactcattagtccctgagttatttaagtcttttgtgcctattgaaaattatcatggtctttcatggtggacttgggtatcttgtaaggtgaggtaaaatgtgtatatacaatacaagtaggcaggatggcaagtatgcaggttcgagatgtttcgctgaactgtatattatacattgttacctatcgactggtagctctgagtatttgcattgagtcctcgttaaatattgtcatggtaaacactatgtggtgactatttctgacagtcggtggctgacctacttcattgtcttgactgctgtttacctcgtgatggaccgtttgactgacctttacggagatcaaaatgcagaggcttcaaaaaaattgacgaacccggggaaaaaacgccagagataagggaaacaagcaaagcatacaag

SEQ ID NO: 509923 - DNA, 140 bp, Homo sapiens
aaatggattaatgagttataaatgtaacctctgcaaatgtataagtatcagaagaagagataagggataagctctgtgacattggtctgggcaatgaatataaggatttgacctcaaaagcacggtgctcgatgcggggc

SEQ ID NO: 509924 - DNA, 354 bp, Homo sapiens
ccccgcgtccgcgcgaggactcggcggctgagcgcgcccgacagcagctaaaggcgctgctcaacaagactatgggcatttgcatgacagatggacggacactggtcggctgcttcctctgcactgcccgtgactgcaatgtcatcctgggctcggggcaggagttcctcaagccgtcggattccttttttgccggggacgccccgtgtgttgggcctggccatggtgaccccgcacaccaccattgttctccattgaaggtgcagaggaagaagtttgacccgggcctccggtatttcttgaccacgatggcggcttacctttatagactctcattaaacttattgccccaga

SEQ ID NO: 509925 - DNA, 1202 bp, Homo sapiens
  misc_feature (613)..(613): n is a, c, g, or t
acctcctccctgggtgcgcgggtttcttatatatattgatgccgcaagctgcgttgtctgcttttgttatgttgtccctcgcgttctacgcagttttgtgcactcctgttgtggtactgccgcctacctttctcatcactctcttttgtgttggtggtggtgtcgcccttcctcctcttgttgatgaggggtctactccctgggggggtcgcggtagttctccactagcgtctttcgctcgggagcctgtttttatgcctctatttgggcgcccgccggggtgagcttcgtgatttaactccgaatgttggtctgcaactcacggggggagatccacgcctatatgggtctcactcttatgggccccctatattttatgggggggacaccatacctatgtgagtggaaccaaacatgttgggtgagccaaacccaacatatagccacgcgtctgtggggtgaagccaccgcgtttcgctgcgagagtttttccccgcgcgagaattggctacagacccactatttacgctctttttttcgggcactttcacagtggcgcgcccctgttcaggaagacccccgtctgttgggagaggaggcccccacagagtgncgtggttcctcacagacagagggtagaatccacacgtatatgtgtttatataccgcgtcacaccacgctcactgagcgccgacatatgttggtctcacaaaattatagcgcggtaaaaatctgtggtcagtgagtagccgcacgagagggcacatgtttagcacacacacgggtgtttctctatgaaagatttcataggggccacagagtatttgagatggcccccaccacattgtggtgtatatggtagaatgccaccccactgatatattccaaaggcacacagctgcccacgtgggctttccgcgagagtttttcctcggtgcccacccaacgttcgacggaggcttggagaatggcttgcgtggatgtgccaccacaattttttgtcgtgtcccgcaagagttcgcttcaccacaagtgtttcctccccacgaaccgcccaaaccacctttgtggaaaagagactgccccactgggcctcagagtctccccacccccatgcccgggtgggcccgtgtaagaaaaatggagtaggccagcttatgtgcaccttttttgttttaaaaaaagttaaaactgtgcccca

SEQ ID NO: 509926 - DNA, 142 bp, Homo sapiens
gtgcagccactacggtcagctctaggcgctcggcctcctcctgtgcccgcttcctctcctcctccagctgcaggggccgctgaatctgctccgagagctctctctctgccttctttgtcttctcctgtcgggctagtcgggg

SEQ ID NO: 509927 - DNA, 1152 bp, Homo sapiens
cccacgcgtcgcccacgcgtcgcccacgcgtcgctacttcacagctcacaggggcaggaggggtcctgtgagctgcgaaggacccgggaagcacgaaggcagacaagaggaggcatgaagggacaggaagagagccccagcaatcatgacacagaacagggcgatgacgacgaaccagcctcgaaccaacacgagcatggaccagacgataaacaaaagcagaagcacacgcaagccacgactctagaacagcaggacacagacacaaaaaacaaatgagacaaataaagaaacagaagaaagacaataccaagggcacagcaacgaactcgacgagaacaacagaaagaacaaaccaaaggacacagacatgacacaagcacaggcgacaaacaaacgcagggatgacacagagacgaaaaaaagacaaccaagacacacaccaaagaactgcaaaccaagcgaagaacaaacacagcaagaacagtgaacagaagaacaccaacaaccaccgacgcgcaaaaaaaaggcagacacacacaaagaaaaaagacaagaaaaacaaacacaacaaataaaaaacaacaaggacgaaaaaaaaaacaacacaaaactcaacaacaaccaaaagacaagacaaacacggacaaaaaaaaagaaaaaacgccacaaacgaaaagagacagccacacgtcagcaggcacgccaacaacaaaacaagacagacacgacaacaaagaaaaaggcacaccgacatagagcaaaacaaaacacgacaccaacgaaccgcaccagcaccatgccacacacacagcgaaaacacagccgacaaacgggaccaaacggaaccaacacacacaccgaacaacaccgagacgcggcaacggaaacgcagacggaaagagtaacataaactaagcgatagcagcaggacaaggagcacaccacccggaggacaacgtacaggggaatagaacaagcacgcacacaatcagaggaaacggaacaaacacaacaaacacaaacacacgaaggaagagtcaggacagacaacaataaaaacaaagcaaccaaagaaggagcgaaacaacaacagaacgagaacaagtagacgacacggaaaaagagacagacacaaaccgcacacaagca

SEQ ID NO: 509928 - DNA, 417 bp, Homo sapiens
atgactctagaggtatcccctcgaatcgacggtttctcaaaaataaaataataattaatctgtccagaacagtgggttgtgcctataatcctagcacttggggaggctgaagggggcggattacctgagatcaggagtcaggatcagcttgaccaacgtgatgaaaccccatctctactaaaaatacaaaaaaattgccaggcatggtggcgggcgcctgtattcccagctacttgggaggctgaggcaggagaatcacttgaatccaggaggtagaggttccattgagctgagattgcaccactgcacttcagcctgggtgacagagcaagactcagtctccaaaaaaaaaaacccaaaaaaaccccatttcctggtggggcgcgggggttcacacttgtatccccaacattcggg

SEQ ID NO: 509929 - DNA, 496 bp, Homo sapiens
  misc_feature (4)..(4): n is a, c, g, or t
ttgnatcttcattaagttggtattttggttaaagtgagattcagagaagaaagatccctgctttttgggaatgtaaactcgtgcaacagtgtggcagacagtacggagattccttaaaaaaccaaaagtggaactaccattcgatccagtaattccattgctgggtatctacccaaaggaaaataagtcattacatgaaaaagacacatgcacatgcatttttgtggcagcacaatttgcaatttcaaaaatatgtactcaacataaatgcttatcaaccaatgactgaataaggaaaacatgggatatatacaccatggaatgctactcagccataaaacaaataaaattatggtctttgcagaaacttggatggccattattgtaagtgaagtaactcagaaatggaaatccaattatcatatattctcacttataagtgggaggtaaagctataaggatgcaaaggcatataatggaatgatataatggactt

SEQ ID NO: 509930 - DNA, 397 bp, Homo sapiens
ggggcctgggctgcgctggagccccctaggtgtccccagcaagccccttcaggcactgtcacctggactccagcaccacccctcgtcatgttgtcacttcctgtggtggcgggagcgcaggatgtgagggacaatttgggtgacaggtcagtagctgtggccgtgcagtgttcaaggccttgccccctagggacctggcatggggctggaaggggggatcaacagcgccttccagcgtcccagtagcctcccctaacgtccttctgggtcctcctctgggtgcagagctcgggcaggtcttctgggcacacaggagatctggggggcctcccaacgaccgttctcttggcatcggatcagcggcagattgcgctgggccagtccttcccggcaccgg

SEQ ID NO: 509931 - DNA, 150 bp, Homo sapiens
tggtcagaggccgggtgtcaatcttggcatctgggcgtgggcgcatgcacctgcagctggctgccttactctcggggcctcagtttcctcttctgtaaacacagggcagtgcttaagtgtcctgggacaggagaggaggcatcacttgag

SEQ ID NO: 509932 - DNA, 326 bp, Homo sapiens
gagggactttgttcgggcagcatttctggttggcgcgaaatctttctcgccgtgtccgccctgagtgtgatcgcctttatctggcgcctgatctatgtgccgcaggacatcacacaccacaagccgctctcactgctgcaacacctgctattgtagaagcaaccgcgtctgctgctggtgtatgccatgaccgccgtcggttatggcggcacctttatcgcctatacctttctggcgcccagtccttcaggagatctcccgctttcagctcggcaccgtcagacttgtactgctgtatctacggtatctcggttatcctctagaga

SEQ ID NO: 509933 - DNA, 366 bp, Homo sapiens
cgagctatacttcaaattaatcagtagcttctttctcagtcgaccccgcttgccttgccttaaataacagtacttattgagtctcttctgtgtgccaaatactgtgtaagtaagtctggaaacttgaagcaagccaagagggacaataaccttctgttctacggggaaatgggtgggtcttcctaccagcgtcatgcctgagcttatatattaataacattaaattgaaatttagatgttattataagtagttgtggccattatggtgattctctgggtataaaaatagatacaatttcataaagatacgtgaggaagtaattaccaatactttcctaatactttctaaagtcaaaaagtaactct

SEQ ID NO: 509934 - DNA, 148 bp, Homo sapiens
agagcgtgtggagcccaggagtctgaagggcctgcaaagtaatagggcttcgtgcctaagcctcgccctccagccaataggcaggtttcttaactatcctaacaagccttggaccaaatggaaataaagcttattggatgctggacga

SEQ ID NO: 509935 - DNA, 1067 bp, Homo sapiens
gggatggaaagtccacccgtatggatggcaatgccagtggaagcacgctgcttgagggtctgggactgtatactaccaacaactcgttcaactgacaagcaccttgcagccgtgcacatctcccaggatgtctacaaagattggtggctatgggtacatgttcgctgttggtcagagtggcagactggtgtctctcaagtacccggtatggtggtcacctcttgctccaggtacaacgttacaacggaacgtaagatctgtcgagaatgcgaccatgaagcttcgagtgaacgctcgttcctggggaccaactgtggggtcttcaactgtccctgaatggtgtctgtcacgggaatgtaccggtgggtagggcacacccggtttggtgtgggtgaaccaagcgacacatggattggaaccccaacgaatggggacaggcatgcgtagggacctttccaggttggttccacgggtggatggagatcccttggaaaggcaatttccaaagggtcaaatattaaagcgccccgggggaaatggcccccgtggtattgggcattggccacaccaagggggttttcagacatgtgcgccaattggcaaaggagttcgggctagatggcttaggagggggcaacaaagaatttggaatcgggacagggacgccgtggggttcaaaaataggttgcgggaacaagatgttggggcggttttaaaaatttcccttgtagaaaggtttccggagaggagaattgcgtttgccatttttgtgtggagaatatggggggtttcccatgggaagaatagtgccccccattggtggtggtgcgtttcggacacgaacgctccatctcaaaggaagattaactgcacaccgcgttgtaggggactccgcctatggggacctagggcccaggcgaatcgtggctcacccacgaagaagtcgtcgccggcgggggagttcgtcatcaaaacagtgcgggtgagcaccaaccaacggcggtctgatggaaaacctgtgggacaagtggtcaaccaaaacgtacggccctaagaaagggcaccac

SEQ ID NO: 509936 - DNA, 128 bp, Homo sapiens
ctggtttgacctgataattagttgcttgagagggatggcggatcagtgaacagtacaattatagtgagcagaagtggagaggatgaatcactacacgaggtccaccgtgagaggtccactcttccgga

SEQ ID NO: 509937 - DNA, 106 bp, Homo sapiens
ctttgcagttctggtttcttgccgaaagacgtatccgttgtcccgcatacactgaccctccggagggctcggcgggggttacacaggactcggagtccggagggga

SEQ ID NO: 509938 - DNA, 311 bp, Homo sapiens
tctagcggatcctgggttgttggtcacctggtctggcttgcttcagtgtgtcggacacatttacgcacagagaaaaataggcaatccaaatggtccaactctatggatattctctatgctgctttcattcactcaataatgtgtagctgagcacttttctgtgtcaatgaatatagttccacattatcctgggcttgaaggatgtgtcatcaaatattttactaaccccccactgatgcatctagcaggatctgtccatgccctgcccatatctctaacatttctatgtgctccaaccaagcaacccctgg

SEQ ID NO: 509939 - DNA, 415 bp, Homo sapiens
atcgttctgtaatgatgaatgacaatactgaggcgagctcgctcactcatctccattctatcacagtagacgataggttatcagagggaagagcttcccttactgtcatagctgtggccttactcactcacgtctttataccagactcaacttatcaggcagtgtaaccacagccctttattgcagtcctcccccatttttttatctgtattttttttactaactatatcatgtttacaaatgtggctgctcttcctaaagcctagaaaatacttttaaagtaggggctcggctcacgtcacacaacggaaatctttaaaatggtgcttttaggaatttaatctgctttggtaaatgtaaccttaaatggtatctttgaggccaggcactgtgactcacacccataaacccagcc

SEQ ID NO: 509940 - DNA, 354 bp, Homo sapiens
ccttaacagtattttctttttctttccttttttttgagatggagtctcgctctgtcgccaggctggagtgcatggtgcgatctcagctcactgcaacctctgcctcccgggttcaagagattctcctgcctcagcctcccaagtagttgggactacaggcatgtgccaccacgcccagctaattttgtatttttagtagacacggggtttcaccatgttgtccaggatggtctcaatctcttgtcctcgtgatccacgtgcctcggcctcccaaagtgctggagttaacaggcgtgagccactgcgtccagccaacagcaatttcgtagtgtcaactatctagactgggttcaa

SEQ ID NO: 509941 - DNA, 414 bp, Homo sapiens
aaacacctgggttgagtatttatatcccagccttaaatcctaaaagccttgccgttttatagtcctttcggggaaatacaggaactacattaatacttgttagtgtaaaagttaatgcattgctggaaaagccttgtaaaaaatcagaaaattatgcaaaaaatgaagggaagattaaaaagggtagtgtttgaccagcagttataggtttagggatgtatttttttagaatatatttttaggaatgtatccttcaaattttagggtttgggggcataatgagaagattcactggaataaaattctaaatcttatatgtaaatgagcatttttgttcatagtaatatttaatggaatgtggctaagagtcctatctaatggtgaaacaaaaatgaacaaaatattctcctcaaa

SEQ ID NO: 509942 - DNA, 218 bp, Homo sapiens
  misc_feature (167)..(167): n is a, c, g, or t
cagacggatccttcagaggcacaaggaggaagatcaacgcctcactggaaacatgggctggggtttggcagcctggtctagtggggacagcccagagccgggctgcccatcatggtggccccacccaatcaagggaagaaggaggaatgtgggacgggaggcccctngaagccagaagggcaaggagggggacagtttccttttcctggtgtgtactc

SEQ ID NO: 509943 - DNA, 144 bp, Homo sapiens
tggcacgcacgttccaaaaatagtgttctagggtgggcttggggctcatgcctgtaatcccagcactttgggaggccaaggcgagtggatcacttgaggtcaggagtttgagaccaacctggccaacacggtgcgttggcccaa

SEQ ID NO: 509944 - DNA, 1395 bp, Homo sapiens
  misc_feature (230)..(230): n is a, c, g, or t
  misc_feature (919)..(919): n is a, c, g, or t
gcacgatgcctatcatatagtaaaacccagccgcatgactccctagacagggggccctctcgagcccatcctagatgacctccggtccgtagcgcagtgtgatttgcacttccacgtgccgagtacatcgcgtcctcatagctaggccgtactaacgcgaacacagcgtaaccatataaccacatgatggacgcgatgtaatcacgagcaaagcactatatcactaaggncacacgcatgataccaccgtgtccaaaagaggccttctgatacggggcatcaatcctcatttattcacctccagcaagttattgttgtacgtgtcggcacggcatttatgcatgatgccttattaccacgtcctagcctaagccccttacccccggaatgtaggaagggcacttgtggccacacaatcaggagtcattcagtcgcgcggactaatatccgccctaggaacgtccgcatacgtcctgaaaagatcactcctgtacttaccttcgcattgcacgagatgtagtcaatctcaacgctcgacgcttcaacctagtgagatactaagattaggacaagagcaaaagcagaaaactcgaacatgagacttcgaaagcatcctggttcatgtacagattctatgagctaggggtgcttcttatcttgaactcctgcactcacaaatggcgctccaggagtcacctgtcgaagtcatccctctcaagcagtattgccgaacggtcgatctgagcgggtcaacattggttggtagccacaaggcttgcacggactgcacagtcgattgataaggctcaagctttcctcagctatctggcttcaatccggcgaactaatatttacacgttagaacattccaaaagcatcactctgggcttccgaagccccgccgccctgattacttggncatttcgctacgactggtgggcttgaactatttcctggactggtctcccaatctcatcagattgacggggtccttaacagaacaaccacaacaagcaggcacgcagcagcaaacaacacacgacagacacacaaagcacacacaacgaagcacgtacaacacgaagagacagacacgacgagacatcacaacgaacacaaacgacgacacggacaacaaaccgagccaaggagacaacgaccaagaggaaaaagaaagaacaaaacgaacagaaatacgaagacaccgagaacagaagaccacaacacccgacgcaaagcacaacaaaacaacgaggacccgaactacacacgcaacaacagacaaagccgaccacgacgaggagaccaaccgaacagagatacacacgaccaaaaggacgcagcaaaaaccagatgagcgagaaagcgtgagggagacaaaggaaggagaaacgc

SEQ ID NO: 509945 - DNA, 1173 bp, Homo sapiens
gtggctgaaggaagccgaggtggccctacgttgtagcggggtgtggtggcaggcaggatccagtctccggcagtggcggcatgcaacgtttccagagtatgagcttcccgagctaaatacgcgcgctttccatgtgggcgcctttggaggagctgtgcgcgtgtggcctgtcttgcgctgggggcctgtgggactttgtccgctcgagtggatgccgcctggcatcctgcgtctgccatgtggagccatggcaagactgacgtccagaccgggatggatgccagctggtggccaggggatcttggactgcagcctggaggcggtggcttgagctgagggcggtgtgcggccttgataaagctgaaatgccttgagtgacggtgaggatccatgaacgtcattccggagaatactgacctggtgactttgggggttaggaaaacgggttcttggaacatcgggaagaaaccattacaatagatcgagcctgcagacgagaacacagttacgttagtgagatggagtcacatgccataggaaaaaggcctgaaaattcagcagacatgattgcagaaggggagcttatcctatctgtgaatatcttgtaccctgttatatttcataagcacagaagaacacgagacataccaaaacaatgctggtgttgggcagtcaaaaagttcacacaatgagggattcagttcggatgtgtcaggtgacctccagaattgggtggtgcacattcagcgaaatcttgaccagggcactgaggcaaaattaggcataagagctatagcaaatccaggcttacatgttaattttggaaggaaacatttaataatgataaaaagattaccgagaaatgggaagattgaagcagaagtaatcattgagtggtcaggagtcgcgttataagagggtaataggaaaggtttcaagaactagtttagacttggaagagattgagagctttcaaataaggttgtgtattaaacgatggttataccataagagataatggcatacagagagaactgagacaagttggtaattggcagagacttagactaaagggtatgagcgtaagtaagagtggatgaatagagagatggtgatgcccgtactatagaaaagagattggattagacacacaaagtcattgtagtaagaaga

SEQ ID NO: 509946 - DNA, 1081 bp, Homo sapiens
  misc_feature (57)..(57): n is a, c, g, or t
  misc_feature (112)..(112): n is a, c, g, or t
  misc_feature (218)..(218): n is a, c, g, or t
  misc_feature (222)..(222): n is a, c, g, or t
  misc_feature (308)..(308): n is a, c, g, or t
  misc_feature (530)..(530): n is a, c, g, or t
  misc_feature (547)..(547): n is a, c, g, or t
  misc_feature (571)..(571): n is a, c, g, or t
  misc_feature (658)..(658): n is a, c, g, or t
  misc_feature (675)..(675): n is a, c, g, or t
  misc_feature (720)..(720): n is a, c, g, or t
  misc_feature (1048)..(1048): n is a, c, g, or t
  misc_feature (1050)..(1050): n is a, c, g, or t
  misc_feature (1055)..(1056): n is a, c, g, or t
  misc_feature (1059)..(1059): n is a, c, g, or t
agataatccaatgagtgtgggcatttctatttctactgtaaaggcatatcaaataangaaaaaagtctaataattgcataaaggaatataaaactatttattaaccactgtncaccagtatttacaataaagtaaacaatatacagttggataacattttgattactacaaagttgttcttcctggcttttgctgaaccagtaaagcaaactcaagantggncctccatgtaatgaattggggtaaagaaaaaacatgcaggtcaataggttaggttacaaaaggttgttcacacatttatgacagcnggtcctaaactgccaacacctctaaccatctgattaggtttctatgagccaagtcttacatattccattcatcatgaccttttagtcaatgtagcaacagggattccaacattttgctaaggaatggcccgctaggaaacttttaaatgttcatttaacttagttttgtttagctagttaaaacacactagcatttgtctagtttcctcatctgggtggggnaacctgctgtggtggcngtgataaaatttttccttttaggnattttgcaaataaaccactgcaattatagacactttaaaattatccaatttaaattgtcctatctagaattacttatttcacttganatgtatggtttcagganaattttcaatttaacttgaaggggttatctcttattttgcttggnataatggcatctcagaaacatgggtttacctgtggtttttttgtttgggtgaatgcttaaaaacaaaaaaaaatttacatatgcattttatggatacacacacacacacacacacacacacacacaaaaaacacgtaataaatctagaatggtccttaggctcatgagaacacaagttttgactgagtaatgactatggacatttcccccaacatttagaaaagctgttctttaatgaagaggaaatgatataccatggtatcaaatgttcttttctgataaaggaagcaactacagaaagcttttatttatttgttcaaagtaccantnctatnnatncaaaaaacccgaacaactctcc

SEQ ID NO: 509947 - DNA, 747 bp, Homo sapiens
caaaaacacagaaaaatgttttgtgcatcaactctacaatatttgagatcgcttatcgaaatataaatttaggggaagttaaaaatcaaaaaaaaaaaaaaaaaaaaaaaaaaaaaaaaaaaaaaaaaaaaaaaaaaaaaaaaaaaaaaaaaaaaaaaaaaaaaaaaaaaaaaaaaaaaaaaaaaaaaacgaggagagggggcgccgccgcccaaactatagctcctctcaccagcgccaggagcaccaactcacccgaaccgacaccacccccttctattcagcaaagagcgcccgcctacgtcactcagtacgcgagtccatatacatacactaccaacagcgcgccgccgcccctacaacaaccacacccgccgatccgcccacacaagctccaccgcccacgccacacacatcctcgggcaagacaacccccccccccccaccgcgggggcccgcgagcaccaaaccacgcgcccgacacccaactcccaccccccagcaaccgaatcatacacgcgcccaggccgccgagccaaaccaacacacccactcccgcccacgagcacacgccgccaccggcgaccacacacacgcaccgaccccctgcccccgccgcgccccgaaccacaaacaccagctcagcgcgcacgcaacgcaagagccctcatcagctcaaaaaacccacacccaccaccacagcccgcgcgcacgccaccacccgacaccccacacacccgcaggaat

SEQ ID NO: 509948 - DNA, 171 bp, Homo sapiens
tgttctggagagtgctgtgaagtctgtggcccaatattaggaggattcactggtgaggccttacccttgcagctttacaggccagtaacgccacctctaggtagtagaatgtctcttgactcaacgtgtcaactgccattgaacagatccatacgagtagcacagccatgc

SEQ ID NO: 509949 - DNA, 224 bp, Homo sapiens
tgggttataaaaccttagggactaaaattaatataaaaatgggcataatgtgggatggaatctacattttgtggcaaaagttataaaaatttcccacatataatgtgtcaaaatttatacattcagtccagttcgtgttataatatggtaagtaataattaggtttgtgttttggagccgtgggcagacagaagcgaaacatctgtctcaaagaaaaaaaaaaa

SEQ ID NO: 509950 - DNA, 642 bp, Homo sapiens
agcggatcagcccacctcggcctcccaaagtgctgggaatacaggtgagagccactgcacctggcctaaataattcattactacagttaagttcatacacaatctgagaacgactaatataaaatattctgaaaccaacatgctatccaatatgcatattatttttaggtttacccactaacttcttggagtacgctaatgattatgatttactttcgttttctattgcgtctctgggggaagaagtggggagtcctcaaccttcgtgtggtccaccccccaaggggctttggagagctctgcgccatgtgggcgcgcgcgcgtgcccctcggggttctcacgccgtggggggaacccctcctctaggcggcgctcttcacccgggtgatgtctccaagggcgccacagaattctccacctctggggggcccctccttacgaaagcgcagcctcgtcctcccgcgaaaaaagatgttgggggccacattgtggcgacaaacttgcgcggacccatggccagatggtggacactaccccctaggggtatatttacaccacaaataacgccgccccatattgggggacccgataaaaacagctttgttcctaaacaagcagggcgtgctcaatgttttttcctc

SEQ ID NO: 509951 - DNA, 269 bp, Homo sapiens
cattcgcgggtgagaatagacccaagacaagagtgcagcgcgccaccacggcatattcagcgagagtacgtgtaagtcgggaccagagcagaccggtaagagagagaaatcgagggtatcaaataggacgagggcagtccaactacgtctcttcgcagatgacttaattctatatctaatagacccatagtctcagcccaaaagctccttcagactgataaacttcagcaaagtgtcaggatacacaatcagtatacaaaaatcactat

SEQ ID NO: 509952 - DNA, 458 bp, Homo sapiens
tatctgttgccttctggttgatagcacaacctagatgtcaagacaggctgaccagtgatgtcacacgtgggactgtacgccattattgaactaggcttggggaccacaatgagtgaaaacaaaaacccttcctcttccattgtgtgttctaagagtgagcagaccaatgagtggtggtttaagcactttctatcagaatggtgattgcttcagtgttttcgaggagatggcaacatcatggaagggcagcaacgtgagtcagcaacgtggtatatgggtcccaatcagcatctgcttctgatttgtttttgaaagaaaatccttagtcggttttcatttgaagcctgctgcagatcacagcgtcagggaaacattccaccttgctcctgggccagagcattccttggcaagaaagatctatttaaagatgaacgaccgagatcggatcgtgccttccc

SEQ ID NO: 509953 - DNA, 1139 bp, Homo sapiens
ctaagcgagtgagtaggttaagcacaagtacaaccatagaaaacatcgagattactattaagtctccagagaaaatcgaagaagtcctgtcacctgaaggctccccttcaaaatcgccatccaagacaacagaagaaattccgcactccttcgttttctgcaacacaagaacaaacaaacaaggcagaaagttgaggccatacaatacaagtctcttttataactcattattatacacaatgtgacattgcacatctacaatcaccacatttaagttgatcattcaatcatgccaatggtcagatcagaattgcggggcatgtcagcacaactggactttcaagcacactggcacaagcaggccttccacacagaaggacaacacacctttcagcatctcatcatctccatcttccatattgtcccagcaacatggcccttctgcacacttcctcacagcgcaattcactaaggtcttctcaatctcagcctctgccccatccattgcaagtcatctcatccattcaatttccaccccataaacacaaagctcatctgctcctgcacattgtaccttccagggcctttctcgccatacatcatcctgtccaagcacacagcaaatttgccccagctggcagcccacgttgcagcacatcttgccatttctcccaataccctcgccttccactctgcatcacatcccatatttcaatacattattacgctcatccccatgcattcctttgaagcttcattaattctccacataggcagaggctacccccaattgtggctcatccacgctgagtgccaatttctaagcccaggacactgggctttactcacacataccactacttcttctctactaggaacacaagtcgcaaacttcctcaagttacagccccgtctcacaggttacattacccaccgtgggtccacaccacttcaagcttctagtcgtccaccaacgacacgggcgtctactccaaagggaaaccacagaggattcgccaaatctgtagggggaaacatcgtctgagccagtttcaccaacgcaggcttatctacacagacacttcatcccactctccagccccgtgggcacagcatacagcacttactggcaacatggc

SEQ ID NO: 509954 - DNA, 317 bp, Homo sapiens
attaggaggtgacacagcacacacagtaaaaacggagaggagctgatcaggaactaagaatttagcgtatagaggagtcattgtgcctcagggcataaagagagaagctctaaagcatgcttctcaaagtgtaatatatatccagaactcctaggagtctaatgaaaacccggattctgatttgggaggtcagagataagtcctggaactctacatttcttcttcttcttcttcttcttcttcttcttcttcttcttcttcttcttcttcctcttcctcttcctcttcttcttcctcttcttcttcctcttcctctt

SEQ ID NO: 509955 - DNA, 550 bp, Homo sapiens
acccactcttttgtgtttcccacgctccccccctctatgcctggagccctggtccccctggatgagcaccaaatttttgttcaggggtcttttggggccccccaccttttccacgtgggggggggggctggggaaacccccggcttaaaaaataaagccttgggtttatggcaggggtccaatggcctctccccacggtttttcccatggggtcctccactttttccaaccacagggggggggccgagttccattaaattggggttctttgcagccccctttttggctcccccttttttttttggcccccccccccgggggcgggcctggatgtttttgggcccccccccaaggcccccttgggttgttgggtttggcccccagccctttacaagggagggtggttttccccccccttaccccccgcccccccctgtttttggtccccctgggtttaaaatgggtgaaggggtttttggccgcttgctttttttgcccctgtttccgttgtttccctcccctgttaaaaaataaaaatgccccgggggga

SEQ ID NO: 509956 - DNA, 237 bp, Homo sapiens
gactgacgagtctgtgaagagtaatgtttacaaattacaacatttctctgtgttaaagtgtggttgatggaaatcctcaacctgtcaggtctgattagagattaagctgaatctggccaggtgtggtggctcacgccggtaatcccagcaccttgagaggccaaggtgagcagatcgcctgaggccaggagccagagaccagcccggccaagactgcgaaactccatccccacggct

SEQ ID NO: 509957 - DNA, 104 bp, Homo sapiens
tagagtcaattcgtgatagtggtacactggataagttgcgttggcttgcagtgattgtagaggggtaggagtcaggtagttggtattacggaggggagttagtt

SEQ ID NO: 509958 - DNA, 635 bp, Homo sapiens
acattctgatcagtgaatttggttgtatgatttattctttagtgaaggtcttgaaattttatttgtgttctagtatggggtcactttatataggtagttggttatcatttacaaatgtagaattctttggcatagaattgagtactttgttcatcactaaatctagcttatgttttatttacgttattcaagttctttatggtctctttttttttttaaatctgctttatctggtaaattctggttctaattttgtcaatttcatttttctaacagttcttgatatatgtactttatgtatggtcaaggtttttttactattatcatcttgaaatagtatttttttttcttatattttgtttcctgttcgttgtgctgcttttctttccttttttttttttgtaatttagaagttccttattgtcaagaatcctttgttatgctcctctctgccttttaaatttaacgatattttcattttcagcaactgtaattaactgtagttttttactgctcttatttctgacccattcatggtatactgtcacttcccttttttaattgattctgcgtcattcttgtttgctttagtggtttctcacttttcatacatacttttatctttggtttcggcc

SEQ ID NO: 509959 - DNA, 257 bp, Homo sapiens
actgcacgagagcagacgtaacgcgattataatcgtgactgtgaatctcacacaatgtaggctataaggctagaggactaaaggtgccagggacctgggaaatcttaacccggctgtgcacagaccttgagaacacatgatgccaatatcgagcaggctggaaaggacccttagagagctcttgtgggaaacaggctttccggacaatattgcaccccgcgctctattatccacatatccggagcatactctggcgg

SEQ ID NO: 509960 - DNA, 163 bp, Homo sapiens
tgagagtgatctagagtatccccctatctgacccactgcgaccctacgtctataagggctatcgtaggttttctgcggtagaatatgtagcccatgtcttgctacctcaagggctacaccttgaactaacgtctttacatgtgtacttgcgcttactttgtaa

SEQ ID NO: 509961 - DNA, 105 bp, Homo sapiens
gcagcaacagaaaaaggcaaacgagaagaaagaggaacccaagtagctatgtggcttcgtgtcaaccactcttgccctatcgcctgtgtgccatggagccagtcc

SEQ ID NO: 509962 - DNA, 151 bp, Homo sapiens
caccgtctactcagaaataaccaactttatggggttccgttgtgaacatttaatctcaggcaataaagtacttcacacttgtgaatgcccagaaaatgtcagcaattatcatcatctcccccttgctagggaaaagttgacaaaatgtaac

SEQ ID NO: 509963 - DNA, 101 bp, Homo sapiens
tgacctgcccggcgagtaacggaacttaattttttagtacatttacacgttgtttaaaacgttcagtgagcattacagaaatagacacgtgtgtccaacgt

SEQ ID NO: 509964 - DNA, 317 bp, Homo sapiens
aggatcaccgttgtcggtgcaaactcagccaaattaaatatctacaaaatgctccttatgatggagcttgacctggcagccccagttagctcctacctactggccttaaaatttgtgaatgtactgatccctatcagataaaaatgttgaatggcaattttgtatttcatacatcctcactctaaataaaattatgtccatttctactctgtgcctttgatcacatttcattttccttctggaatgccctctcttctttcacctatccaatttcactgtggccttaaggcctagcccagtgctttctggacctgccc

SEQ ID NO: 509965 - DNA, 440 bp, Homo sapiens
  misc_feature (5)..(6): n is a, c, g, or t
  misc_feature (25)..(25): n is a, c, g, or t
  misc_feature (60)..(60): n is a, c, g, or t
  misc_feature (73)..(73): n is a, c, g, or t
  misc_feature (75)..(75): n is a, c, g, or t
  misc_feature (102)..(102): n is a, c, g, or t
  misc_feature (104)..(104): n is a, c, g, or t
  misc_feature (131)..(131): n is a, c, g, or t
  misc_feature (133)..(133): n is a, c, g, or t
  misc_feature (165)..(165): n is a, c, g, or t
  misc_feature (179)..(179): n is a, c, g, or t
  misc_feature (186)..(186): n is a, c, g, or t
  misc_feature (224)..(224): n is a, c, g, or t
  misc_feature (238)..(238): n is a, c, g, or t
  misc_feature (274)..(274): n is a, c, g, or t
  misc_feature (359)..(359): n is a, c, g, or t
  misc_feature (361)..(361): n is a, c, g, or t
  misc_feature (381)..(381): n is a, c, g, or t
  misc_feature (421)..(421): n is a, c, g, or t
  misc_feature (425)..(425): n is a, c, g, or t
cagtnnattcaggggggtcagttangtgacggattctgttgtggtttgaatgcagtaccngtgttctcttcgngnaaagtagacctgggtcactgtagcatngncttggattcttcagatggttgctgtanantttctcttttctttcctgggacttgttccatnaaatgagagtaatnaaaagcncttgtaaatgagggcatacaagcatttgcaaaaaatantcaaatagaggctnacagcggcataagctggactttgtcgccactagatnacaagatgttataactaagttaaaccacatctgtgtatctcaagggacttaattcagctgtctgtagtgaataaaagtgggaaantntcaaaagtttctcctgctgnaaataaggtataatttgtattttgcagacaattcagtaangttnctggctttcttagtt

SEQ ID NO: 509966 - DNA, 343 bp, Homo sapiens
ggggggggggggggggggggggggggggtttaaaacccaagcctttttttttccccccccctcttccggggggcccccccccccggtttttttcccccccaaaaaaccccgggggccccccccccccccggttttttcccgggggggggggggggggccctttttcccccgggggcccgtttgcccccttgggcccttttgggggcccccccaaaccaatttttttcaaaaaaaggggggggggggggcggggtttccccggggtttttgccccccccgggggggggggggttttttttggcccccggtttttttttttgaaaaaattgtttccccccttcca

SEQ ID NO: 509967 - DNA, 855 bp, Homo sapiens
  misc_feature (612)..(612): n is a, c, g, or t
agacgtgctgtgttgtgatcacgtgggcaggtccgggcgcggcgctggtttggtttccttctaacttgccccacggaagcttcggggtgagcgagttttcctgctaccagctgccgcgcctgctcacatcctgacctcggtttgcgggctctctgagactccgcatgtgtccgcagagcccctggggctgggctccatgcgcatgcctgttatgctccggtacatgggaaggtggtcatcctcgggataccgctgtgtagggagagacatgctttggtcaacatcaattcgtggaacggcgagtgtctcgaaaggctacgatcctacagtggagaatacttacagtgagatagtgactcttggcgaaagattgacgtttgcaccatagcatcatggtggagcacagcagggggaggactgagtacagcatgctgccctatgtcattcatcatttggggtccatggttatgtgcttgtgtatgctgtcagcctctctgcatagcttccaacgtcgcttgagagtctgtaccaaaaagctacatgaaggccatgggaaaacccgggtggcagttggtgctagctggggaacaagggcagatctctctccagagnagagaggtacagggcaggttgaaggaaacgaagcgtggaagcagtcctggggtgccgcccttgatggaggtcctctgctcgaggagaattcaagctgactcagggatcttcccaaagtcatcagggagaatggccggtggagaagtctatgggaagaggtggcggcacactctgtgagccgggtgtggggaagcgtggtttggccgggggcaggtcacggggggaacccccccccaggggggc

SEQ ID NO: 509968 - DNA, 584 bp, Homo sapiens
tttagttttacaaaggccatttggaaaacataggtttaaaaaaaaaaaaattttatggttcacaagggattgggaatgagtgtcccacccccgctaatattaaattcttccctggtcccagttgttcacatttggctaacaaggtccttgattgtcacagtattttcaataaatgagctattatgaactgcctggtgatattttcagcaagagcaactaaaatgtgtatggcctgtgctatatagccatggaggagatgggactgtgctaaagccagccagaaatgtggatggcagtgtgggaacccagcagctccatagccatcaaaaaacggtcatagaaagaagtctctcaagggcctattcttggattcagtgttccctcagaagcaatcctttaaatgtaaatagtgaatacttgcatgtctttggacaaaagctgagctacaatctattaaaatgcacaatttttgataaaatataaagtgccctctaacaaaatgtggtggaaggtgtgtgttaagaatactatacctgtttaacaataccatatgctaaataaaaatagtttggaattaaaaaaaa

SEQ ID NO: 509969 - DNA, 171 bp, Homo sapiens
cgaatcttgaagaaccccggcttgcactccggggaagaacagccccggtggcagctctttaggcctcaaaggaagaagggcgctgaaggtctgcggtttggttacattaacttttcatttcatgggggcctccttatcttccttttgcaccttcactattaccaaaccctc

SEQ ID NO: 509970 - DNA, 101 bp, Homo sapiens
agtcatgctcggctcccaaagtgctggattacaggcgtgagccacatgcccagctcactcagcttcttaggcctgataactatccattaactcttaagtat

SEQ ID NO: 509971 - DNA, 368 bp, Homo sapiens
  misc_feature (262)..(262): n is a, c, g, or t
cacagctctggcacagagaagtgggtaacctttatttgccttctatttcactagagctcggcctattgcacgggtgttgcatcgcttgaagcacacaccagtgaggttgctcatcggcttaaagcattgggagacgcatttgaagatcatgttaaattagtgaatgaagttactgatgttgcaacaacatgtgtggctgatgcgtcagctgaagattgagacagatcactgcataccctttttggagacaaattatgcacangcggaacactacgtgaaacctatggtgtgcctgactgaagtgcagaacaagatcctgagagatatggatgcttcttgcaacacatagatgacgaccctccttcccg

SEQ ID NO: 509972 - DNA, 884 bp, Homo sapiens
gagaccacctgttatgcccaccttggttatcatcacccgatgaggtatccagcaagaacgcctgaactgcaggcgcaatacgttccctattctacattcctagtaggctcgcctttcccagtactgatctgcactaatttaaactcacaagaaccctaaggcatcatataaagtattcatacttacgtacactcctcgagagtggccgaaagaaacgtatcgaaaatctctgtgccagacaatctataactattgaacctagactctgacacacataggctctttactgacgtccccatgtatacctcttatgaacggaggtccacttaatgagtcccttaaagctcaatgtcgataggcgcccacatacgtgtgtggctcgaaatagttactgtgtccgcaagaactactggaggaactagagcggctatgtgtataacatacgtcctccacattcattctaaaaacccacgtgagaaacatgccacaatacgtctacggcctgtccttgtacatgaatccactacttggagggcaggaaagtccataactacggctttcaatccatggtcaaactgaaaaaagaaggatctctagaaatccgttgcaaattggaataactaccttccaacagtccatgccacacattacgcaccgtcggttagtacacgcaaggcgcatttactgccatccaaaaagcccctaggaagggcattacaaccccgcgggcaggacaattacctcccactgaatccgcgcccacgtgacgcttttatcagtccctgccaattactaattgcttggcttaggccaaattggccatctaacgataagcctcccaaagacggattcaagaatcctcgcccgagggaatccaatattac

SEQ ID NO: 509973 - DNA, 367 bp, Homo sapiens
aggaaaaaggaccttcctagaggagggactctctccaactttgctcatgctggccctaagcaatctccaaaaatacatcgttaaaagccaaagtggaaaaaaaaccgcactattttccacttacaacaccctaggctcaccaaacattctactactcactctcactgcccgggagctataaaactcctgagccaacaacggaatatgtcttgcttactcaatagcaaaaatagtatagatacctgtgtacgggctccacttatgactccctacagcccatgtggaagcccccatcgctggatcactagtactcgccggagtactcccaccactaggcggctagtggataaccctcctcacactcctt

SEQ ID NO: 509974 - DNA, 448 bp, Homo sapiens
caattcatctcgatactccaatcggtcacatctccagggaggactcacctcccgtggcacaaaagggcaaacgctcgcttgatctttccatattacattagctgaataagaccgtgcaaagcggggtctcgcgataccttctgacctataccgggttgtcaacgcaggatgtgtcagaaaagttaccacagggcattactggctcgtggccgtcacgcgttcatatcgacgtcgctttttgatcattcgatgtcggctcttcctatcattgtgaagcagaattcaccaagcgttggattgttcacccactaatagggaacgtgagctgggattagaccgtcgtgagacaggttagttttaccctactgatgatgtgttgttgccatggtaatcctgctcagtacgagaggaaccgcaggttcagacatttggtgtatgtgcttggctg

SEQ ID NO: 509975 - DNA, 188 bp, Homo sapiens
ctaccccccataaaggccctagaggcatattttttttttaagacggtctcaatctgttgcccaggctgtattgcagtgtacagatcatgggttcactgcagccatgatttcctcaggctcacctgatcctcccacctcagcctcccaagtaactggaactgcaggtatgcgccaccatgcctggctaa

SEQ ID NO: 509976 - DNA, 684 bp, Homo sapiens
tattcctgctctgaagatgtggatacagaattagtcactcttgtcactttatttatttattggttttttttttaccatctgtgtacattcctttcatagggtagagttctagttctagaagttcttatttggttttggttggtaatgtttggaatactatttaatatccggttttaatattgctggattggctaccttgggttactgtgtgcagtgttaaaagtaatccactttctggtttaatataccagatacatagcaaaagcagctgtggaataattatagctgtttattgggctgtgctcagcttactatattaagatctggtcctgtgtaacagtaactcttttttggctcttccagctcaatttaatatgttcacttaacaaaatacgaacttggagatgcactaaagttctggttctcagcaggtggctcaaaaaattcacagaaattactttcgtaacattcattggcaattaatggtgtcttttatcttacaagtcgtcttaagaccgtgtgatctttcattctccccagctaaagagttccttcaaataacatttacaggaacatacccaaaaaaacaaaccacaccaacccgcccacacccccacacacttttgcgggccgcgcctcgggcccccgcggacaaagctctccttaacaacccatcacgcgagg

SEQ ID NO: 509977 - DNA, 304 bp, Homo sapiens
aattatgagtgcgtattataccatcgcgcgcctagctcttcatgagtactgcggctagtactattgacccagcgataggcgcgtcgacatgggctttagaggagtcataattggagcccgtaaagaggtatctttactataaacgctattgtgtaagctcgtcataccgaagctcgtcataccgaagctcgtcataccgaagctcgtcataccgaagctcgtaataccgaagctcgtcattccaagctcgtcataccgaagctcgtacataccgaagctcgtcataccgaagctcgtcataccg

SEQ ID NO: 509978 - DNA, 212 bp, Homo sapiens
gtgaggtgactctaaggatccctgtgctcagtgatcctccctgccctcagtctcccgagcagctgggattgcaggcgcccgccacacacatggctaatttttgtatttttagtagagatagggttttgccatgttggccaggttggtctcgaactcctgacttttttttttttttgaaaaaaaattttgcttttgtgccccgggtggaataa

SEQ ID NO: 509979 - DNA, 146 bp, Homo sapiens
ctcaccagtcttggtgtttatgttgcaaatctatcaaagtatgaaataatttgtgctgtatacaaattacatggggaacatataggagtgagatgagaaacttataaaaatcatgtttttcaaattttcaagtttttggtcgacgc

SEQ ID NO: 509980 - DNA, 288 bp, Homo sapiens
  misc_feature (82)..(82): n is a, c, g, or t
  misc_feature (104)..(104): n is a, c, g, or t
  misc_feature (282)..(282): n is a, c, g, or t
cctgtaatcctagcacttgggaggccaaggtgagcagatcccttgaggtcaggggttcgagaccagcctggccaatatggcnaaccctatctctactaaaagtntaaaaaaattagctgggtgtgggtgcacgcctgtaatccagctactcaggaggctgatgaaagagaattgcttgaacccaggaggcagaggttgcagtgagccaagatcacgctcctgcactctagcctgagactctgtcccaaaaaaaaaacaatgcggccgcaattcgagctcctnggcctt

SEQ ID NO: 509981 - DNA, 117 bp, Homo sapiens
atcagcctgaacgcctgatgcttcaccggcgcatcttctcatatcacccacgggcttacatcctcattactattctgcctagcaactctcactacgactgcctcatccgcgcttgct

SEQ ID NO: 509982 - DNA, 189 bp, Homo sapiens
  misc_feature (1)..(1): n is a, c, g, or t
ncaggtatctacagaacattttatcctaaaacaaaaggatacaccttattctcagtgccaaatggtaccttctccaaaattgaccatataattagtcacaaagtaggcctcaacagatacaaaaatattgaaattgtcccatgcatcctatcagatcaccatggactaaggctgatcttcagtcgacgc

SEQ ID NO: 509983 - DNA, 377 bp, Homo sapiens
tcgcgaacgttatccacgcgggagacaagattgagccgaggggacatagtgagaagtgaccagaagactagagtgcgagccttctgttatgcccgaacagggccaccggagggctccttggtctagcggtgatgccagcatctgggaagacgcccgtcaccaagaggatcgtggtccagcagtagcaaaaggtgtcaagaaacaacacccgctacttagcagaccgggaaagccggcggcggggggggggcctttccccgggggagtttagagaagactctgctcctccacctcttgtggagggcctgacatcagtcaggctcgcccgcagttatccggaggcctaaccgtctccctgtggataacacgttcgcgag

SEQ ID NO: 509984 - DNA, 112 bp, Homo sapiens
ctctgatccagtctgtgagttcaatctacaggcccagatgttggccaggcatggtggctcacacgtgtgattccagcactttgggaggccagggcgggcggatcatgaggtc

SEQ ID NO: 509985 - DNA, 841 bp, Homo sapiens
  misc_feature (4)..(4): n is a, c, g, or t
  misc_feature (68)..(68): n is a, c, g, or t
  misc_feature (151)..(151): n is a, c, g, or t
  misc_feature (162)..(162): n is a, c, g, or t
  misc_feature (197)..(197): n is a, c, g, or t
  misc_feature (292)..(292): n is a, c, g, or t
  misc_feature (401)..(401): n is a, c, g, or t
  misc_feature (404)..(404): n is a, c, g, or t
  misc_feature (423)..(423): n is a, c, g, or t
  misc_feature (511)..(511): n is a, c, g, or t
  misc_feature (624)..(625): n is a, c, g, or t
  misc_feature (633)..(633): n is a, c, g, or t
  misc_feature (665)..(665): n is a, c, g, or t
  misc_feature (674)..(674): n is a, c, g, or t
  misc_feature (700)..(700): n is a, c, g, or t
  misc_feature (724)..(724): n is a, c, g, or t
  misc_feature (735)..(735): n is a, c, g, or t
  misc_feature (754)..(754): n is a, c, g, or t
  misc_feature (766)..(766): n is a, c, g, or t
  misc_feature (841)..(841): n is a, c, g, or t
cggntgcccaacacgcagccaggctgcaagggcgggcccagaaactgctcccggggtaaactcggaancggagctcccagaaggcggattctaaggcgacatacccacagggcaagccacagaataagcagtaagggattagttaagaagngcttaagcccnaccccggagcgcaagaggggaggggaaaaggaggngggaaagaggttagaggagacagaaaacaaagcccagctcttccaagctcacgcacctagccaagggcgtcgaattccggagggaacccaggacnggaggcggggcggaaggaaggcagcattcccgggagggtccaagttctgggcagggggacagagctgttgcgggggtggggggggggggaagggagaggctccagagcnacnttcattcacataatcaacnattctccctcccacttgcatgttcaacacaccaatcctgacccagccagccccccatcaccgagtactgctgccgccgccgaaccccncccccccaaaaccacctgcccactgtccaccggcatccagccccccctccagccacacccacacacactcatccccttcctcacaatgaccgcacccaaaagacactgtactnnggaaccgncttcgtcactcggatgttaactaaaggcccangggaatatnctggaaaaggtccccccacccccaanaccaaggaccctaggttttccttnccctggagggngccagacagaggaacaggngagagggtgganatggggtaacagtccacatgtcttcaatcctcaaaaaaaaaacccctacatacaactctcagaacatcaaataan

SEQ ID NO: 509986 - DNA, 246 bp, Homo sapiens
tccccgtccccttcctctgttctcttctttctcctcttcttcttctcgtttctttttgggataagatctcaccctgtcatccaggctggagtgaagaggcacgatcaaggctcactgcagccttgaccttctgggaggatcgcttgagcctaggagtttgaggctgtagtgagttatgatcataccactgcactccagcctggcaataatatctcatctcttaaaacccaaaaaaaccaaaaaaaa

SEQ ID NO: 509987 - DNA, 810 bp, Homo sapiens
aacattttaacaagatccccagtgattcacttgcttattaaagtttgagaaacgttgcttttggctctcctctgaggagtggggggcctagcagatgtgcccatctggagcccaagccagtgcttctagagcatgcttcaggtaaacaggactatggaattttccagatggctctgagagagattttcctagtaactgcttgaacttctctgggtctgttctcctgaaaggagacagttttactgggtgcgcacagctctgtgttgaaggggtggccaagagggaagctgtttgtgatggggatagggtaggaagggttggaacttgtacctatggggccaggatgtacacacacacacacgcacacacacacacactagcacatgaggctactggtgtaagacagggttgggggtaggaagagaagagagtagtttgtggctgggatttctatttgtaccgttgcccctgggctccaaaatagttagggggcaaactaacagagatactcttttccagtctttctggtggaattttgctagagattgattgcattgaatttatagatcaatgtgaaaagaatagctatcttgacaatattgagtctttcaatccatgaatatgaaatgtctttccatttaggtcttcttcaatttttttcaatgatgttttatagttgtcagttgtaaactcttgtatttcttctgtatttcattctcttcaccgtcattgtgaaggaaatgttttcttaatttccatttatgattgtttattattacatagaaatacaattaatttttgtctattgaa

SEQ ID NO: 509988 - DNA, 479 bp, Homo sapiens
  misc_feature (73)..(73): n is a, c, g, or t
tgcccatgttttcagaacagggaactttagatctaaaagattggaaaaaattggcaaagaattaaaacaagcnaatagggaaggtaaaatcatcccacttacagtatggaatgattgggccattattaaagcaactttagaaccatttcaaacaggagaagatattgtttcagtttctgatgcccctaaaagctgtgtaacagattgtgaagaagaggcagggacagaatcccagcaaggaacggaaagttcacattgtaaatatgtagcagagtctgtaatggctcagtcaacgcaaaatgttgactacagtcaattacaggagataatataccctgaatcatcaaaattgggggaaggaggtccagaatcattggggccatcagagcctaaaccacgatcgccatcaactcctcctcccgtggttcagatgcctgtaacaatttcagttttcgcagaacattcaggtattaaaagga

SEQ ID NO: 509989 - DNA, 1053 bp, Homo sapiens
agatttcccctacgccgggctcactctcctttgggttttgcctctcagggcgctactccctccgtggtgttgacgtaaatgtgcccacggtttgtctggtcttcgtgttcttctgtgtctttcccggtctgtctttgctacaacgtcgcttgcttcgtatgggttgttgtatctgtgttgggtttggcccatggctttcctccttcgtttctctgaagggaagtatggtcacccctcggccttgtcactgcgggggggggtcccccactgcgattgactaccactcattgatgtggtccccttgtcgtggcactgttttctcagtaacctcatctgccttgtgcaatcgtggggcattcttccctccaagcgtaaacgaggtattgttgtttgatgaccattttgttaacgtgccatgcgtcaatccctttatggtgaagtaactgccctgtactgcctggcgttcgatctacgtgactaaagagactttggtgcacactgtgatcctatcgctgtgtcctctgggttcactaattctgaatacgactgctctccttggaaagcctatttcccaacgtcgtgagcgcccacatccagatcttgtagtgactgattcaagaagacttggatgaagcgtgagatgtgaagagatgtctccgcttgcgtcagggccctcactggggacgcccccgcttccaggcgctcgctccaggaccttcatcaccaagatgacttgctccgctgtgacctgcttccccagtctttttctgaataaactacaatactctatgggtgggaaaagctctgtagtctgagcaacgggtcatatttgatgctactaggacgcgttattcgatctcgtatcttagccatgttcagatatctaagggagctaggaagctcatgggggcttctgtagcccctctcaataaggagtcttgattctgagaaatttgaccgtctagaaacctcagttaaatccccacgaaggacttttaatgaagagggccgcaagccccaaatgggaaaactgtttttagaaaataggagata

SEQ ID NO: 509990 - DNA, 804 bp, Homo sapiens
  misc_feature (545)..(545): n is a, c, g, or t
  misc_feature (610)..(610): n is a, c, g, or t
ggcagttcggtggtcccgtgggctctgtctcttgcgtatcaacagtgttaggtacggagacagatccggggtactctcttccagcctccgaccgtcctccgatttcctctccgcattgcatagccttccgggaccattcattctctggtccatctcctgtcttctggtgaaccatgccaagcaccgtatattatgctgggtgtagcatccttccttgccagccaaaccatgagacatcccaagaattcgtcatgaagttattccatccgaacgtggtaggcagctcgatcaactagcctggtcaatttgtacctgcagtgcctcctaacgcctacctctcttctgggccttctaattatcgagcgctgatgattgttggcatcgtgtgataggacgatgacgccatactttcttttcgcgacgaaaccatggtccgaaggagtaaaggcgccgaaggggcctatcaatgcggtcctcctgagatgaatgcaaacataacccagtcggttggtcggcccgcgacctctcctatgccagtgtacatncacaggtaaagcccatgactgaaagtagtgatgtgggcgcgatgatacatcgcctctaggaacgngccatggagatagcgtggcctgattggtcttcaccttggagaggacataagagacttgaagacactatgggcaccctttttttgaggatcctttcagtggccccgtggcgatttcatagtcgctcgtcctacgggaaacctcgccaattgcctcctgattgatctttcccttgggaagaacttctagcttttcc

SEQ ID NO: 509991 - DNA, 381 bp, Homo sapiens
cgaaaggagatccgtaatatccttatgtgatattggatgttgcacacaggaacttcctggatgattcacaatgaggtgagatcattctaccatgctggcatgacaaactcctctcgttcctatgaactcttctctaaagcaggtcacagggaaaaaaagggtttaaagagaaataacttctccgggcaaaaactgaggttagcgggcctatcagctgtttcttctcactccaccactgctgctgactggaggagcagcctggaaagcagccgccctcccgcaaacaggtaaaccacattacctattcctgtggcggaggcaaatggatggtcaaacctaacggggtagtgctgaagttcggggacaaaagcccatcgggga

SEQ ID NO: 509992 - DNA, 757 bp, Homo sapiens
tagagagctgctctatggagtagcttatgtttctcctgtaataaacttgcattcactttactctgaattagccttccattcttgaacaagatccaagaaccctctcttggggtctggattgggacccatttccagtaacatcttcctggcaaaccaccaagggcacaaccactggcagcaaccccgacccaaaagaatagactgcagcactacattggccaaactttgccactacggcaacatgcaccattcagcaccaaacaagcaaaatcttgcagcggcatttctcgtaatccaaacgttcagacacatggagtccatcaacagccagtgcgcagaaccaaattacggccaacccatacgcaccacatagccacttcccgcgacgccaagggacaccttcgcttcccatgcgacactaggaccaagtagcgccacaccggccagtgcggacatccacaccccacacgcatacacagcggccaaacccgccgacagccaccacaacccacgccccactcgggcaaacgcaactggaacgcgcaaggacaaacagcgcatagaggacccacggacacccaagataccaaggaacacagagcataacgaaccccacaaaccggaaacaccaaccgcgacatggcaacacccaggcaccaggaaatccacgggcatacgccacacggggccgccaggcagaatacgacagataccagtacaaaacgcccaacacgccctagtacacacacccgcgcac

SEQ ID NO: 509993 - DNA, 774 bp, Homo sapiens
ccacctactgttcaaatcctactgattaagaacaatcattgatcgatttttcctgggacataaattaggctttttcctgaagcgtggacaagaaataaataatcggatgtcaaagaatgaagatggctgtgttttatgcaggaaaatgtttatgcagttgccatggaaaacaaacatgtaggctattcaaaaacaggagcttatgatatctcgtgtattggtccaaattataatatcaagaatatgcagtggcattcattctggtacctgggttaaaatttagtctgacacatcattggttcatggtacaaatatgctctctgcttatagtatattggggcttaatatttggcaagatatctagcacatacagctggttgccagtgtttttaaaatcatatagttgaaggcacagaaataaactaggggaaagcatttctcagcaaataattcctgaaagatagacagcacaatcacatgggtgactttcataattaacaggggtaattaatttttgcttaatgtgaaaacaatattccacaatgtggggccttagttaattgtgtaccaggctaaattgtgagtgatgtcaaatgtgaatatgcatagtggatagttcttaatttaatatatgtgattccattcataagtagagaaggacaataggcgggttctgactggaggttatacttcctgttggacagacataagttggattcaattcatgtgtaataagggaggatggatgaatttcaaaaaagcaaatggatgaga

SEQ ID NO: 509994 - DNA, 645 bp, Homo sapiens
agggcggcattatcggacgggcgccgagaaggcgctgtttgttagcgagcagctcctgaccggactgaccagactttgggagaagtgccggacgccccccagcgagtatattattttgaagaagcctgacggtcgaaccaaacccattccaaagaaaggtactgcggagggctttgagcccgcagacaacaagggtccgttaagagctaccgatgggaagaagaaaatcaccactgtggggagctccaaggaagcgaataagctgcaaatggctcattcaaacctccctagagctaacatggacgggccgaagaagagagacaaaaggacaaaactaagaagaccaaagcagcaggagcagcacagcagcagccacctggcgcaacaaccacagcagcaacaacaagcagcaccaacagcagcaacagcagcacaggaaagggcaaacatcccctgccttcaccaataaaccactgaatggctattcttctctttgcgccacaaagcatggctactgggtcccccaaagagggggattcacacaagaccaagggcccctcggaaagaaaaggtgcaccggttccgcgccgaacgggcactacacaccccgggacaacagaataacaaggccccgaagaccacacc

SEQ ID NO: 509995 - DNA, 945 bp, Homo sapiens
  misc_feature (36)..(37): n is a, c, g, or t
  misc_feature (41)..(41): n is a, c, g, or t
  misc_feature (44)..(44): n is a, c, g, or t
  misc_feature (47)..(47): n is a, c, g, or t
  misc_feature (51)..(52): n is a, c, g, or t
  misc_feature (55)..(56): n is a, c, g, or t
  misc_feature (61)..(61): n is a, c, g, or t
  misc_feature (63)..(63): n is a, c, g, or t
  misc_feature (80)..(80): n is a, c, g, or t
  misc_feature (83)..(83): n is a, c, g, or t
  misc_feature (105)..(105): n is a, c, g, or t
  misc_feature (114)..(114): n is a, c, g, or t
  misc_feature (151)..(151): n is a, c, g, or t
  misc_feature (153)..(153): n is a, c, g, or t
  misc_feature (173)..(173): n is a, c, g, or t
  misc_feature (183)..(183): n is a, c, g, or t
  misc_feature (186)..(186): n is a, c, g, or t
  misc_feature (188)..(188): n is a, c, g, or t
  misc_feature (215)..(215): n is a, c, g, or t
  misc_feature (220)..(220): n is a, c, g, or t
  misc_feature (222)..(223): n is a, c, g, or t
  misc_feature (244)..(244): n is a, c, g, or t
  misc_feature (270)..(270): n is a, c, g, or t
  misc_feature (288)..(288): n is a, c, g, or t
  misc_feature (330)..(330): n is a, c, g, or t
  misc_feature (377)..(377): n is a, c, g, or t
  misc_feature (482)..(482): n is a, c, g, or t
gtattgcacacgcgcgtcttcacgaggtgcaaacannatgnagnatncggnntcnnctcgntngcttctgcagccgctantgnaacctccacctcgatccagcgncccgaaganggaagcagctggataaagaacaggttagaaaggcagngnacgctctcttgacgcatgcnagtccagganaancnattatgggttgctttgaatgagaatgnagtantnnagtggtggtatatggaaaatnccaagtaaagaactgagggtcagatngaccttgctcatagtatncgatcagattcagaagatatctgtcatttacgaaggatgaanccaattcaactcctgaaaagacagaacagtttatagaaagcttttanacaagcatggaattaaaaccgttctcagattatctccctccaaactctaaagaaggaatataaatcctatgaagccaagctccgccttctgagcagttttgattncttccttactgatgccagaattaggcggtcttaccctcactcattgggagacatttctatcaaagcaaagaaagtccagtatctgtaaaccttctgtccaagaaattatcacgagagatcactgactgtataggtggaacggcttaaccattctaaagtggtctgcagtgctatacgtatggtcccgttggatgccacatttgcgccctcatttgaaaaccttgttgctgtccccaaggactttcgaaaaattggccagaagtggggagcgtgaactcctgttgggaacacgtgaactcgcgggcctccactttctccgttggcccattgggtgagcccccagatttggtattataggaaacacaggggacacagaccacatttgaccacgcgacgaaaacgaaggagacacctaaaaatgcggaggggcaactacaaagcctgaaatggacaaaaacacacg

SEQ ID NO: 509996 - DNA, 393 bp, Homo sapiens
aaataatgaaaatcagccattttagaattctggcaattaagcaggagtatgaattgaaaatcatctgtccaagagaaaactagtgaatcttgggaagaccagtggggtctgcgatattttaacttggggttattctcatctctctctccagcttagtggtgtagctaaaagctggcagtattgcagacaatggagagagctgaccacttctggagccccattgaaggcactatccccagagcacagttaatattttgtcccaacttgcagctccctgggaaaactcttttcagagagagtggctggatatttgatttgactctgaactcagctcagttgggggaagaaaaagcttacccccagggcattactgaacaatagcaaacttgtttg

SEQ ID NO: 509997 - DNA, 490 bp, Homo sapiens
  misc_feature (32)..(32): n is a, c, g, or t
gcagtccacagaaactaaaaatataatcttcntgcatctttctgtcttggagctggccataaagaaattctctgacccatcttgcctgattgtaggtcataagacctccccgttttagaaggtgtcctataccataccctgggggaaagaacgctgcacagagaggccaggaaggatctgaacagacaggccttgctgcgtttccccactcagactgttagtattacatcatactctttttgtccagtctcatttctacacagttgtccatgctttagtcatgcctatccaatgaagtctccatagaaggcccaagaggagcttccagataggtgaacaattggaggttcctggagggtgtcacacccggggaggccacagaggctccataccctttcccacatacctcaccctatgcgtctcttcttctgtatcctttgtactatccttataataaactgggaaatgtgtttccctgcgttctgtgagc

SEQ ID NO: 509998 - DNA, 270 bp, Homo sapiens
  misc_feature (13)..(13): n is a, c, g, or t
ccccttttttttncccccccttttccccgggggccccccccccccgtttttttccccctttaaaaaacccgggggggccccccccccccggttttttttttgggggggggggggggttttttttttccccggggacaccttttgcccccgggccctttttgggggccccttttaccccttttttttccaaaaaggggggggggggggggggggttttcccgggtttttttcccccccccgccccggggtttttttttttttttctctcta

SEQ ID NO: 509999 - DNA, 628 bp, Homo sapiens
gccttatagaaacagttgtagtgcttttgcttagtactttgtgaggttttgaagataggagaaaagaacctattgcttgacatttaaaagatgagctgtcctgagttacagcactggctgccatggttggtttatgatgtagttgttgttgtttgttagtatattgtttaacaaaggtatatcgcacatgggccaatgaagaaaaaattagtttctcagactccactgctttttccaagactaggcaataatcagatgacaggtcatagtgatgatagccgctagtgctccttggcactccatgttggggaggccctgtgctgatgctacaggcactaaaagtaagacccattttctgccttacagaattttctaggcatagttacaataagggacattaatacgcttccctgtcacctatattcactggccccatgtctacccactgggaatcgaatgaaacaaatcaagttataacaagtgtaagctctttgaagtatttaaacataagctatcaagaacccaggtctccaacacacttacttattaacatactagggaactccagccatctaagtaaggtatggttcatgtctcctcctagtaggtcacgttgctttgaaactct

SEQ ID NO: 510000 - DNA, 268 bp, Homo sapiens
atcctcgtcatgccatggcttccccgcattccggtccggcgcaggcaaactggcaccccgggcgagtgcggcatgcgcttcgggcaagaagatatcacaagagacaggttcaggataaatatccccccggatattgacttgaccgtagccgccgcgccacgatctgtacagttggttaaccaatctgccgcagcatttattgcctttttcaagaactctttgatttgacagccgtaatgccgttcggggcctgcaaggatattggcat

SEQ ID NO: 510001 - DNA, 696 bp, Homo sapiens
cctttccgaaggtgtctggacaactttgtaaacatcgttgacgtaaacagtatagaatgtcttaacctctccaggattgcgtccacgtaactgacattctgtttatcattactctggttctgactaaagtgaattttgacatggacatgtcatgtcatgtcatacccacacaagggtctaggtctatgctaagcctttgctctctaaagcattccaccttgagagacgttttcactctgtaatgtctggcacaacttttgtaaaaatattagctgtgaaatttttctgtgatcgctttttttttttctcctcagtaagcataatatttatccttctaaaaaagtatccaaagctccttaggatggttcacctttctctttctctctagtcctggtgttactttgcttccaacacttttccctctcaataatacaggtgcttccactgaaagaccacttttcagcaaggactggctctgaaattgacacctggattctatggcctttccctccactttgggaagctcttaagtcagacaggtactgtaggcgccaggagaaaaaagctaattattacttgtgggagtctcgtctcaggcatgctgtggggctgtgcaagattcgctgctctgctgctgtagtcatctggatgctacaattacagagaggcggttcagcacccagccgatcggtgtgg

SEQ ID NO: 510002 - DNA, 942 bp, Homo sapiens
acatcactcgagacgtaaattatggctgaatcatccggtagcttcacgccaatggcgcctcaatattctttatctgcctcttcctacggcatcgggcgaggtcgctatattacggatgcatttctctatccgtcagaaggacctgagagacatcggcattatcctccgtggcttgcaactaagtagcaaccgagccgttcagtaggctatgtcctccactatgaggccagaatatcattgctgaggggccacgagttcaattagcaagactatacttatccgccatcccatacagtgggacagacgctagttcaatgaatctagaggaggcggtactcagtagacagtgcccacacctcacacgatttgctttacctttgcactatcatgcttgcccattacactgtgaatatggcagcctcgcataaggcagagcgaactccatccattccgtaatgtgcttggcgacgacataccgggaatcgaagagcgaaacgcgccgctagtgcaagtcgacctaccgccagtgtgccgatgaaagatcaccttcgcacccttgactacagaatcaaaggacgccctcggacttacttctcttccttctctccttaatgacgttgaacagctattctcagcagacactgctaggcgaccagacaattgtacccctagtccgagccctgtgaaacgagcccgcctccacgatcaagccgaatgatattgcgctattcggctacacaattcgtcggatccggtccctaacaaactgaggagggcgtccttgccctattatatcatcctcatctagcaatatgcccatgctccaattattcaacaaaaggttaatatttcgccataaagcaacaattttatgtgccctagccgagactctcatttaactgaatcggggcaccaggagctacctttccaccttggcacgtc

SEQ ID NO: 510003 - DNA, 307 bp, Homo sapiens
agcatttcctgtaggtcgtctctagcaggtatcccctgtcatttcccgggtacggactatcagatcaccgtcaatgggtaccgttctcagctccagtggaacccggtttgctgtgaactttcagactggcttccgctggaaatgacattgccttccacttcaaccctcggtttgaagatagagggtacgtggtgtgcaccacgaggcagaacgcgagctggggagaccaacaagaaggaaaaacacacattcctttccagaaagggatgccctttgacctctgcttcctggtgcagagctcccactt

SEQ ID NO: 510004 - DNA, 346 bp, Homo sapiens
  misc_feature (74)..(74): n is a, c, g, or t
  misc_feature (76)..(76): n is a, c, g, or t
  misc_feature (111)..(111): n is a, c, g, or t
ctatgggccggctgccacttcatccacaacgcggacgagcggcgccccgccgtcggggggcgctaccggggtancnctctttggcacggcgatgcgttgcacctgggcatnttcgggagccgcggcccaagctgcaccacagcctcagcttctcgggcttcccgtcgggccaccatcatcccccgggcggcctcgagtcgccgctgctgctcgacagcccacacgtcgcgcacgccgccgccgccctcctgctcttcggcctcgtcctgctcctcctccgcctcctcctgttctcacctccgcggcctccaccccgggcgccccgacatgctgctccgcggcggcc

SEQ ID NO: 510005 - DNA, 722 bp, Homo sapiens
gattcccttgctcttttgatccctccaggctcgctccttcaggctcctcctccctcatctgttccctgatgtcacattccctgtgcaatcttcccttgcccgtggtctgtgctatctctttcctatgtgggttttctttgtcttccccaagggtgagtgtcccaggttttatctcgctccgtgcagactgatgccagatacccaaatctaatctgatttacaaggtccaacgaagctgatgggggagcgtggggcttaccctgttatgtttggaggggccaccagtgggggtgccagagaccactgggtatctgagaccccaggggatggaaattggcaggtgaagtctgattggggctgagaagttctgatcttgcacggggcgaggcgcacactcctttttttccccttggcttctcctccttctctatcccagagaaaccccttgagagccctctggctatgttcactctgggctgactccccatgtccccagatatgctggagagatgctggaacactagcgtaaccatgttgccacaacccaatggttgccagagagggaaatactagcgctctaactggcgacttccacctgaaggaagcctcgggaacacttgctcggtagaaagttatgtcaaagactgtctaacaggccccaagctcgggaatccaaaacagcgtcatggccacagtcacttggcttgggtcccctgctggaa

SEQ ID NO: 510006 - DNA, 256 bp, Homo sapiens
ggcagactggggactgtgcggtgtgtgactgctagggtgacatccgagtatgttggagaaataaaatgtgatagtggggatttacttttaagtttgtggttaggtagttgaggtctagggctgttagaacgtcctaggaaacgtgaccagagacgggctgtgacgttttacggtagacgggggacttgttgctttggaacgggggactagcgggggacaactgttgttacgtaactgacgaaactcctgcgacact

SEQ ID NO: 510007 - DNA, 859 bp, Homo sapiens
  misc_feature (262)..(262): n is a, c, g, or t
cgggctttgtatcatagcgggcgagttctaatattggaacgtctcgttgtcagattgtttgtaagtatttcccgcgcacttgttgcgacgtttgtggactgtgtattcatcccctgagcagtgcatttggacgcggaggagaggcttgatgcttctttgtgagaggggcgcgttgcgggttgcgccgccccgtggcggtggaggtagcgctattacttgtttttagacgccgcgcggggttgtcgagttggttggcgccgantggccttttctgcccgagtcgggttagctagtgcttgacgcggggttgttgttgttgctggttgtcactgttagtctcggattgattggtagaaccgtgtgtgtgggagggtctcttcctttgcctgtgacggtgtttaggtcttgtatgtgggcctatggtctcgatcctgtggcgagccggtggttgggggttgtggaaggaggggccgtgtgcttcactccggtggaacgaagatcgcaagataggtgtctagccattgttagtgtctagagcgtgggtgtcgctgctgttttcagccgtgcagagggagggtgtgtttgcgtactttggcgcccctccttttgtggcgactggcggtggggctttctttgttctgtgtggcgaagctcattagtgtgcagaatttttttctacttaagcgtggagcggtgccggtatgtctcatgctgcggcgcggaggagtcattattttatatatatgttcgtggccccgggcgggttgcgtctcccattttggttagtcttgccctctcagtgacattacaaacttgtgccagcatacaaatatgacacgtttgtctcttgaaaagagaa

SEQ ID NO: 510008 - DNA, 396 bp, Homo sapiens
taacggtcgagtcagttgaggagcagctgggacatcatcttatatttcagttggagcagtggtctagtctggtgaaggaaacagaatctctgggctgtggtaagataatccatatatgtactggtagagtaagagagaggagagtgaagataaccagtacaacagtctcacatacactaactaatgatactcccattgttcctgtgagtagtatataatcactgatgtcgttttattcatacatcctttaactgtcttcatataggtatggaaagagtcaacataaaagccacatccattttctaaatttgtgaaccaatagctttagaggggaaaaaaaaaaactaatatcttctcatattttaggtccttggcttctgtctcatgagttcccaa

SEQ ID NO: 510009 - DNA, 849 bp, Homo sapiens
atcttattagatgtcgccatgcgaggccacactcgctgagacgacgatggggaaggtgaaggtcggagtcaacgggagtatggtcgtatcgggcgcgtggtgaccaggactgcttttaactcatggtacaactggatgtcgtagccgatcaggagaccccttcagttcgatctcaagactaacattggtcttagcagtgtttccatatatgagattgcgcatcggcactgagtaagagttgccagatggccatccgctgcgacggcctgaagagaacgggaaaggcttggtcagtcacgctggggaagtccacgaatgcagccatgtcttctcagggcacggcgacgcaatagcacacctaacaccagacctaataccaaaggttccgaggcgtagcgaaattggctagagaccgaccctgggcaagctcagcgctgcgatcggggaagatccacagctaggtagcgtaactagaagcaagcgcatcccaatgggcatgaaaggggtagggagagcactacatgaggtcaggggagagcggagaaccaggagagggtgcatgatctgagtgtatgcccgtcgtggcctgaagggcccccgcaagaggtctcggtgcatatggcgctagtgagagccaacgcacgaggagtgatgaacaagacgaggccgtcggcagaatcaatctgcgcaaggaccctcgcgtgggagcgcatccgaagcatgctcttacgtcaaaacgcacatgggctggaaggtggcaatccgcagagaacaacctccggggtaatctggtggaaaaaggagctccaggaacaagcgacgtacgaatggcgggtgcaacttgggcag

SEQ ID NO: 510010 - DNA, 155 bp, Homo sapiens
  misc_feature (33)..(33): n is a, c, g, or t
  misc_feature (46)..(46): n is a, c, g, or t
  misc_feature (50)..(50): n is a, c, g, or t
  misc_feature (60)..(60): n is a, c, g, or t
gtgggggtatctatcttctccaccccctgtctnccccgctccctgncttnacctggcttntgtccatcactgggctagctactcacggttaagtgcttgcaggcccttgaaggagcttgacaagaatcccaaagccccccaagactccacgtccg

SEQ ID NO: 510011 - DNA, 422 bp, Homo sapiens
gccggcgcgcggcgtaggggactggatgtatggccatatcgtcatgccgcgattgctctgggaagattcgctgttgaacaaccgatacgcaaactgatttacgccgcctatgctaatgcctcgttatttgcgtgcgctcggcgtcccataagctgctcaactacgcacaaaatgcccgggaatatctcgacttccgctatcaggggctgacggtcgcctttgacgcgctggaactgaatattacgcgtctggaagaggacatggcgatgatgcagacgcgccagcgggtggtgagcgatgaggtgaaacatgaagttgagcaggcgctgaatgccactgcggactttatgggggcccaaaaaacagcgcttcaccaggcgattggtcacgtgtttagcgctcgcaatatccttgatttagcc

SEQ ID NO: 510012 - DNA, 405 bp, Homo sapiens
taccttgcttccaaagtgctgtgatttacaggtgtgaaccaactgtgcccagccaatagagtgctttttatttaaggtatataagttttttatttttaaattaatgttattgcacacttaataaactacagtttaggtgttttacataacttttattatgtgtactggaaaaccaaagattattgtgatatttgttgtatggtggtgatgtggaacttgcagtatctcctgggtatgtccatctggttttgtaaagtgaattatgggtagccttccccagctctttcaatttataaaaaataagtaattacttccaatgcaggtatatacaaacaataacctcaaatgtggaacaatacttgtcttagctaagcaagcagagatgtatagtttaaatagaattag

SEQ ID NO: 510013 - DNA, 1570 bp, Homo sapiens
ccacagatgggactagccaggactgagggagaaatgccctttttggcaattgttggagctggctaggtacgttttataagggagtacattttgacatgagacccttagaggcatcaggaacagatgctacttactggatgaggtagactgggagaggtggtgtaacttagcttcttgaatgatcccacatatcactgatatccactctgcattggagatataccagaacgtttaccaacaagctgtctctaagcacagactatacatcctgaagactattcacatcctgcatgcatatctcccagagcactctatctacctatgggcaggagcatgtgggtgatgcgtgatagccaacaagaattttccacgctcaactacgctatacacatgagcatacgattcacaatttccaattcacagatgggcctacaatcaccatacaccatcatagccatataagcgctcgacagggtatgcaggcaacgcacggaccttgcaaacgcaatcggacatggacccaaacggcacaacacgaataacagacggatcgaaaacggaatcccacgcatccacacggccacacgcatcatacaggagacacaacaacaactgagagcgaatggagaccaggggacacccgagactaacaccctaaaaacaacctaccaacaataaaaccaggaaacaactcaaggaccaaaagacccatccacaaatacccacagcgcgatgggatggcaagggggaaaaataaagcgagagcgaccgagcgggccaagcgcccaagcacacagcacacgcacgcaggcagaaagcagacgatacacgagacaggggacagccatacgacgccgaacgggaatcggcacagtacaaaccgctctacaagcacagaacagcaagttccaccacaggccacagccgaacagcaaggcaacccacgcatacaatcccactaaacaacagagagacactaagagacagcacccataagactacagacactaccaacggcaaacaatcacatacacaatgagctacaaacggcgacaacaatctggcacacgatcgagcaaacatcagagaaagtgacgaaagacaacagaacaaacgaacacacagaccatagagaacaaaacacagaagcaacgtacacgaaaaccaataccccgagccaacaccacaaaacaacacgcacggacaacaatacaacgagacccacgaacactgcaaaccttgcccacaacgaggatggagcaccccgacagcaccaaagccgccgacgccaaaacaagcaacagcacaccaccagacagacgcgcccgacaaagccagcaacaacaaacacgcatgtgcagccaaacaacagggacagcgacaacaacaaaacaggcaaacaagcatgcgacaacacacagacagaccaaatcaacaccagcagacgaccaaccaacgtacaatacaaacaacgaacaacacaacgaagaagacgccacaaaacacaacgagacaacgcgcagcgaggacccaaagcagacaaaccaccaagacaggagcaaacagaacg

SEQ ID NO: 510014 - DNA, 1017 bp, Homo sapiens
  misc_feature (211)..(211): n is a, c, g, or t
  misc_feature (380)..(380): n is a, c, g, or t
  misc_feature (412)..(412): n is a, c, g, or t
  misc_feature (416)..(416): n is a, c, g, or t
  misc_feature (423)..(423): n is a, c, g, or t
  misc_feature (479)..(479): n is a, c, g, or t
  misc_feature (523)..(523): n is a, c, g, or t
  misc_feature (534)..(534): n is a, c, g, or t
  misc_feature (603)..(603): n is a, c, g, or t
  misc_feature (648)..(648): n is a, c, g, or t
  misc_feature (697)..(697): n is a, c, g, or t
  misc_feature (700)..(700): n is a, c, g, or t
  misc_feature (734)..(734): n is a, c, g, or t
  misc_feature (748)..(748): n is a, c, g, or t
tggcgaattcggcacgagggggaagcgacgagtccgggacgcccagcgcgggcccggagcaggtgtaagggaagtgcggctcggtcggcgcgggtggagggggcgtgaggccgccctacggtggccgtcgagggacggcgctacggctcccacgctaggccaaacgcctccggctggcctgcgcccgagagccccttcacctgcagtggcnaacccagccggctgacgcgtgaaccacgccctcagccgccttgccagcgcccccagccgcgcgccccagcaccatgcggccgccctgctgcacggagccccgagggacatggggcaccctgcaggccctggcccctagcaccgccggcctggcccagaggtccgggacngccggcgccgccgcggagagggcaccgggccngacngcctccnccccagggtcatgctgcgggctcccaggcctaggcgcccatgacccctacgccaanccgccggctggacaccggcgaccgccacatgcgacctagcgccngccgcccgccnggggcccaatgccggtcatgcccattccgcggctgggtgcgctccttccacggcccgcacaccacctgnctgcatgcggcctgcgggcccgtgcgcgcctcccacatggcccgnaccaagtacaacaacttcgacgtgtacatcaagacgcgctggctgtacnggnttcatccgcttcctactctactttagctgcaagnctgttcactgcggngctctgggggtgcgctggccgcctcttctgcctacagtacctgggcgtcgcgtactgctgcgcttccagagcaagctgtcggtgctgctgtgctgctgggccgccggcggcgtggacttccgcctggtgaacgagctgctcacgtatggcatcaggataccaatgatgtgatcgggggctgggctggtgctcatggactacagggacatttgagggccggggagcaaagttgatgaacagccaggccgagggtgggtctacccaggatg

SEQ ID NO: 510015 - DNA, 320 bp, Homo sapiens
aaacagttacaaataatttttctactttttttgtttggagacggggggtcactctctggccaggcgggagtgcaggggtatgatcagggctggcggcagcctcaacctccggggctcaggtgatcctctcacctcagtctcccacatagcgggaaatacgggtgcgcgcggccgaactgggctgatattgggtagagagggggtctcactatgtggcccaggcgggtctccaactcggggactcaagcaatcggcccacctgggccttctaaaatacggagatcacgggtgtgagccaccacaccgggccccaaataaaa

SEQ ID NO: 510016 - DNA, 264 bp, Homo sapiens
tggggataaacacatgatccctagtactacatcttaaggaggacaccaggctcaccatatgttagacaactttgaatctcatagtactcacaacaatgagcagcatcgtcaagttgtgatgcattcattctggattggaacctactcaatcagtccttccactctaagtaaatatttgtttctcacagaccacaaggcagttcaaagggcctctagtcagagatatataggtgtctgaatgggaaacatcatacaagcagtgaa

SEQ ID NO: 510017 - DNA, 2037 bp, Homo sapiens
gaacacgcgtaactgaaagatctcaaggagtaagaggattactgcatcttcatatggacttatatggcatatagtattattccaaaaatggccacaacaatatttactggtaccatatgctgttccagaacttggatacacctccccttaaaaggtggtgtctaatgcacttccctttgcatataggccatcaatattaactttaagtaagtatgtatagtagtttgttagtttgagacagagtctcgctcgggcaccaggctggagtgcagtggcacggtactcggcttactacaacactccgccttccggattcaagtgattactgctgcctcagcctcccgaatagctgggattacagtgtttcagaatcacctgggatgatctgcatgaagattcctggactccaccaaagacttactgcactcagaaaaggaggcaagaggatgaggacatgcttaaccactctgccattaacaaactgtacacactgactctttacaaaatacagaagcatgaaactactgctcaagggattatctcaacttgagttaacacataggacactgctgactaccttaaaatgtcacactaggctactctaagggaccgggaagattgtcgggaggccaagacaacaagaaagtggaagcagtccctaaaaaaacccacaaagtagcccaggtaccacactcacggagcactgggacacgagactaaggaaccaacgagcacaactcgaaacacaggacggcgtcggcgacctccaaacggagcacgagactacacatacaagcaaccaccattacagtacacaacaacagacatgctcaacacacacacacaagcgccgcaggggagaacatcaacatccaccgtaaccacgatcaatcgcgatggcgagagaggagacagaagcgacggcggccaggagagaggcagcagagaggaccggacgaaggaggagagagaggaggagcaagaagaatgtagaaaagaggcgagaaaggtgagagaagggaggacgaggcgaggcgaggggagccgaaggcgcgcgaagagagaagggacgagggaggggagcagaggagaaggaggagagaagaaggaagcagagcaagagagcaaagaagaggtgaggaaaaaaaaaacaacgaaagcagaaaagaaaaaaaggaaaaagggaaaagagagggaaacgaggagaagcaggaagaagagaaaaaggagagaagacagagagaagaggacgaaaggcaaagagacggaggaaagcgaggaaagcagcagtaaggagaggcagaacaaagacgagaagacggcgggaggtgagaagagcacgacgagacgagcaaagcaaggacgaagaagagaagaagagaggaacgggatacaaaaagagaaacagcagaagacagagccaacgacagaacgagcgaaaaagcagaaagaaaagaagaacgagaaaagcgaaacaaacagcaggaaagagagagggacaaagagcagaagaaggagagaacgaaaggaaaagaagcagccagacagaacacagagagaacaaagagacgagaaaaaacagaacaacagaaaaaacacaaagaaagcagaacagaagcacagaacaaagaagaacagaagaacaaacagcggagagcgcgaacagaagagaagatagaataaatacaagaagaaacaaagagagaaagcagagaggtaacaacaaaagagaaaaaggaaagacagagaaaaagaagaagagacagacacgaaggcaaacaagaagaagataaagcacgaacgaagcaccgcgaccaggtcagagagagaaaagagaacaagagacaaacggacagagagaagaaagaaggcgacaaggcggcggacaaagagaagaaacaacaggcaagagaagaaagaaagaaagagaacaaagaaaagagacgagaagacaaggaagagaacaaaaacagaagccacgcaagtaagcgagagaagaagagacagaagagacacagcagaaacacgaagcaaagg

SEQ ID NO: 510018 - DNA, 606 bp, Homo sapiens
  misc_feature (316)..(316): n is a, c, g, or t
  misc_feature (561)..(561): n is a, c, g, or t
  misc_feature (565)..(565): n is a, c, g, or t
  misc_feature (569)..(569): n is a, c, g, or t
ctaaggccatatctaagttgaaagccaggattaacggattgaaaaaaagttagtatgcccacgggcctcgccccccaagccacgaatgtatttctcatgcgccaagtggagcccccaccaaagagccagccaccccagcagaggaatgacgaggatgatgacattgccctgtttggcagtgacaatgaggaggaggccaaggaggcggcacagctgcggaaggagcggctacggcagtacccggagaagaaggccaaaaagcctgcactggtggccaagtcctccatcctgctggatgtcaagccttgggatgatnaaacggacatggctcagctggaggcctgtgtgcgctttatccagctggacgggctggtttggggggcttccaaactggtgcccgtgggctacggtatccggaagctacaaattcagtgtgtggtggaggacgccaaggtggggacaaacttgctggaggaggagatccccaagttttaggagcacgtgcaaagtgtcgatatcgcagctttcaacaaaattttaagcctgagtgtgtgtacgtgngggngtgngtgaggccctcccccgattaaagactgagcccggcca

SEQ ID NO: 510019 - DNA, 987 bp, Homo sapiens
  misc_feature (1)..(1): n is a, c, g, or t
  misc_feature (770)..(770): n is a, c, g, or t
nctctgttctgattgtgtcgatgctactctatctcatttgtatcgacctaccgatacctggcccaggggttgtgctccattgaatatatttctggcgaatgcgtgtccttcctgatcccaaattactggtgtcctggacggcttcccccgatgataaacattttggcgtcctggagaggagttgccccccggggcggaagctggcacacaccggggggctcgccctacacaaaccgggggttcaccagcacccgcgtgaactgtccgctccccgctgtgacctgggggcagcacccacccctgattcttggaggggggttccgcccgttcgtctttgcggcccagtggttggtctccgccccccccccattgccggcggactcgtgtttgtcccaagggtcagtcatgcttcataaacggcgtgttgttccaccgcctcggttagttaaactcgccgcgtggttcgccccaccatttgtgttggagccgccggccctcagacaccactgggcgcaccattgtccctcaattttcccgctgggggccaccatgtatgagtgattgggccgaacatccaccccagcagggtcccaccgtcctcgtgtaaattcccctgctggaccccacacgctggagttcggtgagccccccttcccccgtgtcaaagtctcccacccaacaaggtttgtgcgtctgcgcatctcctcacagggggagccaaagaacttcctccaacgggggaaattttggatggcacccgcgttgctccncacagagagagggccccaacgcacatgtttcccccagggcatgaaggtctaggcccaccagagatacaaggcccgggggtgctacacccacagggggtaacacaccaaaatgcggggcccgggtcattaaagcccccccaaggcgggccgccagagcaagacccccgcggcctcgcccgttttaaacccccaaaggcccgctccccaaaaacataaa

SEQ ID NO: 510020 - DNA, 1277 bp, Homo sapiens
tctgggacccctggaggacatgtgtcaccatatcggccgtggtccgcggctcgtggatttcctccggatttttgttgtgaccccagctgctcgcatgcaaccacccgtggtttcgtggttcccacgaggaccctttgtaaccggggggtacgattctccaaagcacccttggatccctgggaataaaattttgccgcgtgtttgtttttgttcctctttgttccattcccacctcgggtcccgcgccgcaatgttgatgggaggagtggttcttcgcccgccctcagtaccgtttttccccgaaggggaccagaaccttgtagtaatggccccttgcccacgggagtatggacagttaaagaaagatttgtcccgcaggcagaccgggttcccattttgcaaattcctattgggctcaaaggggtgcccgcgaaccttggatgtagtgtatcctgaccctgcgcttgggagtttccatcgggaagaggtcactgacaggcaccttgggccccaagaccgggggaggatggaacttttcccccgtcttggaatttctaattgaccccccccagggttccgccctcttgtgctgtaaacactgtcgtattgtaaccacccctgaggggaggcccccaaggtatacaacattgggtggcgcacaaaaggtgggagaacaggatttcttttgttgggggcaccacaaaagagagaatgtccctccaatttctgggtggagactccacttgattgtccccgccaccccgttccgcgctattcccccgatttctccctctcacttccaagagtgtaaatttgataccccactttcacgatttgaatcttatagaggatctggcccaagagttatctgagatttgcactcccaagtgtctgaccaccttgggtaaaccccgtgttaatgcgggacctggagaggttgcctaaccctaaggaaagaaattggtgtgagtcaccccacccgagaagagggcacccctggattcttttgaacctggttcaccctgaaagaatggcccaatggccacacacagcttttgccacactcgagactttccacaccacattcttctgttattggccagggccaccaaaccctggatttctctttccccgaggaaagggtatccccctcacccattgctgtaagagagagaccaacaagactggcggccccaaccagagccagtgggtgtaaatgggttccctgggtgaccaggtcagatctttgtacgtaatttaaaatattgtggccggga

SEQ ID NO: 510021 - DNA, 319 bp, Homo sapiens
  misc_feature (16)..(16): n is a, c, g, or t
  misc_feature (274)..(274): n is a, c, g, or t
  misc_feature (278)..(278): n is a, c, g, or t
  misc_feature (282)..(282): n is a, c, g, or t
ccaagttcaaatatgncgacgcaaaaaggagatttttcgagcaaatgaacgggcctgtgtgcgctttatccagctggacgggctggtttggggggcttccaaactggtgcccgtgggctacggtatccggaagctacaaattcagtgtgtggtggaggacgccaaggtggggacaaacttgctggaggaggagatccccaagttttaggagcacgtgcaaagtgtcgatatcgcagctttcaacaaaattttaagcctgagtgtgtgtacgtgngggngtgngtgaggccctcccccgattaaagactgagcccggcca

SEQ ID NO: 510022 - DNA, 102 bp, Homo sapiens
tgttatcgattgccactcatacctcagaggacgaggaggagaaaggacaacaggggccaggtggcttgggcgagagggaggaaaaggtggcatcgataaaca

SEQ ID NO: 510023 - DNA, 844 bp, Homo sapiens
  misc_feature (355)..(355): n is a, c, g, or t
gttaaattttctttaagtaatttaacaacagatttgctaatttaaaaaaaaatgaaaaaaaaatcttaccagcagtttgtaaaggtctggaatcacagttggcatcctttattcaggtctcttctctccaacgtacacttaaaattggtgccgagcagggatataacctgcagttaagtgaaaagaaaatccagcctccccctccaaaaaaaaaaaaaaaaatttaatttttaaaaattaggggtatggcaataagacacttcagaggctatcttaacctcgtgaatacccatcttctagttttaaagacagagacattcccattcgtcgaaacttgttaacctggtgttggccnatctcgtgtgccggaagtaagtagaccttaagacagagctttaagaacgtaaacactttagaacaaatttggaggcgtcacaagtgagataaatttttagaattatttactattccaagtgattaaatgaggatcttgaaattaaatttctgaagttcttccaatttttacattttatgggaggggtcccgtgagttcgtgtcaacttttttattgaagtctctggccctaatttggggcataacttgtttaaaccttccaaaatgtgaaatgttagcttcctttctttaacttgtttattaacttttattagaaattttgacctgagttagttaacaaagtatttgggcattattggcagtacagatgtctctaagcactggtcaaggggcacattttaaaacttcagttctgggctgaaagaattggctagtttcacagaaagattgggctatcttaaaactcaagcgggtttaactggtcccatga

SEQ ID NO: 510024 - DNA, 425 bp, Homo sapiens
ccgcgcaacaggaggataacaagtcccagaactgatggacacccagggctgagtcaactataaccaccctgccactctctcacctgtcccaccaccggctaacgtttggccacactttttacttcactgtctggagtgtttgtcattaggtcgatcagaggcctgctttcatatcctacagccacgtgtgcttctggggtatcgcataactcgatcagaggaaggtccatgatcgggctggcttgtctagcatctggagtgaccgctattggttccagtttgatatctaccacaatagcctgggttccataaccaacggttaagagcttagtccagcatctttctggctaccatcttgggagaatgtgagctttgctcatgttccatgtaggctggcggtttgtaaagccatggaatcaggcggg

SEQ ID NO: 510025 - DNA, 443 bp, Homo sapiens
actggggcaggacggtagcttgacaggtgcttcccggctgacttcattgatcaggttgatcatgtagcgatacaccgcctgataggcaaagtctgcctgtcgctctcccctcaggttcatcgctgatcaccagtttccataggtgaatacacgcgactagcgtcccgacatttgagtgatacgagccttggaccgcttgaaacgaggttcacatacacgcgcactgcgtttgcccggcagcgggcatttgcggtacaggtgctgcaacaacggcagcgacaacccgccgatatccatcagccactggtgcagcatgtccgcgacgggcttgccctgcagggccttgtggagctcggggagcgctaccagcatgccgggatggcattgacgcaagtaaccctccaggcgttcgccatgctgaacgaacggacgcggatgaactt

SEQ ID NO: 510026 - DNA, 375 bp, Homo sapiens
atctaagatcccagcggcgccttaattaaaacttggtcccttttctgtgccaacttaatgtttgtttttgtacttgttttggtattgagaatggagtctcgctctgtagcccaggctggagtgcggtggcgcgaatctcagctcactccaacctctgcctcctgggttcaagcgattctcctgcctcagcctcctgagtagctgggattacaggcgtgcaccaccacgcctggataattttttttgtaacttaagtagagatggggcttcaccatattggtctgaaactcctgacctcgtgatccgcctgcctcgacctcccagagttgctgggattgcagatgttagccaccgatcctggcccccccaaaaaaa

SEQ ID NO: 510027 - DNA, 955 bp, Homo sapiens
taaggctagtagaggctggtgttaatcatgtcagcgacatagtcgatgactcatgatgaacctgttctactggctccacattgacgaacatgatctcatatcacgcacttgttcgcgccttccttagttcacggcatgccttttatttctggtatcggtatcgaagcattacaaacataaacattctgactatcttacaggggtgacctatgttttcagaagtcatgcgtatattctcgacctcggcctacggtgatgctgccgattgtcatcattattttttctaaaatattaggcatgaaagcaagcgatagctttaaagcggcgtctgcgaatatcgcgattggcttgtgttggcattggcctatgtagatctggcttcaatagctcggattccattcggcccggcggcgaaagcgatggcggaaaattgcgacctgaatctgcatgtggtcgatgttgcgctggccgggctcttcaccaagtgagcctgggcgcttcgcaacatttgcgctggtggcgcattgccgcattgcgattctggttccacgtgccgatgtttatctgacccgtatgacgcgcgtggtaaactgttgcatgtctggaaatatctggcatatgaccttcaccggcgcgttgctgcatctggcaccggtctcatggatgcattagcggactggcacggtgtggttattccacgcggcgtgttgttgataggctcgtgtggctggtttgccccgcgatacccgaggagtttcttgagctggcaggtattagctcatccggccggcccgtgcgggtattttgtggcccatgcggtgctgggccccggttatcgtggaggaaatccatgcgttaccggccttaatttaggccgggacttcccggcaattcgggccttgggcgcccgtcccgcgggggtaggagggggcacaaggggccaccgggaatacca

SEQ ID NO: 510028 - DNA, 373 bp, Homo sapiens
cagttcgctaaccaaggtcctcactggtgaatgatgcaaaatatggaatccatgtatgaatgttaccctaaaagagtggagtgctggtacatgctcaacatggatgaatcatgaaacattatgtaatgaaagaaccagaccaaaagccacatatgtcaatgccatttatgtaaagtgtccatcaggcaatctatagagagaaaaggtaggttagtggttgctttctgttagtagttaggagctggaagtagtgggaaatagggagtgctgctaatgatgatggttttgattttggggtcatgaaatgttctgaaaattaggtagtggtgatgcttacaatcttgtgaattccctaaaaaaccacagaattgta

SEQ ID NO: 510029 - DNA, 114 bp, Homo sapiens
cccacgcgtccgtgaaatctagagtaaaaccaagctggcccaaggggtacctagaagggagacaaagccaggcctgctgcccagttgagctctgggaagaagaggagcaggccg

SEQ ID NO: 510030 - DNA, 107 bp, Homo sapiens
gaaaaattgatgttgcaagaaatgaggtctcaaaaatgggattgtgcctcctcactctgcgtcacatggggaataatccctgaggccacgttcaccagtggggtaga

SEQ ID NO: 510031 - DNA, 357 bp, Homo sapiens
tatatagtgtacactacaaacaggatagggacatcagacagccccagaaacccttccagatctgatatgggactattaattaccatgctgtaaataggctattcattcacaatgcagcttgaagggggaaggctccactgcattctttggctaaggcctgaatgctagctcatctgtaagatctatactcgcaggtttcgttttccttttaaaatactttagggagagaggcatggtttctgaggggttctgcaagtatgattcaatgtgcaacatacaggtaggtcttcagcataagctgcaatatatgcatgtcaaaactttgacatcttcctcctcaatttaccactttcttct

SEQ ID NO: 510032 - DNA, 383 bp, Homo sapiens
cagcaggatcttcaaacaccgcaatctaaagaaaagaaaactgtgaggctgggcgcagtggctcacgcctataatcccagaggctgaggcaggcggatcacctgaggtcaggagttcaagatcagcctgaccaacatggagaaaccctactaaaaatacaaagttagccaggcatggtggtgcatgcctgtagtcccagctgctcaggagcctggcaacaagagcaaaactccagctcaaaaaaaaaaaaggaaaaaaaagaaggtggaagtggggggttaaggcaattaaccctttccttgggttgaaacttatggaacagacccttttggaaattgtgccttgtggttgcttgggaaaattgtggtgtaggggctctaagc

SEQ ID NO: 510033 - DNA, 150 bp, Homo sapiens
agacacaagaattcgagaggagacaacaggagagagaagaagcccaaaggcagtacacaaagaggacaatggaagtgtttcgaatactgaacacaaagattaacaggggccaaccaaacttgattgtacacatggagtaccttcttcaca

SEQ ID NO: 510034 - DNA, 358 bp, Homo sapiens
accacaactatatgtgccacgctcaagtgtgagaggttatatgcagtctatatttaacaagaggtctaaacacatcttagatctaagcagaagaaattacagtactatagattacataaacaagtacctctatcaaatctcgatctctatgcgtagctatattggattacttaaaaagttctaaggtccctttcccccacgccccatatgggttaatttgggtaaactaggcacattttacaaggaaatctgtgtcaaaacagataacagtgcataaatcaatccaaatttagaccctggcaaccaagttcgcccaattgggcctcagtactacgaggactcggtcaaacaataaata

SEQ ID NO: 510035 - DNA, 93 bp, Homo sapiens
ttttggatatttggtagaggcagggtttccactaaaaatacaattgtgccactgcactccagcctgggcaaaagagcgagaactccgtctcat

SEQ ID NO: 510036 - DNA, 379 bp, Homo sapiens
gtcaagatgaagaaccatttgcttttcttgggagtccctgcggtttttattaaggctgttcatgttaaagcccaagagagatgaaaggattgttctttgttgacaacacatgtaagtgtgtccccgattactttcagagatcataccgctctttccgcagagactcatgaggacaaatgtagagagagacaaacgcgttattgtgtctctgtacaacagggagagtatctctgatcccaccatcaccactgagaaccaaaaatgtgtaccacatgtcttcatctctgtaaaaaatgtgatcctacagaagtagagcgagataatcagatagttactgctacccaccgcgatatctgtgttggagagagggctacagaga

SEQ ID NO: 510037 - DNA, 1015 bp, Homo sapiens
agcgggccaccgtgccgccctgccgccctgcggccctgccgccctgccgccctgccgccctgccgccggtggtccctgcccgtggtgctccgtcgcccccgccacctcacgtcctcccgtgcgtcgtggagcgtctcggctacaacatgttgggcatgatcaagaatctcgctgttcggaagcgtacgagacgtggccttggcaggtcctaacgcaaaggggacaacggaagaagttgcctatgacagaaagggcctgtgaaggcggcaacatttgccacagtaggaagtgacagataagcctgtgcgcatgaggctctacgggcaagcaatgcccaatggtcgcaaagtatgcgcgggggcaccaatgacaacgggcaattggcgatggccgatgacagtccctattctcattagctgtgttccccaactgaacgatggctctctgcctcaagaacttaccagtctggttccggattccacaaccaactttcacacacgcgacccaccagctcccagtgacaacaagcgttcaagcatcgaggcaacgggaaggccatcacctgtctatcccactgccagcaccgcgcgctcacatgccacagcgaacccgacccacgatagccaccaagccacccgtcctgcgtgccagccctgcgagcgccacagccacctaccgggggccacatccacctccgcaccgccaaacgaccctccccatgaacgccccaacgagacaggcgcaccggagcaaccggctggccgaacgacaccagcgacccaatgaaccaacaacacaccgggaaccagcagcctccagtgtccccaacacacagccggcacgcacgcgcaccggccctcccacgcccccgcacgccacaaacacccccacccaccgcccctcaacgcacgcacccgccacccccccgaccaccgcctcgcccccccgacgccccccctccgccaccccaccacccgccaccacgacgcacaccccccaccgccccacacccgcc

SEQ ID NO: 510038 - DNA, 861 bp, Homo sapiens
tatacaaactatggcaaacacttgtggcaaatctgtctgatataaaggaaaagcaaaatctgtataacattattactacttgaatgcctctgtgactgattttttttttccatttcaaaatataaacttttttggtgaaaagtatgctcaaggttttttttccctttccccattccctgggaaatacactttgggtctatgtgactgggttgggcaatagttaactgggtactgggcattgggattaaataacaaaagtaggttagccgggaaatgagaattaacaattcaccaaagtggggtggtctttatttcagtacccaaacctcttccttcacccctaatatttggggcggctggcaataatggtagtcaccattaccatttccattcctctaattaggggaagacacttacatctctgggtataccggaacacaggatatcaataccacttcttggttctttccaaatgattttattccatggtgttggccccaagagggttggcagcttccacctgtgaaaccttgggattgggctgtgagacggacagcgttggcgacgacaacttggttagacacaacgcaagaaaaacacactcctgcgaagcgacagttccaaactgtggctataaacggtggtgtctttgacttactggtgttcaacgactggggggcgcggaaattcttttaacattcactcctattagaagggccttgggggctctgtacaatattgggccccacaacgggggggtgtacctccggaaccaccatgtgggttggctggcattccacacggtggtgttgtaccttcgtccttgggcaaaaaaccctttagggggcctcggcacataag

SEQ ID NO: 510039 - DNA, 755 bp, Homo sapiens
  misc_feature (24)..(24): n is a, c, g, or t
  misc_feature (66)..(66): n is a, c, g, or t
  misc_feature (68)..(68): n is a, c, g, or t
  misc_feature (81)..(81): n is a, c, g, or t
  misc_feature (94)..(94): n is a, c, g, or t
  misc_feature (123)..(123): n is a, c, g, or t
  misc_feature (126)..(126): n is a, c, g, or t
  misc_feature (149)..(150): n is a, c, g, or t
  misc_feature (156)..(157): n is a, c, g, or t
  misc_feature (160)..(161): n is a, c, g, or t
  misc_feature (204)..(204): n is a, c, g, or t
  misc_feature (217)..(217): n is a, c, g, or t
  misc_feature (219)..(219): n is a, c, g, or t
  misc_feature (221)..(221): n is a, c, g, or t
  misc_feature (223)..(223): n is a, c, g, or t
  misc_feature (231)..(231): n is a, c, g, or t
  misc_feature (234)..(234): n is a, c, g, or t
  misc_feature (255)..(255): n is a, c, g, or t
  misc_feature (258)..(258): n is a, c, g, or t
  misc_feature (261)..(262): n is a, c, g, or t
  misc_feature (264)..(264): n is a, c, g, or t
  misc_feature (268)..(268): n is a, c, g, or t
  misc_feature (271)..(271): n is a, c, g, or t
  misc_feature (273)..(273): n is a, c, g, or t
  misc_feature (277)..(277): n is a, c, g, or t
  misc_feature (280)..(280): n is a, c, g, or t
  misc_feature (285)..(285): n is a, c, g, or t
  misc_feature (294)..(294): n is a, c, g, or t
  misc_feature (306)..(307): n is a, c, g, or t
  misc_feature (313)..(313): n is a, c, g, or t
  misc_feature (321)..(321): n is a, c, g, or t
  misc_feature (325)..(325): n is a, c, g, or t
  misc_feature (334)..(334): n is a, c, g, or t
  misc_feature (336)..(337): n is a, c, g, or t
  misc_feature (343)..(343): n is a, c, g, or t
  misc_feature (345)..(346): n is a, c, g, or t
  misc_feature (349)..(349): n is a, c, g, or t
  misc_feature (352)..(352): n is a, c, g, or t
  misc_feature (354)..(354): n is a, c, g, or t
  misc_feature (357)..(357): n is a, c, g, or t
  misc_feature (359)..(359): n is a, c, g, or t
  misc_feature (363)..(363): n is a, c, g, or t
  misc_feature (385)..(385): n is a, c, g, or t
  misc_feature (421)..(421): n is a, c, g, or t
  misc_feature (423)..(423): n is a, c, g, or t
  misc_feature (451)..(452): n is a, c, g, or t
  misc_feature (455)..(455): n is a, c, g, or t
  misc_feature (457)..(458): n is a, c, g, or t
  misc_feature (460)..(460): n is a, c, g, or t
  misc_feature (464)..(465): n is a, c, g, or t
  misc_feature (467)..(467): n is a, c, g, or t
  misc_feature (476)..(476): n is a, c, g, or t
  misc_feature (484)..(484): n is a, c, g, or t
  misc_feature (492)..(492): n is a, c, g, or t
  misc_feature (514)..(514): n is a, c, g, or t
  misc_feature (528)..(528): n is a, c, g, or t
  misc_feature (534)..(534): n is a, c, g, or t
  misc_feature (536)..(536): n is a, c, g, or t
  misc_feature (540)..(540): n is a, c, g, or t
  misc_feature (576)..(576): n is a, c, g, or t
  misc_feature (582)..(582): n is a, c, g, or t
  misc_feature (596)..(596): n is a, c, g, or t
  misc_feature (600)..(600): n is a, c, g, or t
  misc_feature (605)..(605): n is a, c, g, or t
  misc_feature (607)..(607): n is a, c, g, or t
  misc_feature (628)..(628): n is a, c, g, or t
  misc_feature (636)..(636): n is a, c, g, or t
  misc_feature (646)..(646): n is a, c, g, or t
  misc_feature (688)..(688): n is a, c, g, or t
  misc_feature (705)..(705): n is a, c, g, or t
atttttttataaatatttcaaatnttacattgatgtcatcaatattacaaaaaaggaaaaaaaaantnacaggcaacattnaagagcaccaganacccagcgcacacctaaagtagaccatgnttntttccttccactgccagtttatnntcccgnnaanncccccaccccctcgttttcctcctccgctttccctaacccgtntcgcgggggcatntncncntctttttnttnctcttcttttttgttttcccnttnttnntnggcngtngngtcntgntattnttggtattnggataccaggtnntttatnttgctctnggcntcggtgaantnnattttntnnatnttntngcncntttnccagtgtaggaagggtttgggngggaacatggccgtgaactgctcggagatgcgcttnancagctcctggatggccgtgctttttttnnttntnntngttnntnttttcaggncgcggggngggatgtngcacacggccgttttcacgttnttggggatccattncacgantngttntttttttttttttttacttttatctttttttttttnactttntttatggacatttngttncggantntggcagccaccgtcagtagcngccgtggngcgggtcgcnggcggccatcatgttcttggagtcgaacatctgctgggtganctcgggcaccgtgagcncccggtactgctggctgccccggctggtcaggggcgcgaccggggcatga

SEQ ID NO: 510040 - DNA, 1053 bp, Homo sapiens
aagccccacccagcccggacgtgctgcaggctgccacccacagagtcgtggacgctcaggcccccttcccggtcccgctccacatccagctcccgcagcaggaagaaggccaagaggaagagggtgtccagggacgcacggactggacgcgctctggtgacgcgctctgaatccagtggacagtgagctcgagtgtcatgcgtcaccatcagtgtggtgaggagctgccccagtgaggcatgcgtgtccaatggccaagatgccgtgcgtgtcctccatgtgaccgctccagcagccgagagcgagctaacgaggaagaaagccaatggacaagagcagggagcacatggcggggcccctggtggccacagaccggaggactgtaccggtcgcggtacggggagccctggcaagctcttcctatgagcactatgagagtaggaagacgaacgacccggacgatcaaggtgcagaacatacggggaagggagatgaacacaacaagaagacagccagggcaacggctcagacagagcacaagccaatcacaagcgaaccaccagccacgagcggaccaaaacagaagcgcagagagcagcgaatgaacccgaaaacggaccgcaacgaaacgcacacagccaccaaaaacacaaccccgggcacggccagcacaagcgagcactcaacacccgtgaccaccggaccgaccaccagaccacacaccccacaaagaacaggccgagagaacagaagaaacaaacagacacagacacgagcacacaagccggagaaccaacccacgagcagggacgcgagaagacaatctgacagaccgggcaccggccgacagagccaggagaaagaggcagcgccggagacaagagagagaacgacagaaaagagagaaggggagcagaggaaggcagacatacacccgggaacgaacggcgagaaagaggcgagcaacgggaggacagcagacgagggaacccgagcaggtcagagacgaaaacaaggaaacgacgagacggcacgagtaggacgctggtataa

SEQ ID NO: 510041 - DNA, 217 bp, Homo sapiens
ttttctaattgtgtgagaagtcatattggtatttttacagaaattacattgactctttagattgctttgagtagtatggtcattttcatgatatcgattcttccaatccatgagtatgggaagtatttccatttgtttgtgtcatatatgatttccctcagcaatgttttatactcctccttgtagagctctttcaccttattggttaaggtcgacg

SEQ ID NO: 510042 - DNA, 653 bp, Homo sapiens
gacagagagtggaaaacagcagaggtgacagagcagccgtgctcgaagcgttcctggagcccaagctctcctccacaggtgaagacagggccagcaggagacaccatggggcacctctcagccccacttcacagagtgcgtgtaccctggcaggggcttctgctcacaagcccttcaacttttctaacccttcctgggaaaccccggcccacaccactgccagtcatatgaatccagccatcaagtgcaaggggaaggaggtctctcttgtcaaatctgcccagaatttggctacagtggtacaaggggaaagagtgatggaacgtcaattgtagaatgcaataggaatcaaaagtacccaggcccgaaacagcggtcgagagacaatataccccaatgcatcccgctgatccagaacgtcacccgaatgacacaggattctacaccctacaagtcataagtcagatctgtgaatgaagaagcaactggacagttccatgtatacccggagtgccaagcctccatctccagaaaatccaacctgtggaggacaagatgctgtggctcactggaactgaatcaggaacactactggggataacatcagagctcggtcagcccagtgagtgcatggaaggctcatctatcggcca

SEQ ID NO: 510043 - DNA, 215 bp, Homo sapiens
  misc_feature (174)..(174): n is a, c, g, or t
cactgggagatgccatcaacaagtacgatgtgctcctcagcatttgcacaatgccccagctggcttgctatgagcggtgaccgtgcgctccaagaccaccatgcgtctcttctacgctgactctggccgcttcgaccccgcgtagaaccaccagacaactctcgtctgctggcntcaggcctgggttccttgcttggacccctcgtgaaacgcgc

SEQ ID NO: 510044 - DNA, 274 bp, Homo sapiens
  misc_feature (244)..(244): n is a, c, g, or t
taagcacgctggagtccaaggcggagtggatcacttgaggtcaggagttcaagaccagcctgggcaacatggcgaaaccctgtctctactaaaaatacaaaaattagccgggtgtggtggcacttctactgtaatctcatgcttctctaggaggctagagaccaggagaatctgcttgaacccgtggaggcagcaggttgcacgtgacgctgacgctcatgcccactgcactccggtcctaggntgacacgcgggaacactccgatctccatgg

SEQ ID NO: 510045 - DNA, 380 bp, Homo sapiens
  misc_feature (47)..(48): n is a, c, g, or t
  misc_feature (61)..(61): n is a, c, g, or t
  misc_feature (120)..(120): n is a, c, g, or t
  misc_feature (139)..(139): n is a, c, g, or t
  misc_feature (152)..(152): n is a, c, g, or t
  misc_feature (161)..(161): n is a, c, g, or t
  misc_feature (166)..(166): n is a, c, g, or t
  misc_feature (169)..(169): n is a, c, g, or t
  misc_feature (177)..(177): n is a, c, g, or t
  misc_feature (182)..(182): n is a, c, g, or t
  misc_feature (191)..(191): n is a, c, g, or t
  misc_feature (193)..(193): n is a, c, g, or t
  misc_feature (215)..(215): n is a, c, g, or t
  misc_feature (262)..(262): n is a, c, g, or t
  misc_feature (288)..(288): n is a, c, g, or t
  misc_feature (301)..(301): n is a, c, g, or t
  misc_feature (307)..(307): n is a, c, g, or t
  misc_feature (311)..(311): n is a, c, g, or t
  misc_feature (331)..(331): n is a, c, g, or t
  misc_feature (337)..(337): n is a, c, g, or t
  misc_feature (344)..(344): n is a, c, g, or t
  misc_feature (348)..(348): n is a, c, g, or t
  misc_feature (371)..(371): n is a, c, g, or t
  misc_feature (373)..(373): n is a, c, g, or t
agccctttccggccctccccagggccccccgccccctcctttgcctnntgggtggaggcanccatgggaaggagcccaggggagctggcctgggggaacgaagcccatgttcgcttcctnacttaaaactggggggggnggggggtggggcntgttccccngcagnatntgttctgngaagnttgttaaangnaaggaaagcttaaattcttggntctttaaaaaagaaaatcttatttaacccctttggggtttagatttncttacccccatagcctagaggtcagntttagttttaacnttgtgnaaanattaaaagaatcttggaacnttattnttttttntccngctgaaaaaaaaaatttaacccntnggatgga

SEQ ID NO: 510046 - DNA, 255 bp, Homo sapiens
  misc_feature (227)..(227): n is a, c, g, or t
  misc_feature (243)..(243): n is a, c, g, or t
tggtgtgtctccttgtgctatcatagcctaggcttgtccatcactacttgcagagccattgcgacgctggtgtaaagtagcccagtatacgtgtgtcctcctcatttgatatgtgggcatagcactcatgtctgtactcgatctattaaagttcctgagcactgattacagcatctgggcaccttaacaagatgctgtgcttgaaaatgcatactgcaactatcacntaacgaacatcttacntccatatcctag

SEQ ID NO: 510047 - DNA, 131 bp, Homo sapiens
  misc_feature (3)..(3): n is a, c, g, or t
gcnttacttttaaaaaaataacacactcttggcaggtgcggtggctcacgtctgtaatgccagcactttggaaggcgaggcaggcgaataacaaggtcaggcgatcacaaccatcctgagggtttcgatga

SEQ ID NO: 510048 - DNA, 123 bp, Homo sapiens
caagaaaggggccctattgagtctctaaaaaggaaagtcatataaaaccaattagacttccccgtaaaagaagaaaaataagatagcctcctagtggttcactgtattaactataactcctag

SEQ ID NO: 510049 - DNA, 284 bp, Homo sapiens
cgcaccgtccctgtagcctctttcagaaggtcactagtcctgtttgtgagggttccatcctcatgccctaatgacctcccaaaggcctcaactcatttgcgattaggtttccacataggaattttgtggggacataatattcagatcatagcatttagaaagcaaaaaaacaggctgggcatggtggctcacgcctgtaattccagcactttgggaggctgaagcgggtggatcacaaggtcaggagatcaagaccatcctggctaacacggtgcgttggccca

SEQ ID NO: 510050 - DNA, 270 bp, Homo sapiens
ttgatcgaggattccaaagatctttgagcatcaccaaaatacctatagaatggctaaaacaaaacaaaactgagaatacctaacactggtgaggatgccaatcaactatactcccatacactgttggtgggaattttaaagttacagccattctgaggaacagctgagcagtatctcataaagttaaacacttaccatatgacccagcaatcttactctgagatacatgccctagagaaatgaaaacatatgtccacacaaaaacttgta

SEQ ID NO: 510051 - DNA, 455 bp, Homo sapiens
  misc_feature (218)..(218): n is a, c, g, or t
aaactagcccttatagaaattttgctggcgctgggcaaagattgggccccccggccggccccaccggccccggggggatagaaaacggggccagcaccgaaatttttccttgcccccgtggggggccccccgacctaggggatgaaagctccaaccctggcagggtgggcagtccggatcagttgcccctggcctgttccccccattatttaagggantgctttctccacgccgacgcccgcccggattgctccccaaaccccgggacccctttggacctcgggacctggaccccgtcctggttgcccaggaggggcccctggcatggattaaaaaatccttaccccaaaaagggcccctcgctttttttggcagggcaccagggggacttaaggctggaacggagggactttctgggggttggattgggggtaataaacccggccggaagcgga

SEQ ID NO: 510052 - DNA, 812 bp, Homo sapiens
gatcggtcggttccacgctggtgcctgtggcgcgggggagaggcggttctgttcccgggatctgcaatgtccttgttagcgggaggactgggatcccggccgcggctgctgttaagcgtcgaagctcagcggggccgctggacactgacctgtgcttagaactcatcctggccctgcagagcctgcctgcgagtccctgtgcgtcccctgtggcgggctcttggagccactttccctgagcggaagtcagcccgcggctcggactccgtgcgggacctgctcgcgaggaatggctgccgccgggttcaagcactgtcattcctgtatggcccttgacaatcatagccagacaccatgggctcgtgacgcccacatcactaccgtcaccgaatgcatttgacggttggagaacgacgtagacacaggcctcggcgtggactcgaccccgtttcaccaaaaagtttgcgcacagtccttgcgctttactacatccaaatccgatagagagaaacattcaaggcgcaaaggcccttatggaggtatgccttccaacgggttgacccaatggcatttggccataaaacggcaaaacaggccaattggttaagcgccgtaaacacattcacaggcaaattcgttaatacgcagcaattattggaaacatcacgccgaaaagggccaagaagtttggcttggggcgaactatgacccgcacaaatcgattattaccttactccagaccacatagagcccaccaaagaagggcccaaagagggccacaaaaggagcgacgccacgtatactcattcgca

SEQ ID NO: 510053 - DNA, 284 bp, Homo sapiens
acccgatgtgagtcgccaagacccatatacgctattaaatcggcgggcacggacttaaaaagacgagcaattacttcgcattgaatttcccgagcgttcctggcgcgtaggtcaactttccttgaaaaatggggcccacagttaaaaattcctctatcccataatcgcaatcatggggcggctgaagggcgtatctaagcgggcttccaattggttgagcaacctgccgagcaattatttgccaggctgcaagccatggccaatgagtgcgaaaccctcaccga

SEQ ID NO: 510054 - DNA, 907 bp, Homo sapiens
atggcacatgcagcgcaagtaggtctacaagacgctactgtcccctatcatagaagagctgatcacgctttcatgatcacgccctcataatcatttccttatctgctctcctagtcctgtatgcccttttccgtaacactcacaacgaaaagtaactaatactaacatctcagacgctcaggaagtagaaaccgtcgtgaactatcctgcccgccatctatccataagtcctcgatctgccctcccaattccctacgcatcctttacataagcaagacgaggtcaactgatccctcccttaccatcaaatcaagttggccaccaatggttacatgagatcctacgaggtacacgcgatcatacgtgcgggaatctgaattctgtccaagcatccttactatatcgtttccccccgattattccatagaagccagggacgaccctgcagacctcccgtttgaacggttggaccagatcgatgtagatacgtctccgattgaagccccccccattcgtataataaattcacattcacatagacgttctgtggcaccctcgatgacgccttgtccccaccaattacggccttagcaacacgagatgcaatttccccggacgtataaaaccaaatccatttcaaccgctaccacgaaccgggggctctactaacggtccactgctcctgagcatctgtggagtcaaaaccacaggttcatggcccatcggtgcatagaatttaattcccctaggaaatcttgagaagggcccgatataacgctaataggaccccttttacccctttagaggccgagataaacaagatgtcatacacaagagaccttttgcccccgctccttgcaaagatctaacacacgggggggcgcccgagaaggacagaacgcgcgag

SEQ ID NO: 510055 - DNA, 1578 bp, Homo sapiens
  misc_feature (257)..(257): n is a, c, g, or t
  misc_feature (505)..(505): n is a, c, g, or t
  misc_feature (1117)..(1117): n is a, c, g, or t
  misc_feature (1154)..(1154): n is a, c, g, or t
  misc_feature (1208)..(1209): n is a, c, g, or t
  misc_feature (1373)..(1373): n is a, c, g, or t
cttcagtcgctcgtgtttcgcgttctcgttgctgttctctcgcttcctctgtctggctttctctgcgctctgtcgcttcgtcgttgtcgtgttagcgtagtcgtgttgtgtgtcttggggtgactttgctctcgtgtgcgtgcggcgcatcgtgctgctccctctgtttctggcgtgtgtttgtcgacgttcgccggctcgtgtgatcgtgcggcggtacctgcctcggcttgttctgggctgttcttcgtgcttcntctctactgctgttgctttgtgagtcgctctgtctgtagtagcttgtgtgttgtgtcgagtcagcgtctgctgctgtcgtgtgttctgcagccgtagtcttccgtcagttctactagcgtgttcgtttgtagtgtccttcgttgtttccccccccagttgtttttttagcaccactctctcccgtcgcgggctcatcacaactcacttcgggatctattacccacgggggttttgcccgcccccggcnttctcacgcaccgggggtctgcgcacaaacattccaccccaaggggggttttttctccccaaagtcctttttctttcgcggaagtgccccccttaattctcgtgccggtaggggaccccccccccccgccgcgccctttttttatgtggtgaacctttgttcttttaagggcctttttggggaaaccaaggaaaaccccgcagatgtgtaagggccacccgcggcgtaattgttgattgggctccacagaggaagcctgttaattgtggtggcaaccaactatcttgttcctttttggggaaaattataaaccatgtggtgggtttcccactggtttgtccttgtaatggccccaaaggtaaagtgctttctttggagggacctccccgtatccccgaatggtatgtacccccctgggctaattatcctcgcagtaatatagagcaaaatatagtgcggagataacccccgtgggtgaataatatactgtatgcctggcctgggccccctttgagggaaacatcgtgtgtgaaccagaaaaggcaccccaatgatttttaggaatataggcgcccagaaatagcctcaaatattccccagatgtgtttcttnggggatatttaaaataagagtggtttcacaaagaaanagactctcccagaaatataggccctctcccagaatatatctctggagagttgtnnggggactcccgatcacgcagatccgcacaaaagattcccacgtatatggagactcgggtatatcccacaccacgagatttctcactacagtatggtccactgtaccacactctaatgagtccccacgaaatgggttccacgagaagagaatgagatgctataanatgctcggagagatttttcacgagaaaaagagaggttgttctgcttctttggttaaaacttgcctcttctcggaagaaggatgtacccatgtgtgaaactcggaaactttcttcactgcctcataataccaccggaccacgaggcaccctgtttaagtgactcttgccacccaaagagttgagaaattataaactgagaaaaagc

SEQ ID NO: 510056 - DNA, 651 bp, Homo sapiens
cggccttagaaaatcggtccaccaggccaaacggatcgctgtgggtccgtgtgtatccaaatttcttagggcttgtgttgaaagggtaatcagcaaccccttctccatgggcgacttagaggagttggttaagacttttttacggccactagcactattctatggatttacagcaaggtcgtgattattaatgtttctgtcaaagatttttttaaatcgggactcggtagaacacatagttcactttccatgttgcaggtttagtcaattccaacggtgagacttgcagtgatatgtgttccaaatcgacacctatgtggacagttgaatgggcactgtctgggtaatgggcctctgacagttgattgatggaaatagcatgacaggatatggtgggaggtctagtgggagagttggtgaatgtagaaggactcacctctgagctcctgttaaaccacaggtgttgcagctttcttcacacgcaaggatctgcgttatgccgcctctctcagtcatagattgaatgggaggtaactgttttgggacctgagataatctaccagacaaagtccgatacggagtacatggtttcccctgtcaagcacaatagtgtggtctgactgtatttattgtttaataaaatgaggttct

SEQ ID NO: 510057 - DNA, 239 bp, Homo sapiens
  misc_feature (130)..(130): n is a, c, g, or t
tttgcagtcctcatggaagatcttgacaagtgtcgcacagaacagctccctcgtccgccacctcaatcatcaagttctcatacaagagtcaactgagctatgttctgagattcagtattctcttttcgtncctgtaatatattcttggaggatcaggtagagatccttcctccatcagccgtcggtaggggccacccgccaacagcgcacagtgagtaggatcacagcctcagtgcagc

SEQ ID NO: 510058 - DNA, 157 bp, Homo sapiens
gggactgctcttgacatatcatacgaactgttgttatcgcacctcttcaccttattcaagcccatatctccagcggtgcatgataggggcaggataagtgggaaagcgggctaccacttttccctatcttttccagaagcctgttaagagcaacggt

SEQ ID NO: 510059 - DNA, 142 bp, Homo sapiens
cccaaatgtgtgtgaatatatatatatcatatgagagtgtataatcatgtatatataataatttctatatattttatataacattacatatatatatctatatataaataagatactttctgtcgccatgggtagtcacaga

SEQ ID NO: 510060 - DNA, 211 bp, Homo sapiens
gattcgactcgagttcggtaccatgctcatccctccttaggtaggcaacagctcaagattcaggcaatatacaaagaactcctacaagtattctacacaagaccatcctcaagacacataaacatcaggttttccaaggtcaaaatgagggaaagaatgttaaaggcagccagagagaaaggggcaggccatctacaaagggaaccccgtg

SEQ ID NO: 510061 - DNA, 531 bp, Homo sapiens
  misc_feature (333)..(333): n is a, c, g, or t
  misc_feature (388)..(388): n is a, c, g, or t
ttcgaatcagacggtgcacaagcttactcatcgtgtgtggagctgtagcatgggggagatcccgtgagccggtgtgcaggtgtccgccagtcctccctcaagcgctcactcatgcgctatttccttctgactcaagctgtcagtgacaggaaatctagccgttgttcaacaacaggtcctggatcaggtgttggggaggaatgttgcaacgtcgatgattggggactcgtacgacccgtaggttcatcctgtgcctcgacagggcccatccaacaaccagaatgggaagtttttaacatgcaaccatgcggttgttaactgcgattggactcnacgacacttcgtacctaattaccactgtaatctcccttggtgttgcatgttcagncccccagcaaggctttggccaaagaatttatgggggaattttaaggccctcccccgggaacaatgttgaatttggcttcagcaaggattttcccaaattttgtttttgtcccaaaaggggccctgtttcgccggggtaattgg

SEQ ID NO: 510062 - DNA, 278 bp, Homo sapiens
tcagccggtaccgaaactgactagaggcaggagaatcgctgaactgggaggcggaggttgcagtgagccgagatcgcgccactgcacttctgcctggcaacagagcgagactgcgtctcaaaaaaaaaaaaaaaaaaaaaatttcaccccaatacctcaaacaatgggtaaatttctaaatgattaccttcgtttaaaaaatgccacatgattgaaatatgaggtatttgtcttcctgtgtcttattttggctaacattgatatcctcaggtttactc

SEQ ID NO: 510063 - DNA, 644 bp, Homo sapiens
gcgagggagcggcgtcctcccccagcacctccgggacgcgccagtactctgcggtcgcgggtggacgtcgccctgccgctcgcctgcccggcctgcccatcacccggcctgccgcgctccagccagccggcgcgggtttgcaacgctccaagtcggattgagcgagcgcttctagggcagctgtgatctcgagcgctttaactctgggctggacccggaggaggcgagagggttgggtgtggcccacctggcacgggccagctcggatatcgtgtccctggcaggccagtgctgggccgtgcagctctgaagggggctgtcccgccgcagctcggtgactgttgaggagcgggcccgggagcgcgttccctatggcgtgtcggtggtggagcgcaatgcccgctgtgatcaagtggttgtatgggctagggcaggctcgagagaagcccagcagctgaaggactaggcggccactgggcctggaatccgcgcaaaggacggatcttacagacgcaagtggtccctggacttctcttgcatccattctctagacaggccgtgtcagagagtaccacccatgtgtaaacttggtattggaggcaaaggcttaagaggctggaccagacttctttggggcaaggaag

SEQ ID NO: 510064 - DNA, 310 bp, Homo sapiens
tccaactgcagtacagaactatatagatgagtatcacgcttaggtttcccacgcccacccccatctgttaagtctaacagcctgtagtcgataccagaagagacacagtttgtacatcacaaaagacaagcaagtccccaaactaattatagcagccactttagagggagagcaaatgacaggagacattctgggcaatgaattaccctaagtctcagcatcaagcctagactcatctcctgggtccccaaataactcatcactggtaagaaggatggatgggcccttccaaatcacagcctgggctgtc

SEQ ID NO: 510065 - DNA, 123 bp, Homo sapiens
gctcctgcccccactcccaacgtgctcccccccccgagcccctgcctctgccggccctgcctgggacgtcccccccgacctttcgacgtctgcgtccttccgcccgagaggcgccctgttggg

SEQ ID NO: 510066 - DNA, 334 bp, Homo sapiens
  misc_feature (36)..(36): n is a, c, g, or t
  misc_feature (86)..(86): n is a, c, g, or t
  misc_feature (134)..(134): n is a, c, g, or t
  misc_feature (147)..(147): n is a, c, g, or t
  misc_feature (189)..(189): n is a, c, g, or t
  misc_feature (204)..(204): n is a, c, g, or t
  misc_feature (223)..(223): n is a, c, g, or t
  misc_feature (292)..(292): n is a, c, g, or t
acaacctgaaccccacatggaagcgtttctcactcnccgttcagcatttctctggtgggaaccccagcacccccatccaggtgaantgccccgattatgacagtgacgcgtcacatgatctcatcggcaccttncacaccagcttgncccagctgcaggcagtcccggctgagtttgaatgcatccacnctgagaagcagcagnaaaagaaaagctacaaganctctggaactatccgtgtcaagatttgtcgggtagaaacagagtactcctttctggactatgttgatgnggaggctgttcagattaacttcactgtgggcgtggactttca

SEQ ID NO: 510067 - DNA, 512 bp, Homo sapiens
gtgcacctttgtctgacatctggctaccctcaagggcagaagtgccttctctcctgcacaccctgaccctttccatgggatcacccaccagcgcacagatctgccatttctttattttgaaacagaatctcgctctgtcacccaggctggagtgcagtggcatgatctaggctcactgcaacctccgtctcccaggctcaagcgatcctcctaccttagcctcctgagtagctgggactacagatgcctgccaccatgcctgactaactttttgtatttttagtagagacggggtttcactatgttggccaggctggtctcgaactcctgaccttttgatccgcccgcctcggactcccaaagtgctgggattacaggtatgagccactgcgcctggccgatttttttttttaattagcaatatgtgatggtcatctttcaatagagacctgatactgcatttggtgtgatgcttttctaagactcaccccaggtggaagtctttccctttc

SEQ ID NO: 510068 - DNA, 980 bp, Homo sapiens
gggaagccctcaagctcatggttctggaaaccccgttataagtgtgtcaacctgtctgacagcatccagtcacctcaatgaactgtgtactcgctgagtgtggaccctaacacctggcagactctgctccatgagaggcacctgcgtgcatgcctagaacacaaagtcctgcagcacgctgcgcagccgcggggacaacgtgtacgtggtgactgaggtgctgcagacaccagaaggaggtggaagtcacgcgcacccacaagcgggagggctcgtggccggttttccctgcccggagccactgtgcttgcgagggtgatgggccagggccatctgagcccagaagaacgacggatcacgcatcccctcaaggcagaaccactcgtcatttccagggtggcccaggctggttattgactctgacttgagacgtccttctcttcccggataagaagcacgaggaccttccagacagcacgcgacaaggacacgaagcgttccacgagcgaaaggcgcctggccacagttgaccctctggcctctccactgatgaggtgctccacaacttcctgaccagattggggtccctgacggagggggcggttacactgaaagactttccagggcctacgggcagaggtggagaccatctccaaggaacctggagctaattggcacaagagaagctgtgccagctgcatgctggcgggccctggacgctggttgcttgcgggacccagatggccctggagccttggatgaggcgctggacgcaggcccagagcctttgggcggtggaggccctggacgctccagcacgcgtgatggcacatgaatgccctggtggtacgacctcccggacatgctggtgccggcacatcgcttataaacggcggctacatggtgggagacactaccatgctgacgtaaacgcagaacaagtgctacaggaagcactggactgcgacccgtggggccac

SEQ ID NO: 510069 - DNA, 396 bp, Homo sapiens
atgacgagttcacgaacaacgcagcacagccccatcaggttcccatggtggccggctcccctctcggggcaacccagacgtgcaacaaagtgcgatgcgtcgtcccccagactacagtaatactcaacaatgatcggcagaacgccattgtagccaagatggaagaccccttgagcaacagggcaccggatttccctggaaaatgtcattagcaacgctgtgcctgggcgtcggcagaacaccattgtggtgaaggtgccgggccaagaagacagccaccacgaggacggggagagcggctcggaggccagcgactctgtgtcccgctgtgggctggcgggccgtcagagcatcgggagcacgtcacgctcatcacccggaactcggtcagaggtg

SEQ ID NO: 510070 - DNA, 390 bp, Homo sapiens
cgctatattgctcatcccttctgcgtggatgtatgcgggacgtggacattactgtcccaactgcagagttctcctgggcacctacaagcgtatgtaggactcagccagacgtggagggagccgggtgccgcaggaagtacttttcacctctcatccagcttcacgcctggtggaggttctgccctggtggtctcacctctccagggggcccaccttcatgtcttcttttggggggaatatgtcgcaaaactaacaaatctccaaaccctagaaattgctgcttggagtcgtgcctaggacttgcaaagacattccccttgagtgtcagtaccacggtttcctgcctccctgagaccctgagtcctgccatctaactgtgatcatttgccc

SEQ ID NO: 510071 - DNA, 328 bp, Homo sapiens
ggcgaagcagatgtatttgttggagatgaacatctggccagggatgtgcaccttgttgaacggcgtccacagggtgcagcttgggtggccgtttaaccgctcatccatgggcagctttaacgaggctcggaagcactcattcttggctcgggcgtccaggactcgcttcagggctgaaatgttcctgtgtggccggatgggcctaagaagggcctagccctccaccaatccctcactgtccagcagctgccgcatggccaggtcgggcaactgctccttgaccttaacagtctgtccggcatttagaaaaccccccccggccatattt

SEQ ID NO: 510072 - DNA, 289 bp, Homo sapiens
gagagagagagagagagagagagagagagagagagagagagagacagagagagccacagagacacatttatactctctcacccttattctctcattcttactttttttcctcctccccttgccttccctctcttcctttttcctctcttctccctccttctcttctccccctctttcctctcctctctctttccttccttccccccttctctccttctttttcccctctctttcttctcctctctcttcctcccttctctccctctccccctctcccttcctttcttct

SEQ ID NO: 510073 - DNA, 465 bp, Homo sapiens
  misc_feature (364)..(364): n is a, c, g, or t
  misc_feature (386)..(386): n is a, c, g, or t
ctctatgaccctcctgcgcttttcctggaacccaaagctctgacttcgtcaaacttacacaattaaaggcaggcggaagaacgcgggctgggaagcaagcgggaagattctagaatggaagggagcccgccgagcgccgcgagccgcgcccaggcacgggtccgatggagcaggcggggaattccatcccccaggcgggacccccgcacaccatgccctgccgggaggctcgcggcactgcggagcagcccggggctggccagctcaccagcccgcattcaccccaagcgaatcgacatcggggaagggctccaggaggcacatcatggtgcatgacgggttcacaaccagacaggtaccacanttgcaagggacaaaaataaganaatttaggaaacgaaaaaagacggtactgggtgcgagggggcgcggggcgcggcagacagacggggcacggggtgcaca

SEQ ID NO: 510074 - DNA, 964 bp, Homo sapiens
  misc_feature (45)..(45): n is a, c, g, or t
  misc_feature (50)..(50): n is a, c, g, or t
  misc_feature (52)..(53): n is a, c, g, or t
  misc_feature (56)..(56): n is a, c, g, or t
  misc_feature (468)..(469): n is a, c, g, or t
  misc_feature (684)..(684): n is a, c, g, or t
  misc_feature (763)..(764): n is a, c, g, or t
  misc_feature (786)..(786): n is a, c, g, or t
  misc_feature (852)..(852): n is a, c, g, or t
  misc_feature (860)..(860): n is a, c, g, or t
acacctcacaggctggacttctgtggcttcctcctgagccaagtnctctncnntcntgtctcagcggctgccaacagatcatgagccatcagctcctctggggccagctataggacaacagaactctcaccaaaggaccagacacagtgggcaccatgggacagtgtcggtcagccaacgcagaggatgctcaggaattcagtgatgtggagagggccattgagaccctcatcaagaactttcaccagtactccgtggagggtgggaaggagacgctgaccccttctgagctacgggacctggtcacccagcagctgccccatctcatgccgagcaactgtggcctggaagagaaaattgccaacctgggcagctgcaatgactctaaactggagttcaggagtttctgggagctgattggagaagcggccaagagtgtgaagctggagaggcctgtccgggagcgtnntttttttttttttttttttttttttttttttttttttttttttttttttttttttttttttttttttttttttttttttttttttttttttttttttttttttttttttttttttttttttttttttttttttttttttttttttttttttttttttttttttttttttttttttttttttttttttttttttttttttctctcttttttttttnttttttttttttttatttttttttttttttttttttttttttttttttttttttttttttttttttttttttttttttnntttttttttttttttttttttntttttttttttttttttttttttttttttttttttttttttttttttttttttttttttttttttntttttttnttttttatttttttttttttttttttttttttttttttttttttttttttttttttttttttatttttttttttttttttttttttatatttctcttcccctcc

SEQ ID NO: 510075 - DNA, 367 bp, Homo sapiens
  misc_feature (340)..(340): n is a, c, g, or t
  misc_feature (354)..(354): n is a, c, g, or t
ttaacttttgtatatggtgagaagtaggagtccagtttcattcttctgcatatagatatccagttatcccagcactatttattgaataggaagtccttttcctattgcctcttttgtcaagtggatatccagttatcccagtgctatttattgaatatggagttctcttctcattgcttatttttgtcaactttgtagaagatcagttcattgtaggcgtgctaccttatttctgggttctccagtctgttcccacgctctatgtgtctgttttcgtaccagtaccctcctgttttgattactgtagtcttgtagtacagtttgaatttaggtaatgtgngtacctcggctctngtccttttgctta

SEQ ID NO: 510076 - DNA, 723 bp, Homo sapiens
aaaggaaagaccgacagtgcctggatcaggccacgccgaggacaaggaggcggagaacgtagacaagaaacccagtgggtgccctcggttctgagtcgtataagtcatctggaggaagcgctgatcagacggggccaggagacagcacagggtacataggaagtgctctggactaccctggatctccgatgtcaaagcgcaattctgtcgtcatcataagcacgaagggttgtgtcaacggtccagatgtgctgtgagcacacgacggcgctccagggaagatgctctctctgcagctgccgggatggataacaccgatagagtcgcatgagatcattcacacgggtccaataaccagtgcatggctacagatagcgtggaccatgagattgggccggtgcaacaagacagcgtggttcaagttatgatgctgatgcgccgctccaacaagggcccgctcctcgatgctgtgtgaagaccaccgggggcgcatggtgaagcaccagtgctgtcctggctgtggctacttctgcacagcgggtaattttatgcgagtgtctcgcccgagagcagcatctctcaccgtttgcacgaagactgtgcctctcgagtcaataacgccagcgtattagtgcccactgtgggggaagagagagctccaaggggcaaagaggtgacgatagctaaagcacgacacgactcgaccgtgatgaccagttccgg

SEQ ID NO: 510077 - DNA, 376 bp, Homo sapiens
tgttatccacaaatacacattcttattttctgtagaaaccgatggattgagtagaaagtctacattgagcagatgccataaatagccatgactgaagagatagactacaccttatctgaattcacaatcaattcaaaaactgactgaggaagaatgcacgggtctcttatgtgcggtcggggctgccgtcccaacaatgtcctgtgttcggaagcgacacacagatgcaattcacggattccacaaactagttgtaactgaccgtggtgaccactatgtcctcgtgactttattattgctacccctcctggctaggtgacagagatgggagccgagtgggtgttttcaaagattcgctttggagctgagtggagaa

SEQ ID NO: 510078 - DNA, 178 bp, Homo sapiens
atgtcagagctgacccacagcagcactctgcctgtcttatcttatacttcccagtattagggagaaaaagttacagtatggaaagtaatcttattgtgcttttaaactatattgctctcgttatttataagagcacacatatttttctatccattatttgtctagacccatactctta

SEQ ID NO: 510079 - DNA, 387 bp, Homo sapiens
tatgaacacaaaggatctatcatcagaaaccgggcaggctagaacaaagtgaccaataatcatcaagtaccgaacgaaaagaactgtgaacccagaatcctatacccattttctgtcatttgacaatgtcattatccctttcattatgaatgaaaacaattttttttggctaaaaatctgatgctagcagtatggctaaaggaagttctctaaacagaaagggaatgattataacaaaaataagaaatctaaaaatgtgcgtaaatacgatagacttcccttctctttcaaagagttttctgaaatatgtttggtggttgacagaaaagttgtaacactgtctaacgtgattctaaatatatgtagaagaaatatttaagaatgata

SEQ ID NO: 510080 - DNA, 678 bp, Homo sapiens
  misc_feature (678)..(678): n is a, c, g, or t
gtgttcgctgccctgggctaccgcatcggcagcaaaagtaacacgtggtggatatactgaaccgacatgcccagccataatggacataaagaaatcatcggtctgaacgatcctggccttcccctgaaaagcaccatgggcagtcgatctatctcctgacatgcgtgtcttatgcgctgcttcgtcctgagggcactgatcacggatctttacatccacgcacctaacgaatggaccttccttcgaattcgttacaagaaagatgactttatggatgcgccaaattaagactcttcattgagtgtgatttagaatccatccgaatatgtcactctgttggctacctgcgtcattccttaatgtagtgcccgcaaagaatgtgaatgctaatcatgtctgtggactatcacatggcaggcgtttggaacccactcacaccagtacagtgaccttgtgtgggctggcggctgtactccctcaccaacggaaccgctgtgtgctccaaccttatccagagctgccgagcgctctatgctcactatcaggtgttggatcatgagcttgcacgaagccctgcacgagctatgttctgacctcagttaactatgatcgccttggagaagctgttttctttaactgcataaccaaaatgctgaaaaaataaataaaaataactcn

SEQ ID NO: 510081 - DNA, 1182 bp, Homo sapiens
ggcggattcccgagtttgagaaacagctctttgccccgtcatgccacaacgtaggaacagtgaccttcccaacggcgtgtggatgatgagcgacgtgatagaggatcgaaatccattcgtcccctaagaagaagctggtggaccctgtggcgtaggtgtcagcgcggtcctgggagcctgctcttcaataggctacaacactcttctggatcagcgatggaggacgcgaggatcgatgattgatggaggtggtcctagcaaaatattgagcgatctttgtgcctcacgaaggacttgtacgaaagagtccaggacgagccacgacaggactcacgccaagcgaaggtgggggtcgttcagtgcatcgaggacccattctaaccgtggcacggaagcgatcactggatgcgcaaggcccactgtgagcattcgccgagatggcgaaatctacgctatccatgagacgccgggagatgacctcagagaggttccagaagaaaaggtcttgagcttagggagcaagggcaattcggacgtggagcggtggaaaggaagtcccgggcgcagtccgggccagccatgggaccagggcggcccagggtcccatcacgaaagcttcggaaggcgcagggacgggaaccaggcagttgggggaccacgaaccgtcggaatttgagggttggccccataaggccccctacgtaggggcagtgcgaacggtctcacggcaggcatcgcctattttggccataagaaagaagaaccagaagcgcactgaggggacaaccctttgggagcgaccagattccatggtaaggggtgcgccccgggagcagaacgtgaaagcgacaaacgcagcgcgggaaggccaaagctgggcagccactggtgcgagcagaagtcccccgaacaattatgcgcccgcgttaccgagcctcggcccttggggacaccccggaaaggcccacgcccgcagcgatattggcgccccgaaaaggccaagaaagctgggctggcgacccccaggatggacgcaaacacgcgcgattgaggaggggcacggaaaccccaggggcgaaccaccagaagcgggcaaacacgagcatgggagctacattgccggccatggaaagcgcgatacaggggcagaaaggctccaaggaagccacctaagggaaacac

SEQ ID NO: 510082 - DNA, 493 bp, Homo sapiens
agcacatcctcctgtaaactttaaatcatctctaggttactcagaatagctattataataccacacatcacctcatttgtgtggattcaatgaaatacttggtggggggccaattcaagtttagctttttggaactttgtggaatttttgcaccctgaatattttcaacctgtggttggttgaatccatggatgcagagggctgactgtactaacactgctgaaagactgaaccagtacaacaccatttgaagaaaaaagagcaatagattttaagaccagatttctttgtgctatttttagtcagtcctccctccctctgacaggactaaaaccaggccgctgtactgaatgactaattcaccaaattattgagactgtttgggtacttttagttggttttgttctgactttgccagggttgttgtttctcagatttgcaatttctgcaacattttatatattaaacgaatgggttttctcttaaaaaaaaa

SEQ ID NO: 510083 - DNA, 724 bp, Homo sapiens
agcacatcctcctgtaaactttaaatcatctctaggttactcagaatagctattataataccacacatcacctcatttgtgtggattcaatgaaatacttggtggggggccaattcaagtttagctttttggaactttgtggaatttttgcaccctgaatattttcaacctgtggttggttgaatccatggatgcagagggctgactgtactaacactgctgaaagactgaaccagtacaacaccatttgaagaaaaaagagcaatagattttaagaccagatttctttgtgctatttttagtcagtcctccctccctctgacaggactaaaaccaggccgctgtactgaatgactaattcaccaaattattgagactgtttgggtacttttagttggttttgttctgactttgccaggcctcgctcgtctcctcacacttcgccacttcctgcacacacttctccactactattaacacgcacactgccgctcctctcttaccaaactaccaccctacctccctcaccaaagcccataaaacatccaaaccacttcataacaaaccctgagaaccaacaatgcaacgaacatctgttcgcttcattcattgccccccacaatcctaggcctacccgccgcacctactgatcattctatttcccccctctattcgatcccctactccacctatctcatcaccaaccgactaatcacacccaaca

SEQ ID NO: 510084 - DNA, 838 bp, Homo sapiens
  misc_feature (354)..(354): n is a, c, g, or t
gctgttcatctacttcaggaatcatgaaaaggatcgaactctggactttcatgcctcgaggtaataccttgaaatcctctgttagaaacagataccgtctgcctagatgagaggtgaagccagctggacttctgggtcgggtagggaccttgcagacacttctttcttgtcttacggagacgtgtttccgtaatattcagccaagtcagtgctctgtagaaataaacgaacaccgagattggctacttctgtgtgcttagaagtagtagtgttcgtaaagatggacgtaatcagcacatcatgtagagatggagcgagtcctacacttctgtagataatggaccatgtcgaatnggctctttgggtattattggaaccaatctagacaaggtaacatagggccgggggatcatatagttaaagggtgcagatatccatacctccttgggcacaacctctctaagactcatgccaaggcaagtcatactcacgactacagtgtttggggctcttttccaccatggcctgggttggggaaagacctttttggtatcctttttttgactcctgttacaactaaattaaacatgctgtggtctaggtattgacttacccacttctcttccgcggagattcgctaagtggacccataccttattttaggaggagacttgttagaccactttcgaagctagtaggataggcattctcggcgggcatttccatttccctggggacaggttccaagttggaaaggggccaacggaaaacaccccaatgcgaggaataggggaaacgaaaacttcctggggtagcgactacttcaggaattttggac

SEQ ID NO: 510085 - DNA, 188 bp, Homo sapiens
atcgttatgacatttagtggatacatttcctctaaacacaacaggtcacagcaaatacgagcttcatttggcttcgagttccccaggcgcctgtagacacacacagaatcgtggctctctgtctctctcacttagtggagctcgacgtcctgtgtggtggagaacagtgagtaaacaacgggtaccga

SEQ ID NO: 510086 - DNA, 863 bp, Homo sapiens
  misc_feature (764)..(764): n is a, c, g, or t
  misc_feature (835)..(835): n is a, c, g, or t
  misc_feature (846)..(846): n is a, c, g, or t
gcccctcaatactcccaggtgattgacagtgcggagaccaatgggaggcactcttggccgacctacccagcggcgccggggcgtctgtgattgggaaggtgaggaaagcgctgcaggaagagttctctgcaggatgctgggtgagatcaaagggagagcttctgccaccacctcctacttggtgtgtgcgggggccggcacaaagaccatctctgcctctgccttcccctgctcctagccagggtcagctcttctctctgacgcggaatacagagctggacaacctctgcctcggccctctccatccgtaaataaagactagaaccacccccactctgcactctccccctctatggatcaggaatatttgttttttctgctcctctcaatatggactgggcccgctcctgattcctcccacccttacctctcaacacccagtacctcctcttcttttgcatctcatcctcaagggacactactgaaaacctgtgtggaatcaaagctcaccggagacagctgtggccattgtgcctataacgccaacaccaggcatatcctggagcctcagctggagaatttacctgtcttggacaacctgccacaaaactgtgcccacatctagttccatctggtcatcagggcgtctctctttcttacacccataacacacaatccccacttccgcgccagtgttcatgagaagtgaaaaggaagagggaagagagggcttgttgggaggacagaggggatggggcagagtngggattcctagcaggttctggctggttgacaagctctttcccccagccccctttgccatacccagtttttnggaacagtttncttattacagggagggg

SEQ ID NO: 510087 - DNA, 139 bp, Homo sapiens
ggagctatcccgggtctgggtatgacagcagagttgcagaacagcaaatattgctgcctgttccttcctctggaagcttcgtcccagaggggcacccaccagatgcctgtatgaggtgtctgccagtcaggaggcatga

SEQ ID NO: 510088 - DNA, 104 bp, Homo sapiens
atagtcacgctcggtcctacgtttacacgtgctatatgacttactgatgaataagcgattaaggattttaggtcggtttgacgtaagcagatagagctggttat

SEQ ID NO: 510089 - DNA, 511 bp, Homo sapiens
gcccctcaatactcccaggtgattgacagtgcggagaccaatgggaggcactcttggccgacctacccagcggcgccggggcgtctgtgattgggaaggtgaggaaagcgctgcaggaagagttctctgcaggatgctgggtgagatcaaagggagagcttctgccaccacctcctacttggtgtgtgcgggggccggcacaaagaccatctctgcctctgccttcccctgctcctagccagggtcagctcttctctctgacgcggaatacagagctggacaacctctgcctcggccctctccatccgtaaataaagactagaaccacccccactctgcactctccccctctatggatcaggaatatttgttttttctgctcctctcaatatggactgggcccgctcctgattcctcccacccttacctctcaacacccagtacctcctcttcttttgcatctcatcctcaagggacactactgaacgcccaccaggcatatcctgggcct

SEQ ID NO: 510090 - DNA, 198 bp, Homo sapiens
cgtaagctggagcacaatttcaagccagtgtttcttagctgctggaaccagcaagctaagagtgggagtgggacctgctgagtgagaccacttggctccttggcttcagccccctttccgggggtgtgaacgattctgtctcgctggggtttcaggcgctcctggggtacgaaaaataaacccctgcagcttgctcag

SEQ ID NO: 510091 - DNA, 314 bp, Homo sapiens
caggggtgggggtggaggcggctctgcgatcgaaggggacttgagactcaccggccgcacgcatgagggccctgtggtgcctgggctctgctgcgtcctgctgaccttcggtcggtacagagctgacgatgaagttgatgtagatggtacagtagaagaggatctgggataaagtagagaaggatcaaggacggatgatgaagtagtacagagagaggaagacgctattcagttggatggattaaatccatcacaataagagaccttagagagaagtcggaaaagtttcccttccaagccgaagataacagatt

SEQ ID NO: 510092 - DNA, 333 bp, Homo sapiens
gacaaatgtagcaagcagcaagcaaacacagattgggcaattatagactaggagagagaatttcaagcatagacatataactcgcaacgtactacctttttcccttacgtggaaataatatgaaaaacacttattagatatactggacaacaagagcactaagtactccaactctactgcagcattacaaaacaaaacatgccttcaccacagtgtaagatttaagggcacactgcccaaggatgcatgttatatcaaacacagcaagattgctgctgccctgacaagtacttccaatccctacccaggtcctactgaaatacgggtggtccc

SEQ ID NO: 510093 - DNA, 917 bp, Homo sapiens
  misc_feature (818)..(818): n is a, c, g, or t
  misc_feature (889)..(889): n is a, c, g, or t
  misc_feature (900)..(900): n is a, c, g, or t
gcccctcaatactcccaggtgattgacagtgcggagaccaatgggaggcactcttggccgacctacccagcggcgccggggcgtctgtgattgggaaggtgaggaaagcgctgcaggaagagttctctgcaggatgctgggtgagatcaaagggagagcttctgccaccacctcctacttggtgtgtgcgggggccggcacaaagaccatctctgcctctgccttcccctgctcctagccagggtcagctcttctctctgacgcggaatacagagctgaccctggctaggagcaggggtcagctcttctctctgacgcggaatacagagctggacaacctctgcctcggccctctccatccgtaaataaagactagaaccacccccactctgcactctccccctctatggatcaggaatatttgttttttctgctcctctcaatatggactgggcccgctcctgattcctcccacccttacctctcaacacccagtacctcctcttcttttgcatctcatcctcaagggacactactgaaaacctgtgtggaatcaaagctcaccggagacagctgtggccattgtgcctataacgccaacaccaggcatatcctggagcctcagctggagaatttacctgtcttggacaacctgccacaaaactgtgcccacatctagttccatctggtcatcagggcgtctctctttcttacacccataacacacaatccccacttccgcgccagtgttcatgagaagtgaaaaggaagagggaagagagggcttgttgggaggacagaggggatggggcagagtngggattcctagcaggttctggctggttgacaagctctttcccccagccccctttgccatacccagtttttnggaacagtttncttattacagggagggg

SEQ ID NO: 510094 - DNA, 783 bp, Homo sapiens
gtggatcgccgctgccggagcagcccgatagggagctgcggatcgcgaggccagtaccgaccgcgcccgtctcgcgcgtcaccggtcctcctcgtccgtcatggtcccgggactacttagcacctcttcggctgctcatcatcggcgacagtggtgtgggtcatgagtccgtttactgttgcgtattgcagacaagcactttctcatgcatgactacatcaccacgactcggatgctggatttcaatgcatccaggaccgtggacgatcaacggggagaaggtgaagctgcagatctgggacacagcggggcaggagcgcttccgcaccatcacctccacgtattatcgggggacccacggggtcattgtggtttacgacgtcaccagtgccgatgtcctttgtcaacgtcaagcggtggcttcacgaaatcaaccagaactgtgatgatgtgtgccgaagtattagtgggctacataagaagtgacgaccctgagcggaacggtggtggagacggaagatgcctacaaattcgccgggcagatgggcatccagcttgttcgagaccagcgccaaggagaatgtcaaccgtggaagagatgttcaactgcatcacggagcttggtcctccgagccaaagacagacaacctgtgcataaccatgcatgcatgggacaatcagaacggatgtggtgaagctcacgaaggaacaggtaaacgaaaagaagagctgctgctaatgggaacccattccactgcagagactgcactgaggttccctccg

SEQ ID NO: 510095 - DNA, 403 bp, Homo sapiens
tgcaagctctcactcgtggaatttaaaaagctgatcttatagaaatacaaaatagaacagtagttaccagagactggggaggggagggaggagggtatcatggagagagattggtcagtgggtacaaagttacaattaggtaggtgggataagttctggtgtcctattggcacagtaggatgactgtagttgtatatttcaaaatagctagaagagaggattttgaatgtttttactacaaagaaaagataaatgtttgagatgatgggaatgctaattaccctgatttgatcattgcacaatgtatacatgtattgaaatatcacattgtaccccataaatatgtacaattgtgtgtcaaatttttttaaataaaataaatatttttagacctatctaaaaa

SEQ ID NO: 510096 - DNA, 347 bp, Homo sapiens
gacaagtttcaaggaccaactttgatgagatggacacactccccgggagattgtgcacacagctcatcgatgagtacccactgcggccaccccggccacgagctacattctcctggggacccccgagcacgtgagtcccccacggaaccgggagccctcattctgccttactggttggccccagccctgcctgactgaccacccccctcacgagcaccagatcagggacctcacgcatctctttttcaataataacactggagactctctgttggcctgccaaacaccacttaacttctcctcttatgagactatttatctttaataaacccctggatataaatcca

SEQ ID NO: 510097 - DNA, 117 bp, Homo sapiens
gcaggctagtaaatcccgcgatttttagtctttgacattgcaaattaaaccatccacccgggcacagagtaaattagctctctgcatctagttctagcccctcctgcgaacctatga

SEQ ID NO: 510098 - DNA, 761 bp, Homo sapiens
gggagctccagccagggaccgacggattcgcctgacacgtcactggatactcaaacccaagcacgatcccgaaagcggtattttctgcgtctggagaggttattgcatcctcagttcccaccgcatggggactggcgggacgaacaactcgacagacctgatcgcagaccagagagctgatacattatacagataccgggattcagaattgatccagtccgacagacggagggggacaacatcccagacataccgagctgactgagtgatctcatggctggaacacatagtatttcaaaatctactgcagaggctgcaaattaacatcttcattctgtatctggctccatacaggctttgtcaggatcgcgagtgacgtgcgaccgacgtatgggctctctgcacttgcttcacatgcttggcaataggaatcatggtaatccaggaggtcctaaacattaagtaacagtaaacgaactcttacctgtctctgactacctaacaccaacgtaaccctagtaaccaaggaaacggagaccagagagcttgggcaagaaccagccgacgcacccgggacgatgaaacgaagcaacacagacccacacgcaactcttacacaccacggaccaacaacacgacaccccaggaactgcaaacacccaacacatacataacacccacaacctcacaccgcacgaacctacccaacctccaccacactcaccacagctaccacaaacgaccaacatgacaccagaaac

SEQ ID NO: 510099 - DNA, 90 bp, Homo sapiens
  misc_feature (89)..(90): n is a, c, g, or t
gcggccgcctactactactactgctcgaattcaagcttctaacgatgtacggggacatggagggagtttcataattcgctaactacttnn

SEQ ID NO: 510100 - DNA, 109 bp, Homo sapiens
gtgtggtcatccgggtattgtacaaagtgcataggatcgattcacgccggtcacgcaggagcggttttaccattaaagttgagataggttggatcgtttcggcccaaga

SEQ ID NO: 510101 - DNA, 722 bp, Homo sapiens
taacttagagcttttttttttttaatttggtctgccccaagtttggtgaaatttttcatattttaatttcaagcttatttgggagagataggaaggtcatttccatgtatgcataataatcctgcaaagtacaggtacttggtctaagaaacatgggaagcaggttaaatgtttggtaaactttgaaatatatggtctaatgtttaagcagaatgggaaaagactaagatcggttaacaaataataacttttttttcttttttctttggttttggaagtgtgggggttgggtttggtttggagtctttttttttaaagtgaaatttatggaggaaaaatttgtgaagggaccttcactctaagatgttatatttttcttaaaaagtaactcctagtaggggtaccactgattctgtacagagccgtaaaaactgaagttctgcctctgatgtatttggggagttggttcttggaatttccattttacagttacttttcctgtgcttacaaacaagctttataaaagggccaacaaatggcacttgatttcccaatttttaacaaggtcttttaacaaggtttggccaaactttactgtggattcctagtgatttatcctgggaatgtttacgtattggaaaaccgaaatgggtaccttgcacacattcatctgtaagctgttggtttaaaatctgtggattattacccaggttaatgacctt

SEQ ID NO: 510102 - DNA, 184 bp, Homo sapiens
catctagaggatcccgtcagtgcattgtgtgggatgagagcagattgttcctgccttccctttgtgattgaagaaacctgacttcgtttctgcaaggcactgcatgtgtctgtgttcgtgtaagcataatgtgaggaggtggggagagcaccccaaccccatgttcacaatggcacgtggatcg

SEQ ID NO: 510103 - DNA, 1467 bp, Homo sapiens
tgtcgtgaaaactacccctaaaagccacaatggagaaaggaaaagactcatatcaacattgtcgtcattggaccacgtcagcattcgggccacagtccaccactactggccatctgcatctcatcaaatgcggtggccatcgcacaaacagcaacctattgacacaacattcgcagaaggcaggctgctgcagcatgggcaacaggcgctcacttcaaagctcatgcactgggatctcgtgcatcaacactgcacacagctagcagccgtgcacacgtggatcatcaccaattgccatccatctaccatctgtggcaacatttgcagcacccagacaagatcactcatgtgcacataatccattgcatgcccccaggcacacaagcaggacgtttcatacaacaacaccatgcaattacccgggcacatctcaagagctgactagttgcatgatacctgcattgtaagcctgcatcggtgtacaggtgcaacacttctgacagcctggatatctccacaggaactggggacagacacacgagacgcctgccctctctggaccttaccacaccatggagtgttgaacacaacaccttaactacgatcggatgtaacacacaaaacatggacttcacacatgcaggcccacaccctacacagcaccaagaaaacgaagaatacattgcacgggaacaaatcggtacacaggcgcaacgctcacagacaacgtgaccagtcgacccgcaacacacgttggcactaccacacccccccgaaggcaccagcagacgccaataacgggcaccaaataaccgcgcgatcgcgcacatcgcgtcgaacaaacactgactggaaagcaccaacgaagactaaccatagacctagggatcacacgggcattgcgacacggtcacaccagtcacgggatgagacaacgccaagacgggaacaaccacagcgggataatgaaacaaacaccaggaacctggcaaatcaccacacaaccacaacagagaacacacgagacaaaccccacagaccatgagccacctaactcacaggacgatgtcataaccaacaaactggaagggaacacaggcgcacaggagatacgcaggccaatcaccagactgtaacacccgcatgctccccgacaccgcgcaagacgaagaacacaccattgaccacccaacaacacaaccaacgaaaaaaacacacacggcaacacctgagacaacgaagacgatgcgaaacagcacactcgcggacaaacgtcgccacaaggaacaacaagcgaacgaaaccaagccaacacgcaacgccacctgccaacaaacaccacacgaaacgagacaagaagagaaaacaaacaagcaaaagatcagacatacacgaaccaacagaacagacacaacaacacagcagaacgagaactactcataggtgggccgatccacgaacgccacg

SEQ ID NO: 510104 - DNA, 1670 bp, Homo sapiens
ccttttatattgtattatttggtcatgggaaaagttttatggaaaaaaaaagatgtacaaataggtcctgggagtggaaagcaagaataggggccaggtggccccgctaaccgtccccaattcttagaaaaacaacaacaaaggagaaacaacaaaagaaaaaagaaacacccccaaacagcgcaagaaaacggaggccttctgcgacccagaagctggcacacagaaacgcccccatcgcgtgggaagacaatccatctcaatcaagctcgcggccctacacgggcggcacgaggctacactaccgtgggggagtgcccgaggtaaccacgaaggggggaaagatagaaagcaccacctaacaatatcaaatacggtgtggacagacagggtggcggaatacacgcaccagtgcgggcgacgcgccccgccagtccagagggtgctgtacacaggtgtctcgcagacacacagagagggcagtcgcgctgtgacacgcaccacggcgtcagacctcacacagtgcgggcacgatcacacaagagggtgtgccacacataggcgcctcacaccgtgacgagaataaagcagaacactcagctgccacacaccagcgtgggaacttgtagcgacgcgcggaggccgctctgatgaaactacaagaggaacgacacatacttgaagcaggggcggcccacgcgccagcgacaaaatcgcacacactaaggtgagccacaccggagaggaagcacacagacgaggacaagtggagaggacacgaatcacccggggggacacacacagcaccactaacatgggagcaaacctcagtagggcgagcccccccaacaatggtacgccacaacgtaggaggaggccgcaaaaagtcgaaaagacagctgggcaaaaacgtggaccaggagcacgagagggcgcaacactgcgggagaaaaaccacccagaggaaaaagcagacgtaagagcaaccgcagccaccaccacgacaacgcccaaacaaggcaaagcgaataccagacaatagggcgaaccatcagaacagaccaaaccacaacaggccagacgagaccagcgacacgccgcacgcagggcaaacgcacccgaaggctaggcagaagcaacagcaacgaggagtcccaccagcgaaccagtaacccagagacgggggcacgagaaagcgggctgagacaaagcccccggaacggacgggcgctcggaaccagccggagcacggcaaggtgaggaacaccaccgggggcaaccatcagacagcgccacacgcgaccacgcacggccggagcaccgacgccggcgaacacacaaggaccgtggagagcgcacgaaaacatcaggccgcgcactacggccacgcacagcgacaaagccgcgaagacacaccagccaagcgcgggggatcagccgacgcgcgcgcaccaacaccgaacgcgagagagccacccacgacccaaagacgccacacagcgccgcgcggcgaccgagaaaggagcaggacaacgaggggagggctacccgacaagaaacacacaacacaaaagacacgcgcgagagaagccacaccaaacaggaagaagacaagcacagaacacgagcacacgcgcacgcgagagaggagacgacaccaacgaacatag

SEQ ID NO: 510105 - DNA, 235 bp, Homo sapiens
  misc_feature (90)..(90): n is a, c, g, or t
  misc_feature (171)..(172): n is a, c, g, or t
cgttcaaggaaaggaaccctgaagattctcactctcccggatcagctgcttcctgggaaagatactgattggcctggatgcactcaaagnctgtgccgagtctctgtcatccatggacaagaggcccaagattatggaggagaaatccccgtcccttcttcagtgtccaannaggctctcttctttcccttatggtgaagtcaaatgaagtttgtcccaagaacttttctacaac

SEQ ID NO: 510106 - DNA, 226 bp, Homo sapiens
agcactttgggaggctggggtgggcagatcacatgaggccaaaagttggagaccagccttgccaacatgttaaaccctgtctctgctaaaaatacaaaattagctgggcgtggtggtgcatgtctgtagtccactgtagtccagctaattgagaggccgaggctcacttgaaccccggaggtggaggttcagttagcccaggttgtccactcactccagcttgggt

SEQ ID NO: 510107 - DNA, 549 bp, Homo sapiens
gcgggtactactctgtccttttttccaaacgtgcaccctccaaaagggatggactgcctcacaccaataaatacacgtcaccttgtttcagaggggctggcctgacttaccttattctgaaagaaagcaatctgatgttcacactaattattatatgaatggccggcaactccttcaacccacacatttagaaagatgtgtgttaactaagtggaactcatgcatgggaagtccagcagagcaacaacaattaaaaaacaaagcagggcagaacagaagcgtatcaagagcacacaattgggagtagaggtcagccatatgggctatggtcgcaggccggaagatctggacatagagctttctctaattacacgcagtttggggcagtttattagtttcctctagctgaaagtcaaactcattcttcaaaagctctgagattatcagaatactcttatacagtaggtgtcctggaaagagtcaggccagctgtctataggtgtgggccagtcgtaaacgggggtccataccatatggacccaccattcc

SEQ ID NO: 510108 - DNA, 100 bp, Homo sapiens
cttctccatggaggaggcggtgcgaacggcttcagccccggaatgctcgcatctcccactgggacggcgacgaaggcggtggccgtgcgagcgcaggact

SEQ ID NO: 510109 - DNA, 314 bp, Homo sapiens
ggcgaaacccaagccgccgcgtaggagcgtgcgtttcgggcccctctttctcccacctgtttcgacttccccattccccaggatgtcaaccctcaagtccctcaaggccatacctggaccccaacgggtaaagaaagacgatgaggaggaggacccgctggaccagctgatctccgctctggctgtctgcctccactttgcagtacaggagtacatgcccaacaccaggactggcggcaatccaaccacaaggtgcaggcttcaaggatttcattatcacacaggcgagcgccagaggacctccagaggaggca

SEQ ID NO: 510110 - DNA, 93 bp, Homo sapiens
gggatggatgttttgggaaggccaaaaatccccctggagactccagcctacactgggcagccatggcattgccagcattgttttctcttataa

SEQ ID NO: 510111 - DNA, 842 bp, Homo sapiens
tatgttgttgcatgtatcagtacttaagcattctgttgtatggctataccacattttatttatccatgaatcagctgatgggcatttggatttccacttcttgcctattatgagtcatgctgttttttgaacattttgtacaagtttttatgtggacattaatttctccttaagatatatacctaggagttgaattgctgggtcacgtggtaactgtttaaccttttgaggcacaaacagtttttcaaagtggctgcactgttttacaatcccatcagcagtgtatgagagttccaaatttctcaacttcctcattaacacttgttatctgctctggattacagccatcctagtgggtgtgaactggtatctccttatggctttgatttgcatttccttgatggctaatgatgtcgaccaaattttaatgtgtctattggcagtttgtatctcttctttggagaaatgtttatttggatcctttgcccatttttaaattgagttgtcttaattactgagttttaagggttctatatataccagtacaaattccttatcagatacgtggtttgcaatttttttctcccaattccgtgagctgtattttcacttcatggtgtactttgaagcataaaagttcgattctgatgaactccaatttcttatttccttccgtgcttaggtatcatatctaagacagcattggctaaatccaggtccccacgatttcccacctttttcatagaggccaccggctctcagcccctacattggggcctcgcacactccgacgtcatctcggtccttatgaggtacgcacttaggcccaacctgtgcctatg

SEQ ID NO: 510112 - DNA, 227 bp, Homo sapiens
cacacagcgaaaccgaaatacctgatatgacttgcggctttggatctaatttcttcggaaataggcaatggacacatcaagctccttatgctgaagcagattgaagacggaatggagattggacctcaacatccattgcttgctgaagtaagcaaactgattaatgaattaactggtaacgagcgttcacgcgttttgtaacactggctctgaagctgtactcgttt

SEQ ID NO: 510113 - DNA, 330 bp, Homo sapiens
aacggtcatactcccatcatggacttgatacaaacattagttagactgctattagcaggtggcaggagcaccttcaatgaatcttcaattggaaaatactggttcaccacctgttggggataagttgccaatggaataatttagtatggtttggagctattttgatgacccactcgcctggataccttcccataaacactctgctggtcaccacctcttccacgagctcttcctggcaatcctcctcttaatcccactgttgctgttgctgatattgttccttcgacatggctacttttatttcacatttactaagaccaacattggtgg

SEQ ID NO: 510114 - DNA, 701 bp, Homo sapiens
cgaagatccgccattccccagaagaagggggaccacccccgccgtgtttagaggccggaatacattgccttattttgctcactgttgcaaagccacgagaatttttttaacttataaaagaagcgggatgtgtttgaagttaaacgcggtttggccataggcctgaaaaaaggcctcaaggtgagtttaaggcaggtttttggcccaacagcctttaaatagagtggcaattcacgaccgggctcgccaaaaggttaaaatttcaacttaaattacagggcaattgggcctaatattgcagaaaaatgtcttccaaaataaggtttctttggtttatgtttctaaaaaagaggaagccaattggctttcaagttatgtcataaaattctgaataaatgaaactggaaaactttatagggcgacttataatcgtgggtgtatggggttattcaaatgcggaccatatttccttcaacctcgtgttcctaaggaaacaaaaacagaaagcgtaccaatcaaaactcaattttttttgcaagtataaatgctcagtaggtctgtttaaggggagcacagatatttatttataaccaactttccattgcctgtgcaaattaaggaaaattctcgtgtggagaatcaagacataagcgaataaaatttttgcatgcccccctagaggagaaaaaatagcgattcta

SEQ ID NO: 510115 - DNA, 1095 bp, Homo sapiens
gacagttgatctctgcaagaagtgagtagctggaggcgccagtggatagcagccacgcctacaggataaagtcgaatcctctggacatgagtgttctgatttccaatgctaatgaacgtgcacagaagctcttccaaataccaattgcaacatgccaagagattgactggaccagagcaatgggcctcttcacttccagagcaaattctaaaggtccacagctggtacacatatacacagacgctcttttcaaccaattcgttgccctaccgtgcttatcatttcatgccataattctcaattaggactgacacggaaagtgccggctgcatctcgtgtggagcaagtctgcatgacacttaccacgcacttgacggaaggacctgcggtttctcgacaattgccgtgcaaggtacagcatgcattgcgctgacggcctgggtcttcgcttctctagcaccccgccaggggaccttccttagactgcagttaccagaagcaaggaaagcagatggtcagaaaagggacaaaaggcgatttggcccctggagtcaaccaagccccatttctccaccttggggccccttcctttccgccgccgtttggcagaggcatacctcttctctaacaaccaggttctgcttttaacccacattatctatttatgccacaccaatgctacattctgcctaagaccaacatttctcagtcttctatgccttatacggttactttcccatgcttccctaacctcccgtatcaccatttcttccagtaacacattacacttggccactatacttccactccaaacacgtaccctccagtatccaccctattccaacaccatacctccttattaacccggcccttttgtacccccaattaccttaacacacttcagctcacatcaccacacttctccaccaaacccaccctctgctcacccatcgctaccaccttctataccctgctataccaacccatccataactttcatcaccccccaagcatccacacctccttactcactctaaatcgccgtcacacccacttcccttcaggtgccaataacccccataaacacccactttg

SEQ ID NO: 510116 - DNA, 368 bp, Homo sapiens
aaaagacaccctcacctcattcaccatgagcctcatgaagaagaagagagcccacattctacaagcacaatccaggcaactcctactagtacaacggaagaaacagtctacccagcaaggaacacgtggtttggcaacagactggcattgaaggatatcgccacaacacccagagcaagactcccattcgcacaacagcggacagctgcagacctcagcgtcatatccagccatccagatgcaacggaaggacacacaccatagcccagtaggacagttcctggtactgcatttcttcaacaccaatctcacaccccaatgggacgagcgtcatcaagacagggaagaacggatggatatgtgactcc

SEQ ID NO: 510117 - DNA, 577 bp, Homo sapiens
ggcctcgtcgtgagcaagtgctgttgagcatggggtaccgctcgtttggtgccgttggctcggtttaccggcgatcggcgtgtgatgggtcagtgggcgaatgggcgcgtcatggctggcattgcgtggatcgttgtggcggcaatctcggctctcaacgtggccctcgtcgtcgagaccgtcatgggtgcatgatccctgagtgaaattctgtggcgacaatcgtgagatgagtgacaaactcaggcgggtgacgacgtcgaaccccacaccgacccctgcccacgagttggccaacgatttggccactgcatttcgaggacatcctgccggagtggcgatcctcaccacgatgggggtggctggaccggaaggcttgacggtctcttccttggcgtcggtgtcagtcgtgccggctgtcgtatcggtgtcgttggggcatgacctcgacgactctggacgctcttaccgagggatcgcgcgtcatcgtccacatgcttgacgcggatcgcgctggcctcgctgatgacttcgctgtgccaggggccggtcactttgcgggctcgggtgggggccg

SEQ ID NO: 510118 - DNA, 205 bp, Homo sapiens
aggatagaattggcagaagctcagctctgtgaactagctcccgttttatacttgggaccctactataagtcccttgggctccaatagagagctgattaattactgccaatcagaacccatccctatcaaatcagatgatagtggctttgacctagggaagaagaggttagaacgaaagaacccccaccatgtatggttagagagt

SEQ ID NO: 510119 - DNA, 396 bp, Homo sapiens
tctatcaaatagaatgtggtggaaatgacagtgtgactttcaagactaggccataaaaggccctgtggtctcatggtctctcttggatcactcattttggggtcagcatatgccttgttgtggggacactcaagcagtcaaatggagaagttgatatggtgaggaactgaggcctccaaccaacagccagcactgaccagccagctgtgcaagtgaaccaccctagaagcaggtcctccagcctcagtcaaaccttcagattactaaatccctgcccatttcttaaatgcaacctcatgaggaacctcaagccagaactcaccagctaagctattccaaatttcttcacccttgcaaactgtatgaaataataaatatttattgtcatattaaaaa

SEQ ID NO: 510120 - DNA, 142 bp, Homo sapiens
tctaggactaatgcaatagaccgcggttctatttcgttggtaatcggaactgaggccactcattaatcagggacggccggggcgcatacgtattgcgccgcaagaggtgacattctcggaccggcgtaagacataaccgcgg

SEQ ID NO: 510121 - DNA, 720 bp, Homo sapiens
  misc_feature (489)..(489): n is a, c, g, or t
gccaaaccatttgacccaaataaattataggcgagtagaaagtgaaagccctggcgcaatagatatagtaccgcgagggaaagatgaaaaagttataaccaagcataatatagcaaggactaacccctataccttctgcataactgaagttaacgtagacaactaacctttgcaatgggagacgccagaagctacagaccccctgaaaccagtacgacgctaccgtaagcaatcagcctaagaagagcatcagcccgatctatgctaggcaaagatagatggcgaagcatttagtaggctagaggtcgcacaaagccctacacgatccctggatgatgagactggctctggtcctagagcataggcaatcgttaggttgcaactattcacaagttctgacccaacagtaaaccgctctcaaatcctcctctgatacacattctacactgtgtagctccagaaggaggcaaccagcttccttgtgcgacnagcgtagtgcaagagaaacctttgctagtagcagtcagtctcaagaaaatttgaacgacccgactacggtagagccatcacatgacgcaagccaagcaagtgataagaagaggcgcttcaatgcgtcaaacacgcgcaccataccctacaagacaagtccccaatatcatagtaaagctgaacctcctcggcacccaaatttggagccaatctatcagcctgatagaagaa

SEQ ID NO: 510122 - DNA, 384 bp, Homo sapiens
cttttggggtctttgctcaggatgtcaagggaacccaggaccagatgcataaagtgataaaacaatctaattgtatcacaaatgtataaaacaaccacagcgatggggtggatgaaattgttgtggacctaagtaattttggaaatagagtctataaaattaaaggcaaaagaaactgtatataagtactgcactctagttgaaaagttgtttcctgtgggatatgggttaacaattatgatactgctgtacaggtatgctgggactgaacaaataaatgcaaagatggtggatggtggaagccaggttttttactcttagaggggagtgcatagatatgcaagaggaggatgctagaatgatctacatgataatgggttcgag

SEQ ID NO: 510123 - DNA, 1408 bp, Homo sapiens
  misc_feature (307)..(307): n is a, c, g, or t
gatgagattgagagagatggcggtcacgatcggaaggctaccggtgtcattgagcacgacgtgccattctatgatcttccaaccgaacggacgcaagctggccaatgggtgaaaggggaaggcgggtcggggagaattaggcacagtgaagcaggggcaggatagattggccattgctgtggttactaattcagtagtatagtacatcatgatttattcagacgagagcacagggaccaagcgaacgtgcatagttgttctctgatgagcaagtgcagttatggggctgtggtgtgtgactaaacangtgaatcaggctctagcaatcactcttacgcaacactgcatgtctctcggtatgtcacaacctctggcgcacaatggaaaaccgtactcgcaatggctcgatccctctatggactcgagatgtcaccaaataaatctgacggactggtgagacactgactcgcggcgtagccctgtattgccagagtcggtcatgaccactatggagtcagtcctcttgacccgctgaggggggggcccaattgacgatcaacatgatacttataggtcatcggttacagattgacacccaggaggcacctcctgtggggaactgtcatccagtgtctttcacatgtacactgacgtgaaaagcccacttgggaaaaggatagttcatgctccgggtctacttcgaatagggagggaagcctctcccatcaggggaaagcacaaccgctcggcaagaaggacactctttcatacgtacaccacatcccaaatgcggcaattaaccgatgacgtagctacgtgcccaatggttccatcttgggatagcagacatggtggtcatgtgccaaacacggaaaagagaggggtactctatggtccccggcatagatagagaggcttgggcaacatacacatgttgaggcatgccattcaaaacaccgttctcgaggaattgttgaaccagcttgttcctacgcaaggaagaaatggatgttccaggattttgggaaaacctttgggaacagaggagtcctccagtaaatttttttggagtggcgcaattggcgtgctccggttaggatccggataggcgcgacagcgaatacctaagaggagacgacccaaaggtttacacgcccctaggtttggtgcgagaggactgcaacagccattgagagaagttcgggggtcccttcagcgaaccttaatgtcccttgggccacaaggcacactccaataattagggggtgaaccaagcactttcttcattcttaggcttcctctttgtgactaggggcacccacgcaaagtatggcgcacttgagaacacacttgagatggttccaacacaactactgtgggttttccaataaatccaccactttgatgg

SEQ ID NO: 510124 - DNA, 345 bp, Homo sapiens
gccgcgttccagcagccgtcactcccgccgccggcccccgtgcccgacccgcctgcccctacccatccgcgcgggcacgggcacctggccagacgaacggtcctaggggcacccgagcagctgtcatctgtctcaggcattcatctcggcccactgagtctcattcgtctctgcagtactaaggctcagatccgtatcgctcggatccctcgataacccgccggagctctaaaccggaccgatctggatggcccgacggatggacggacgagagactgaggcagacgaggagaagacgaaaagacgacgaggcgacactgaaaacagaggacgatacagatagag

SEQ ID NO: 510125 - DNA, 1463 bp, Homo sapiens
  misc_feature (601)..(601): n is a, c, g, or t
tggcagaaaagccagttttttttttatttggtaaagctctgccataaatcttctagcgtgtgtgccaatgtggttcacctgtgccacaacttcgcaccaggtgtgtgttccggtgttagccagcaaacagaagttctgtggccattcagcgagaaccgaggccagggagaggtgtgcacgtggggtgtggttcgtgcctttgcgtggcgtggtatagcgtgatataacttctctgtgtgtcttctacgagtgtctcatctctataacaatgtgatctctttctccgctctctataaatctccacaaatctcttgtgatgtgactgtgagaggctctgtgtgtggccagagcacacgaccgagcacagtatagcgcgcgtgttagagaggctgtgtaacagacacacagaggggggcgtgtgtgagagtgacagtgtctctcccacaccacatctctagcgcgtgtgtgtacagaggtgtgtgtgtgtgcgcttctgcgtgtgtgagagaaactctcctaattaacaagtgtggcgctgtggcgccactctctcttgtggcctctctcagagaaaagcccacagagagaggggagactcccnactctgtggagagagagacacagagtctcacaccgcggtgtgtctccgagactatgagccctgtgtgtgtgtgtgccccaaagtggtggtgtgtgggctcttctcgaggctgtgtgccagaggtgtttgaggcgccgagagtgtttccacactcacgctctgtgcagacccgaggctgtttggtgtctcccaaagcccacccagaggagagacaaccgacagtgaaatgaaggggggttgttggccgtggctgtgtgtggggcggcggacagaaaaaaggcgggggaacccaccagagaaaacagcccgcgactctccctagaaaagtgtggggagtttcttactaatccgctgggggaacacgaagtgtgtcttctctttggggccaccaacacaacccccccaggggggtgttaatttcccccatttaaaggcgtttaggaaacagggggcttcatacattacctcgcgcaaagaaatccgcccagaaagacacccactttcttggccccgggtgtttggttaccacaacaggtgcgaacaaacagggggcgccaacagactctagctagggaaccacattccccttgtgggtgtaaatttgtggcgcccccaaacaaacaaattcgggccactctgttgtgggtgttcgttgcccccccggtgcttgtgtaataagaattcccacccaggacagagcggaccaagaggtgtatttcacccactacccgagaggggagagctcgcctctagtatagagcgtgggcgaacacactagtggtgacgccaacttcgtgatgacgacagaattaaccccaccactttaccatattaccaacaccgggtcgggagtgcgttcgct

SEQ ID NO: 510126 - DNA, 2127 bp, Homo sapiens
  misc_feature (1767)..(1772): n is a, c, g, or t
gaattccgagctttttattcctaagaggagaaaatcagtaacgggagaagcaggaggatgtccagaagaaatttcatcccttgctctcgcccctactctttctggtgttagatcgagcaaccctctaaaagcagtttagagtggtaaaaaaaaaaaaaaacacaccaaacgctcgcagccacaaaagggatgaaatttcttctggacatcctcctgcttctcccgttactgatcgtctgctccctagagtccttcgtgaagctttttattcctaagaggagaaaatcagtcaccggcgaaatcgtgctgattacaggagctgggcatggaattgggagactgactgcctatgaatttgctaaacttaaaagcaagctggttctctgggatataaataagcatggactggaggaaacagctgccaaatgcaagggactgggtgccaaggttcatacctttgtggtagactgcagcaaccgagaagatatttacagctctgcaaagaaggtgaaggcagaaattggagatgttagtattttagtaaataatgctggtgtagtctatacatcagatttgtttgctacacaagatcctcagattgaaaagacttttgaagttaatgtacttgcacatttctggactacaaaggcatttcttcctgcaatgacgaagaataaccatggccatattgtcactgtggcttcggcagctggacatgtctcggtccccttcttactggcttactgttcaagcaagtttgctgctgttggatttcataaaactttgacagatgaactggctgccttacaaataactggagtcaaaacaacatgtctgtgtcctaatttcgtaaacactggcttcatcaaaaatccaagtacaagtttgggacccactctggaacctgaggaagtggtaaacaggctgatgcatgggattctgactgagcagaagatgatttttattccatcttctatagcttttttaacaacattggaaaggatccttcctgagcgtttcctggcagttttaaaacgaaaaatcagtgttaagtttgatgcagttattggatataaaatgaaagcgcaataagcacctagttttctgaaaactgatttaccaggtttaggttgatgtcatctaatagtgccagaattttaatgtttgaacttctgttttttctaattatccccatttcttcaatatcatttttgaggctttggcagtcttcatttactaccacttgttctttagccaaaagctgattacatatgatataaacagagaaatacctttagaggtgactttaaggaaaatgaagaaaaagaaccaaaatgactttattaaaataatttccaagattatttgtggctcacctgaaggctttgcaaaatttgtaccataaccgtttatttaacatatatttttatttttgattgcacttaaattttgtataatttgtgtttctttttctgttctacataaaatcagaaacttcaagctctctaaataaaatgaaggactatatctagtggtatttcacaatgaatatcatgaactctcaatgggtaggtttcatcctacccattgccactctgtttcctgagagatacctcacattccaatgccaaacatttctgcacagggaagctagaggtggatacacgtgttgcaagtataaaagcatcactgggatttaaggagaattgagagaatgtacccacaaatggcagcaataataaatggatcacacttaaaaaaaaaacnnnnnnaaacaaaaaaaaaaaaaaaaaagggggggccctcacaaaagtatacccctacgagggggcccaaaggtaaacgaggaccccagtcttctcgtggcaccaacgggggccccacaatagggactcgcgattaaacagacaaggacacgggccggagctgtcataaacacggtcgtctgaccggggaaaaaccgggtaacccttgcgagacaccctcggagaaaagaggacccccataaacaaagccagagggggggcaccacacatggggggcaccaaagcgcagccccacacaagaaactcttaaaggcccccaaggggggaccatacagacaacttccacgaacgcgccctaata

SEQ ID NO: 510127 - DNA, 1493 bp, Homo sapiens
gaaggaacggtttcggagttgtttttctttgatacgggagttcctccttgctctcgcccctactctttctggtgttagatcgagcaaccctctaaaagcagtttagagtggtaaaaaaaaaaaaaaacacaccaaacgctcgcagccacaaaagggatgaaatttcttctggacatcctcctgcttctcccgttactgatcgtctgctccctagagtccttcgtgaagctttttattcctaagaggagaaaatcagtcaccggcgaaatcgtgctgattacaggagctgggcatggaattgggagactgactgcctatgaatttgctaaacttaaaagcaagctggttctctgggatataaataagcatggactggaggaaacagctgccaaatgcaagggactgggtgccaaggttcatacctttgtggtagactgcagcaaccgagaagatatttacagctctgcaaagaaggtgaaggcagaaattggagatgttagtattttagtaaataatgctggtgtagtctatacatcagatttgtttgctacacaagatcctcagattgaaaagacttttgaagttaatgtacttgcacatttctggactacaaaggcatttcttcctgcaatgacgaagaataaccatggccatattgtcactgtggcttcggcagctggacatgtctcggtccccttcttactggcttactgttcaagcaagtttgctgctgttggatttcataaaactttgacagatgaactggctgccttacaaataactggagtcaaaacaacatgtctgtgtcctaatttcgtaaacactggcttcatcaaaaatccaagtacaagtttgggacccactctggaacctgaggaagtggtaaacaggctgatgcatgggattctgactgagcagaagatgatttttattccatcttctatagcttttttaacaacattggaaaggatccttcctgagcgtttcctggcagttttaaaacgaaaaatcagtgttaagtttgatgcagttattggatataaaatgaaagcgcaataagcacctagttttctgaaaactgatttaccaggtttaggttgatgtcatctaatagtgccagaattttaatgtttgaacttctgttttttctaattatccccatttcttcaatatcatttttgaggctttggcagtcttcatttactaccacttgttctttagccaaaagctgattacatatgatataaacagagaaatacctttagaggtgactttaaggaaaatgaagaaaaagaaccaaaatgactttattaaaataatttccaagattatttgtggctcacctgaaggctttgcaaaatttgtaccataaccgtttatttaacatatatttttatttttgattgcacttaaattttgtataatttgtgtttctttttctgttctacataaaatcagaaacttcaagctctctaaataaaatgaaggactat

SEQ ID NO: 510128 - DNA, 847 bp, Homo sapiens
gggagtcttgctctgtcgcccaggctggagtgcagtggcacaatctcggctcactgcaagctccgcctcccaggttcatgccattctcctgcctcagcctcctgagtagctgggactacaggcgcccgccacacgcctggctaattttttgtagttttacgtagagacagggtttcaccatgttagccaggatggtctcgatctcctgacccctcgtgatccacccgcctcggcctcccaaagtgctgggattacaggcgtgagccatccaacccccgtgcttgttagtttacttttaaaaaaaatttcatgaggtacacgtgcagctttgttgtacgatacattgtgtagtgctgcggttcacgcttcagttgaacctgtcactcaaacggtgaacaaaatacctcataggtagagtctagcctttacacccctctccctcccctgctcttggaatgcgcaggtgtgccagcttcccatctttatgcctgattattcacattgtctagctacctatgtatacttgagaacacgtggtatctcaatttaccgtttctgtgtgaattcaccttacggatacacggcctccagctgccatctgtgttgctgctaaccaccattgattcatccttaccatggctctatactattctacgcgatatctgcagcaactacattcccttcatcccacgcacatacattgctgcgacaacctggggctgcttcccctcattggcttccacgattgactccgcgacagacctcacctcccgaacagcactcattgtctgaccacgtcttggcattggcatcgcacttcccagaacccttccatccccaaccaccc

SEQ ID NO: 510129 - DNA, 2094 bp, Homo sapiens
  misc_feature (1734)..(1739): n is a, c, g, or t
gaaggaacggtttcggagttgtttttctttgatacgggagttcctccttgctctcgcccctactctttctggtgttagatcgagcaaccctctaaaagcagtttagagtggtaaaaaaaaaaaaaaacacaccaaacgctcgcagccacaaaagggatgaaatttcttctggacatcctcctgcttctcccgttactgatcgtctgctccctagagtccttcgtgaagctttttattcctaagaggagaaaatcagtcaccggcgaaatcgtgctgattacaggagctgggcatggaattgggagactgactgcctatgaatttgctaaacttaaaagcaagctggttctctgggatataaataagcatggactggaggaaacagctgccaaatgcaagggactgggtgccaaggttcatacctttgtggtagactgcagcaaccgagaagatatttacagctctgcaaagaaggtgaaggcagaaattggagatgttagtattttagtaaataatgctggtgtagtctatacatcagatttgtttgctacacaagatcctcagattgaaaagacttttgaagttaatgtacttgcacatttctggactacaaaggcatttcttcctgcaatgacgaagaataaccatggccatattgtcactgtggcttcggcagctggacatgtctcggtccccttcttactggcttactgttcaagcaagtttgctgctgttggatttcataaaactttgacagatgaactggctgccttacaaataactggagtcaaaacaacatgtctgtgtcctaatttcgtaaacactggcttcatcaaaaatccaagtacaagtttgggacccactctggaacctgaggaagtggtaaacaggctgatgcatgggattctgactgagcagaagatgatttttattccatcttctatagcttttttaacaacattggaaaggatccttcctgagcgtttcctggcagttttaaaacgaaaaatcagtgttaagtttgatgcagttattggatataaaatgaaagcgcaataagcacctagttttctgaaaactgatttaccaggtttaggttgatgtcatctaatagtgccagaattttaatgtttgaacttctgttttttctaattatccccatttcttcaatatcatttttgaggctttggcagtcttcatttactaccacttgttctttagccaaaagctgattacatatgatataaacagagaaatacctttagaggtgactttaaggaaaatgaagaaaaagaaccaaaatgactttattaaaataatttccaagattatttgtggctcacctgaaggctttgcaaaatttgtaccataaccgtttatttaacatatatttttatttttgattgcacttaaattttgtataatttgtgtttctttttctgttctacataaaatcagaaacttcaagctctctaaataaaatgaaggactatatctagtggtatttcacaatgaatatcatgaactctcaatgggtaggtttcatcctacccattgccactctgtttcctgagagatacctcacattccaatgccaaacatttctgcacagggaagctagaggtggatacacgtgttgcaagtataaaagcatcactgggatttaaggagaattgagagaatgtacccacaaatggcagcaataataaatggatcacacttaaaaaaaaaacnnnnnnaaacaaaaaaaaaaaaaaaaaagggggggccctcacaaaagtatacccctacgagggggcccaaaggtaaacgaggaccccagtcttctcgtggcaccaacgggggccccacaatagggactcgcgattaaacagacaaggacacgggccggagctgtcataaacacggtcgtctgaccggggaaaaaccgggtaacccttgcgagacaccctcggagaaaagaggacccccataaacaaagccagagggggggcaccacacatggggggcaccaaagcgcagccccacacaagaaactcttaaaggcccccaaggggggaccatacagacaacttccacgaacgcgccctaata

SEQ ID NO: 510130 - DNA, 301 bp, Homo sapiens
gacaatcagctcagccctgccggtgcgcggatcatggacagtacagactcccagacggaagaaacccacctctgcggcttaagccacccggcttgaggtcttttgctcttccacctcattagatgccgggcaacaaaccaacccatatgccttccattgggttggtatgatagcccggcatctaatgcgatgacaaaacaaacaacccctcgttacctggacttgcactgacccctcaggatcatggaccttgagcctgaggagtggggccccgcctggcttggattccctggggcccccc

SEQ ID NO: 510131 - DNA, 641 bp, Homo sapiens
  misc_feature (596)..(596): n is a, c, g, or t
gcacgaggtacagcctgacatcattataaggcacaaaccaattaacaatattaattttatgatgaaaatatgtatgcatatattaatgaatgagaaaatattcaataaatctgaaaatagcaaatcatattattaaattcacatgggcaggatccatgtcttttgttcaccactgcatcacaaaggcccaacatcgtcctggtatatggcaggtacttaatgagtattagttgaatgaatgaatgaatgaatgagaaaagccaggattcagtagaccagatgaagagggattgtttatctttacaaggagtatctgattcgtctactttttgctctacccagatctgaactccttagcaattacttctttattcattcatacatttcaaaaggttcagccacggtaatttatgaaatgttgccaggattgaggagaaaatggagaactagcctaggatgcagactttgtgtgtttctttgtttctctcttgcctgaggttctggtttcccatttttaaaagtctaaaaccctcgtgactttactgtgtgccttattctagcattgggctcccactttttcctttcatcaaaactgntgatggataggatatattaaaagaaacccaaaggttaggacatta

SEQ ID NO: 510132 - DNA, 1945 bp, Homo sapiens
gaaggaacggtttcggagttgtttttctttgatacgggagttcctccttgctctcgcccctactctttctggtgttagatcgagcaaccctctaaaagcagtttagagtggtaaaaaaaaaaaaaaacacaccaaacgctcgcagccacaaaagggatgaaatttcttctggacatcctcctgcttctcccgttactgatcgtctgctccctagagtccttcgtgaagctttttattcctaagaggagaaaatcagtcaccggcgaaatcgtgctgattacaggagctgggcatggaattgggagactgactgcctatgaatttgctaaacttaaaagcaagctggttctctgggatataaataagcatggactggaggaaacagctgccaaatgcaagggactgggtgccaaggttcatacctttgtggtagactgcagcaaccgagaagatatttacagctctgcaaagaaggtgaaggcagaaattggagatgttagtattttagtaaataatgctggtgtagtctatacatcagatttgtttgctacacaagatcctcagattgaaaagacttttgaagttaatgtacttgcacatttctggactacaaaggcatttcttcctgcaatgacgaagaataaccatggccatattgtcactgtggcttcggcagctggacatgtctcggtccccttcttactggcttactgttcaagcaagtttgctgctgttggatttcataaaactttgacagatgaactggctgccttacaaataactggagtcaaaacaacatgtctgtgtcctaatttcgtaaacactggcttcatcaaaaatccaagtacaagtttgggacccactctggaacctgaggaagtggtaaacaggctgatgcatgggattctgactgagcagaagatgatttttattccatcttctatagcttttttaacaacattggaaaggatccttcctgagcgtttcctggcagttttaaaacgaaaaatcagtgttaagtttgatgcagttattggatataaaatgaaagcgcaataagcacctagttttctgaaaactgatttaccaggtttaggttgatgtcatctaatagtgccagaattttaatgtttgaacttctgttttttctaattatccccatttcttcaatatcatttttgaggctttggcagtcttcatttactaccacttgttctttagccaaaagctgattacatatgatataaacagagaaatacctttagaggtgactttaaggaaaatgaagaaaaagaaccaaaatgactttattaaaataatttccaagattatttgtggctcacctgaaggctttgcaaaatttgtaccataaccgtttatttaacatatatttttatttttgattgcacttaaattttgtataatttgtgtttctttttctgttctacataaaatcagaaacttcaagctctctaaataaaatgaaggactatatctagtggtatttcacaatgaatatcatgaactctcaatgggtaggtttcatcctacccattgccactctgtttcctgagagatacctcacattccaatgccaaacatttctgcacagggaagctagaggtggatacacgtgttgcaagtataaaagcatcactgggatttaaggagaattgagagaatgtacccacaaatggcagcaataataaatggtaccccttaaaaaaaaagggggcgggtaagtacccgaggggccagtaagcgtgccaggtttgtgcagggcgctagggggttataaacagcacggcggtaacaaggatggaaaatgactggtttgcgagagcctctttgggatcggaaccaaggagcgagaataagtttgtgacgtctgttgttggtttagtaatagcttcaaagggatgatgaggtagaactttatgaagac

SEQ ID NO: 510133 - DNA, 530 bp, Homo sapiens
cacgaggccggtgcgggcgtacatcgccgccatgccggactggaaacgcccgattggcgcgcgactggatgccctgatcgaacgggccgtacccggcgtgcacaaggcggtgaagtggaactcgccgatgtatgcggtggccgtcggcgcgggctggtttctcagcttccattgcttcacccgctacatcaaggtggcctttttccgcggcgctgcactgacgccgccgccaccggagccgtccaagagcggcgacacgcgctacctgcacatccacgaatccggcctgttggatgaagcgcagttcctggactgggtgcgccaggccgccgcgttgcccggcgagcgcatgtaagcccggcattccgattcccttcccgacgagagtccctgatggccacgcatgctccgaactctgccgatgctggaaccccggcggccgaactgatcgatgcacgcatcgccgagctgggggactggcgcggcgaaacgctggcacgcgtgcgtgcattgatccatgaagcactgcc

SEQ ID NO: 510134 - DNA, 2073 bp, Homo sapiens
  misc_feature (1713)..(1718): n is a, c, g, or t
gaattccgagctttttattcctaagaggagaaaatcagtaacgggagaagcaggaggatgtccagaagaaatttcatcccttgctctcgcccctactctttctggtgttagatcgagcaaccctctaaaagcagtttagagtggtaaaaaaaaaaaaaaacacaccaaacgctcgcagccacaaaagggatgaaatttcttctggacatcctcctgcttctcccgttactgatcgtctgctccctagagtccttcgtgaagctttttattcctaagaggagaaaatcagtcaccggcgaaatcgtgctgattacaggagctgggcatggaattgggagactgactgcctatgaatttgctaaacttgccaaatgcaagggactgggtgccaaggttcatacctttgtggtagactgcagcaaccgagaagatatttacagctctgcaaagaaggtgaaggcagaaattggagatgttagtattttagtaaataatgctggtgtagtctatacatcagatttgtttgctacacaagatcctcagattgaaaagacttttgaagttaatgtacttgcacatttctggactacaaaggcatttcttcctgcaatgacgaagaataaccatggccatattgtcactgtggcttcggcagctggacatgtctcggtccccttcttactggcttactgttcaagcaagtttgctgctgttggatttcataaaactttgacagatgaactggctgccttacaaataactggagtcaaaacaacatgtctgtgtcctaatttcgtaaacactggcttcatcaaaaatccaagtacaagtttgggacccactctggaacctgaggaagtggtaaacaggctgatgcatgggattctgactgagcagaagatgatttttattccatcttctatagcttttttaacaacattggaaaggatccttcctgagcgtttcctggcagttttaaaacgaaaaatcagtgttaagtttgatgcagttattggatataaaatgaaagcgcaataagcacctagttttctgaaaactgatttaccaggtttaggttgatgtcatctaatagtgccagaattttaatgtttgaacttctgttttttctaattatccccatttcttcaatatcatttttgaggctttggcagtcttcatttactaccacttgttctttagccaaaagctgattacatatgatataaacagagaaatacctttagaggtgactttaaggaaaatgaagaaaaagaaccaaaatgactttattaaaataatttccaagattatttgtggctcacctgaaggctttgcaaaatttgtaccataaccgtttatttaacatatatttttatttttgattgcacttaaattttgtataatttgtgtttctttttctgttctacataaaatcagaaacttcaagctctctaaataaaatgaaggactatatctagtggtatttcacaatgaatatcatgaactctcaatgggtaggtttcatcctacccattgccactctgtttcctgagagatacctcacattccaatgccaaacatttctgcacagggaagctagaggtggatacacgtgttgcaagtataaaagcatcactgggatttaaggagaattgagagaatgtacccacaaatggcagcaataataaatggatcacacttaaaaaaaaaacnnnnnnaaacaaaaaaaaaaaaaaaaaagggggggccctcacaaaagtatacccctacgagggggcccaaaggtaaacgaggaccccagtcttctcgtggcaccaacgggggccccacaatagggactcgcgattaaacagacaaggacacgggccggagctgtcataaacacggtcgtctgaccggggaaaaaccgggtaacccttgcgagacaccctcggagaaaagaggacccccataaacaaagccagagggggggcaccacacatggggggcaccaaagcgcagccccacacaagaaactcttaaaggcccccaaggggggaccatacagacaacttccacgaacgcgccctaata

SEQ ID NO: 510135 - DNA, 2019 bp, Homo sapiens
  misc_feature (1659)..(1664): n is a, c, g, or t
gaattccgagctttttattcctaagaggagaaaatcagtaacgggagaagcaggaggatgtccagaagaaatttcatcccttgctctcgcccctactctttctggtgttagatcgagcaaccctctaaaagcagtttagagtggtaaaaaaaaaaaaaaacacaccaaacgctcgcagccacaaaagggatgaaatttcttctggacatcctcctgcttctcccgttactgatcgtctgctccctagagtccttcgtgaagctttttattcctaagaggagaaaatcagtcaccggcgaaatcgtgctgattacaggagctgggcatggaattgggagactgactgcctatgaatttgctaaacttaaaagcaagctggttctctgggatataaataaggtgaaggcagaaattggagatgttagtattttagtaaataatgctggtgtagtctatacatcagatttgtttgctacacaagatcctcagattgaaaagacttttgaagttaatgtacttgcacatttctggactacaaaggcatttcttcctgcaatgacgaagaataaccatggccatattgtcactgtggcttcggcagctggacatgtctcggtccccttcttactggcttactgttcaagcaagtttgctgctgttggatttcataaaactttgacagatgaactggctgccttacaaataactggagtcaaaacaacatgtctgtgtcctaatttcgtaaacactggcttcatcaaaaatccaagtacaagtttgggacccactctggaacctgaggaagtggtaaacaggctgatgcatgggattctgactgagcagaagatgatttttattccatcttctatagcttttttaacaacattggaaaggatccttcctgagcgtttcctggcagttttaaaacgaaaaatcagtgttaagtttgatgcagttattggatataaaatgaaagcgcaataagcacctagttttctgaaaactgatttaccaggtttaggttgatgtcatctaatagtgccagaattttaatgtttgaacttctgttttttctaattatccccatttcttcaatatcatttttgaggctttggcagtcttcatttactaccacttgttctttagccaaaagctgattacatatgatataaacagagaaatacctttagaggtgactttaaggaaaatgaagaaaaagaaccaaaatgactttattaaaataatttccaagattatttgtggctcacctgaaggctttgcaaaatttgtaccataaccgtttatttaacatatatttttatttttgattgcacttaaattttgtataatttgtgtttctttttctgttctacataaaatcagaaacttcaagctctctaaataaaatgaaggactatatctagtggtatttcacaatgaatatcatgaactctcaatgggtaggtttcatcctacccattgccactctgtttcctgagagatacctcacattccaatgccaaacatttctgcacagggaagctagaggtggatacacgtgttgcaagtataaaagcatcactgggatttaaggagaattgagagaatgtacccacaaatggcagcaataataaatggatcacacttaaaaaaaaaacnnnnnnaaacaaaaaaaaaaaaaaaaaagggggggccctcacaaaagtatacccctacgagggggcccaaaggtaaacgaggaccccagtcttctcgtggcaccaacgggggccccacaatagggactcgcgattaaacagacaaggacacgggccggagctgtcataaacacggtcgtctgaccggggaaaaaccgggtaacccttgcgagacaccctcggagaaaagaggacccccataaacaaagccagagggggggcaccacacatggggggcaccaaagcgcagccccacacaagaaactcttaaaggcccccaaggggggaccatacagacaacttccacgaacgcgccctaata

SEQ ID NO: 510136 - DNA, 366 bp, Homo sapiens
ttgcgtcaggacactatgccctcattgtggtcattgggtgagggagtgtccttttgtcaaaggagtctgcaagagatagttggtcttatttctgtatgccaaagtgatcaacacaccatagtctcttccataaagaatgtggcttccttgcattctccatcctgttactctgggcccagtaatttgatgtctctgtctgattgtactagagacaggagtataccctgcttattcattatcaagtaaagagactcagattatatttgattttttagcctcctctagagcccatcaggcatttctgagttttctaggagaagggtttggtcacaaaccctaccattatctggagattacttgtctgct

SEQ ID NO: 510137 - DNA, 1816 bp, Homo sapiens
  misc_feature (1456)..(1461): n is a, c, g, or t
ctgttgcgaggaatgctgaggccagagaatggcatgaaccccggaggccgagcttgcagtgagctgagatcacgccactgcactgcagcctgggccaccgagccagaatccgtctccaaaaaaaaaatagccattgtgtataaacttaccctcatacctcttaatgaatttacttttcttattttattttttgaaggtgaaggcagaaattggagatgttagtattttagtaaataatgctggtgtagtctatacatcagatttgtttgctacacaagatcctcagattgaaaagacttttgaagttaatgtacttgcacatttctggactacaaaggcatttcttcctgcaatgacgaagaataaccatggccatattgtcactgtggcttcggcagctggacatgtctcggtccccttcttactggcttactgttcaagcaagtttgctgctgttggatttcataaaactttgacagatgaactggctgccttacaaataactggagtcaaaacaacatgtctgtgtcctaatttcgtaaacactggcttcatcaaaaatccaagtacaagtttgggacccactctggaacctgaggaagtggtaaacaggctgatgcatgggattctgactgagcagaagatgatttttattccatcttctatagcttttttaacaacattggaaaggatccttcctgagcgtttcctggcagttttaaaacgaaaaatcagtgttaagtttgatgcagttattggatataaaatgaaagcgcaataagcacctagttttctgaaaactgatttaccaggtttaggttgatgtcatctaatagtgccagaattttaatgtttgaacttctgttttttctaattatccccatttcttcaatatcatttttgaggctttggcagtcttcatttactaccacttgttctttagccaaaagctgattacatatgatataaacagagaaatacctttagaggtgactttaaggaaaatgaagaaaaagaaccaaaatgactttattaaaataatttccaagattatttgtggctcacctgaaggctttgcaaaatttgtaccataaccgtttatttaacatatatttttatttttgattgcacttaaattttgtataatttgtgtttctttttctgttctacataaaatcagaaacttcaagctctctaaataaaatgaaggactatatctagtggtatttcacaatgaatatcatgaactctcaatgggtaggtttcatcctacccattgccactctgtttcctgagagatacctcacattccaatgccaaacatttctgcacagggaagctagaggtggatacacgtgttgcaagtataaaagcatcactgggatttaaggagaattgagagaatgtacccacaaatggcagcaataataaatggatcacacttaaaaaaaaaacnnnnnnaaacaaaaaaaaaaaaaaaaaagggggggccctcacaaaagtatacccctacgagggggcccaaaggtaaacgaggaccccagtcttctcgtggcaccaacgggggccccacaatagggactcgcgattaaacagacaaggacacgggccggagctgtcataaacacggtcgtctgaccggggaaaaaccgggtaacccttgcgagacaccctcggagaaaagaggacccccataaacaaagccagagggggggcaccacacatggggggcaccaaagcgcagccccacacaagaaactcttaaaggcccccaaggggggaccatacagacaacttccacgaacgcgccctaata

SEQ ID NO: 510138 - DNA, 399 bp, Homo sapiens
  misc_feature (79)..(79): n is a, c, g, or t
  misc_feature (117)..(117): n is a, c, g, or t
ccttttttacatgccccctcccttccaggggggaaaaaaattttccccccccaaccccagccccctggggggcccatgntgaggggtccccttttttgttccctcctgcccagggangcttttttttttaaccccagggggggggggcgggcccccccccccagggttttgggaaccccgctttttccctcccctttctaggggcccctggggtttttgcccccttttcccttccccaaaggatggtccccccccaccccttttttcattttttgggccccaggaaggggtttccggtggggggccccaagtccccggcccccggggttttttttggggggggcctttttttcccctgcttttgggcggggggggcttaataaagggccccggccccca

SEQ ID NO: 510139 - DNA, 2199 bp, Homo sapiens
  misc_feature (1839)..(1844): n is a, c, g, or t
gaaggaacggtttcggagttgtttttctttgatacgggagttcctccttgctctcgcccctactctttctggtgttagatcgagcaaccctctaaaagcagtttagagtggtaaaaaaaaaaaaaaacacaccaaacgctcgcagccacaaaagggatgaaatttcttctggacatcctcctgcttctcccgttactgatcgtctgctccctagagtccttcgtgaagctttttattcctaagaggagaaaatcagtcaccggcgaaatcgtgctgattacaggagctgggcatggaattgggagactgactgcctatgaatttgctaaacttaaaagcaagctggttctctgggatataaataagcatggactggaggaaacagctgccaaatgcaagggactgggtgccaaggttcatacctttgtggtagactgcagcaaccgagaagatatttacagctctgcaaagaaggtgaaggcagaaattggagatgttagtattttagtaaataatgctggtgtagtctatacatcagatttgtttgctacacaagatcctcagattgaaaagacttttgaagttccatgtgaccttgccccattttcgtgggctggagcccagtggcgtgatctggggctcaatggaacctctgcctcccgggttcaagtgattctcctgcctcagcctccccagtagctgggattacagactacaaaggcatttcttcctgcaatgacgaagaataaccatggccatattgtcactgtggcttcggcagctggacatgtctcggtccccttcttactggcttactgttcaagcaagtttgctgctgttggatttcataaaactttgacagatgaactggctgccttacaaataactggagtcaaaacaacatgtctgtgtcctaatttcgtaaacactggcttcatcaaaaatccaagtacaagtttgggacccactctggaacctgaggaagtggtaaacaggctgatgcatgggattctgactgagcagaagatgatttttattccatcttctatagcttttttaacaacattggaaaggatccttcctgagcgtttcctggcagttttaaaacgaaaaatcagtgttaagtttgatgcagttattggatataaaatgaaagcgcaataagcacctagttttctgaaaactgatttaccaggtttaggttgatgtcatctaatagtgccagaattttaatgtttgaacttctgttttttctaattatccccatttcttcaatatcatttttgaggctttggcagtcttcatttactaccacttgttctttagccaaaagctgattacatatgatataaacagagaaatacctttagaggtgactttaaggaaaatgaagaaaaagaaccaaaatgactttattaaaataatttccaagattatttgtggctcacctgaaggctttgcaaaatttgtaccataaccgtttatttaacatatatttttatttttgattgcacttaaattttgtataatttgtgtttctttttctgttctacataaaatcagaaacttcaagctctctaaataaaatgaaggactatatctagtggtatttcacaatgaatatcatgaactctcaatgggtaggtttcatcctacccattgccactctgtttcctgagagatacctcacattccaatgccaaacatttctgcacagggaagctagaggtggatacacgtgttgcaagtataaaagcatcactgggatttaaggagaattgagagaatgtacccacaaatggcagcaataataaatggatcacacttaaaaaaaaaacnnnnnnaaacaaaaaaaaaaaaaaaaaagggggggccctcacaaaagtatacccctacgagggggcccaaaggtaaacgaggaccccagtcttctcgtggcaccaacgggggccccacaatagggactcgcgattaaacagacaaggacacgggccggagctgtcataaacacggtcgtctgaccggggaaaaaccgggtaacccttgcgagacaccctcggagaaaagaggacccccataaacaaagccagagggggggcaccacacatggggggcaccaaagcgcagccccacacaagaaactcttaaaggcccccaaggggggaccatacagacaacttccacgaacgcgccctaata

SEQ ID NO: 510140 - DNA, 157 bp, Homo sapiens
tggtccggtcgttaacaaccgtcgctgactgtgagagtccacatagcaggtccacaaaaggtggctccgattcctccctttctgagccagggccaggtcagtccggccgcggtttcctgttcagaaagggaggaatcggagccacctttttgtgcca

SEQ ID NO: 510141 - DNA, 2074 bp, Homo sapiens
  misc_feature (1714)..(1719): n is a, c, g, or t
gaaggaacggtttcggagttgtttttctttgatacgggagttcctccttgctctcgcccctactctttctggtgttagatcgagcaaccctctaaaagcagtttagagtggtaaaaaaaaaaaaaaacacaccaaacgctcgcagccacaaaagggatgaaatttcttctggacatcctcctgcttctcccgttactgatcgtctgctccctagagtccttcgtgaagctttttattcctaagaggagaaaatcagtcaccggcgaaatcgtgctgattacaggagctgggcatggaattgggagactgactgcctatgaatttgctaaacttaaaagcaagctggttctctgggatataaataagcatggactggaggaaacagctgccaaatgcaagggactgggtgccaaggttcatacctttgtggtagactgcagcaaccgagaagatatttacagctctgcaaagaaggtgaaggcagaaattggagatgttagtattttagtaaataatgctggtgtagtctatacatcagatttgtttgctacacaagatcctcagattgaaaagacttttgaagttgactacaaaggcatttcttcctgcaatgacgaagaataaccatggccatattgtcactgtggcttcggcagctggacatgtctcggtccccttcttactggcttactgttcaagcaagtttgctgctgttggatttcataaaactttgacagatgaactggctgccttacaaataactggagtcaaaacaacatgtctgtgtcctaatttcgtaaacactggcttcatcaaaaatccaagtacaagtttgggacccactctggaacctgaggaagtggtaaacaggctgatgcatgggattctgactgagcagaagatgatttttattccatcttctatagcttttttaacaacattggaaaggatccttcctgagcgtttcctggcagttttaaaacgaaaaatcagtgttaagtttgatgcagttattggatataaaatgaaagcgcaataagcacctagttttctgaaaactgatttaccaggtttaggttgatgtcatctaatagtgccagaattttaatgtttgaacttctgttttttctaattatccccatttcttcaatatcatttttgaggctttggcagtcttcatttactaccacttgttctttagccaaaagctgattacatatgatataaacagagaaatacctttagaggtgactttaaggaaaatgaagaaaaagaaccaaaatgactttattaaaataatttccaagattatttgtggctcacctgaaggctttgcaaaatttgtaccataaccgtttatttaacatatatttttatttttgattgcacttaaattttgtataatttgtgtttctttttctgttctacataaaatcagaaacttcaagctctctaaataaaatgaaggactatatctagtggtatttcacaatgaatatcatgaactctcaatgggtaggtttcatcctacccattgccactctgtttcctgagagatacctcacattccaatgccaaacatttctgcacagggaagctagaggtggatacacgtgttgcaagtataaaagcatcactgggatttaaggagaattgagagaatgtacccacaaatggcagcaataataaatggatcacacttaaaaaaaaaacnnnnnnaaacaaaaaaaaaaaaaaaaaagggggggccctcacaaaagtatacccctacgagggggcccaaaggtaaacgaggaccccagtcttctcgtggcaccaacgggggccccacaatagggactcgcgattaaacagacaaggacacgggccggagctgtcataaacacggtcgtctgaccggggaaaaaccgggtaacccttgcgagacaccctcggagaaaagaggacccccataaacaaagccagagggggggcaccacacatggggggcaccaaagcgcagccccacacaagaaactcttaaaggcccccaaggggggaccatacagacaacttccacgaacgcgccctaata

SEQ ID NO: 510142 - DNA, 333 bp, Homo sapiens
agggctgtaaaaaatatttcacccaaacagaaatcaaaagtgtgcaagagtagctataataatattataccaaatagcctttaagttaaaaatatataaaaagagataaagaaagccattatataatgataagaggatcaattctgcgtgagggtataacagtagtaaatataaatgcactcagcactggagaatccagatatatagagcaaatattattagagctaaacagatagactccaatacagtactagctagggacttcagcaatctcactgtaagcactggaaagatcatctagagtgaaaatcagcaaagtaacataggacttac

SEQ ID NO: 510143 - DNA, 1545 bp, Homo sapiens
  misc_feature (20)..(20): n is a, c, g, or t
  misc_feature (23)..(23): n is a, c, g, or t
  misc_feature (50)..(50): n is a, c, g, or t
  misc_feature (1185)..(1190): n is a, c, g, or t
tggagataaagaaaggagtnggngaccatccgagtcatcgtctgtgattntataaagactacaaaggcatttcttcctgcaatgacgaagaataaccatggccatattgtcactgtggcttcggcagctggacatgtctcggtccccttcttactggcttactgttcaagcaagtttgctgctgttggatttcataaaactttgacagatgaactggctgccttacaaataactggagtcaaaacaacatgtctgtgtcctaatttcgtaaacactggcttcatcaaaaatccaagtacaagtttgggacccactctggaacctgaggaagtggtaaacaggctgatgcatgggattctgactgagcagaagatgatttttattccatcttctatagcttttttaacaacattggaaaggatccttcctgagcgtttcctggcagttttaaaacgaaaaatcagtgttaagtttgatgcagttattggatataaaatgaaagcgcaataagcacctagttttctgaaaactgatttaccaggtttaggttgatgtcatctaatagtgccagaattttaatgtttgaacttctgttttttctaattatccccatttcttcaatatcatttttgaggctttggcagtcttcatttactaccacttgttctttagccaaaagctgattacatatgatataaacagagaaatacctttagaggtgactttaaggaaaatgaagaaaaagaaccaaaatgactttattaaaataatttccaagattatttgtggctcacctgaaggctttgcaaaatttgtaccataaccgtttatttaacatatatttttatttttgattgcacttaaattttgtataatttgtgtttctttttctgttctacataaaatcagaaacttcaagctctctaaataaaatgaaggactatatctagtggtatttcacaatgaatatcatgaactctcaatgggtaggtttcatcctacccattgccactctgtttcctgagagatacctcacattccaatgccaaacatttctgcacagggaagctagaggtggatacacgtgttgcaagtataaaagcatcactgggatttaaggagaattgagagaatgtacccacaaatggcagcaataataaatggatcacacttaaaaaaaaaacnnnnnnaaacaaaaaaaaaaaaaaaaaagggggggccctcacaaaagtatacccctacgagggggcccaaaggtaaacgaggaccccagtcttctcgtggcaccaacgggggccccacaatagggactcgcgattaaacagacaaggacacgggccggagctgtcataaacacggtcgtctgaccggggaaaaaccgggtaacccttgcgagacaccctcggagaaaagaggacccccataaacaaagccagagggggggcaccacacatggggggcaccaaagcgcagccccacacaagaaactcttaaaggcccccaaggggggaccatacagacaacttccacgaacgcgccctaata

SEQ ID NO: 510144 - DNA, 87 bp, Homo sapiens
gcggccgcctactactactactgctcgaattcaagcttctaacgatgtacggggacatgaattgatgaagttttcaactgagttacc

SEQ ID NO: 510145 - DNA, 103 bp, Homo sapiens
caatacaagtcgaacttcacattcttccgtgacatcccagtgcaagtactcagcaaaatgagggccttgtttcctgagaaattctaagtgattgttccccgct

SEQ ID NO: 510146 - DNA, 412 bp, Homo sapiens
agatcgaggggacgaaccgcaggatgatgggagccgtggacgctgccatgacgggcctgaaccagcgggagctagcctatcagagcaatgtgctcggagcgagtcgacttaggggcgccgagatgacgatctctctgttgccgacagcaggcttagcgtacttgcagatcagtgcagcacactgcagagattcggcatgacgagagcgaaggaggaacccagggacactcgaggctatgtgaacaacccttatagcccttcggctgtgctcctgaagccagtgacaacatgttcgagttaactactgtagcgctcacaggtcccaggaccgatggcaggaccttagccctgagtgtggctagattccgtttggtgctcttacagtcaggtagactgtctgcctctgggccct

SEQ ID NO: 510147 - DNA, 298 bp, Homo sapiens
actgcatccaacgccgcgcagcaggaggggacgtgtggaatttttttttttggatggctggttttcctggaaaggtgcgtgggggggggcggggcgtggaagtgatgggtagctttttctagcctgaaagatgaagacctgggtaaaatatacgggatcattaagggggtacaaataaaaggagaccggccttaatgtagtagatgggaaacttcaataatttttttttcttctaaagagataggtagcatgtttccaacttagaagggtgaaggcgggggcgtgggatgcagtcggg

SEQ ID NO: 510148 - DNA, 194 bp, Homo sapiens
ggtaatgttgtactctgctgttgtctctctgtccagcggtttttgtgttaatagggtgtaaaagttttccccagaaagccttaggaagaacggctgatcgtcttggatggaacaagttatttttccattttttcctgaaaactaaatcacgacacggtttaaaactggcaccatttttttcccgtgaaattccg

SEQ ID NO: 510149 - DNA, 159 bp, Homo sapiens
gcctgggtgtctgctcggacactagaggatcccctatctgccggtgcctctactagtgaaccatgtttatttcagcttagcaaactctaaattgagggaaatatataatctagagaacacacagaaaaatatattcgcaaaaccagatagagaattatt

SEQ ID NO: 510150 - DNA, 497 bp, Homo sapiens
  misc_feature (401)..(401): n is a, c, g, or t
tctgcaggacctcgtactggcatttgggctgaatgattcttgtggtggggtggaagtagagggtgggagttcctgtgtgttggagatgttctgcagcatccctgactgtattagtctgttctcatgccactaataaagacatatgcaagcctgggtaatttatacagcaaagagatttaactgactcacaatttggcatggctgtggaggtctcaggaaacttacaatcatggtggaagggaaagcaaacatgtctttcttcaaacggcagcaggaaggagaggtgccaagcaaaggaggaaaagcatcgtataaaaccatcaaatcttgtgagaactcactccctaccatgaaaacatcatgggggtaactgcacacatgattcaatcacctcccactgngtccctcccatgacacgtggggattatgagaactacaactcaagatgagatttgggtggggacacagccgaaccctatcactaacccctacccacc

SEQ ID NO: 510151 - DNA, 101 bp, Homo sapiens
gccctaagtaccccatcagttttccgtgagatataaactcaccattagacctatgaatcaaatttatctttagcaccacttgcattagagagatgcttaat

SEQ ID NO: 510152 - DNA, 1077 bp, Homo sapiens
  misc_feature (10)..(10): n is a, c, g, or t
  misc_feature (15)..(15): n is a, c, g, or t
  misc_feature (19)..(19): n is a, c, g, or t
  misc_feature (25)..(25): n is a, c, g, or t
  misc_feature (79)..(79): n is a, c, g, or t
  misc_feature (151)..(152): n is a, c, g, or t
  misc_feature (178)..(178): n is a, c, g, or t
  misc_feature (205)..(205): n is a, c, g, or t
  misc_feature (234)..(234): n is a, c, g, or t
  misc_feature (322)..(322): n is a, c, g, or t
  misc_feature (346)..(346): n is a, c, g, or t
  misc_feature (776)..(776): n is a, c, g, or t
  misc_feature (809)..(809): n is a, c, g, or t
  misc_feature (1064)..(1064): n is a, c, g, or t
  misc_feature (1077)..(1077): n is a, c, g, or t
tagtttaagngattnttantgaatntaaaatattctaggtaattaaactttactttcgtttgtatactcaaccaatgtnatttagtatatgtatggatggtaatgtataaatttaaatatttaatagagttagttgaatgaggtgtaaggnnagaaaaaataaataacgaatagaganaaaagtcattggaagtatgtagatgangaaaatttacaaaacaaagaatatgatancacgaagatggtatggtgcggagtgagtgcccagaggtttccgagttctacttcgtcttcatttccattcttatttggtatgaagttntatgtgagttcacattatcattcngaatttggatagacgtgataccacatccgcattggttaatctaaatgaggaagagccccaccggtcgtccgagagccattttcggtcgacgcccagcgtcgtttctctctcctccgacctccctctcttcctgcctccgcggtcgtctctcacccgctgctatccgctctcgtgctgagatcaattatcaccatctatctcctcatctttttctcctcatactcgacctcctcccctctctttatcattatcttctcactctctcttcctcttctcatctctttcattaaccatccacctatgttttctagttccatgccactcattctcgtctataactctatacttcactatataaaatatactcgtcccacttattttccttcgtatgcccacgataatctagcatgtatgacagctccttccgcanccaatgatcgcgccaaaaaaacgctgcttcccncttttattaaatttcttatctctttactctactctgaaaagcctcaccgcgcctatgcatctctatcttcctttcttttcccccctatcatgtccaccaagtttaccacttctcactttctatcctattaccacctggtatgcacgtgttgttacacctacacaaccttcactattaatcgtcagatgtgtaccacctctacctataatctattatttacatcaatatatcgacacctataatgacatctgaggnccctgtaatcatn

SEQ ID NO: 510153 - DNA, 291 bp, Homo sapiens
ctatggcttttagttttacctgccttctggttttttttctgactctatgacatggcttctatttctctccctgtttttgtgtgttgtataccatggctttgttgtctgctcctggcctggtgtggtggctctttgcctgttatccctgctctttgggtggtcgctggtggttctcctgtggcctggtgttcttgttcttcctgggcttctttgtgtgacccctgtccctactagttttttaataattttgctggaactggttgcttgctcctgtgtcttggctacttgggt

SEQ ID NO: 510154 - DNA, 200 bp, Homo sapiens
tggcccgggtatagtcaagacgtctgtaggttcacagttggtctatcaaaataaaagctattcctatcgtggcaaacaaaacttggtatctggtacaaataccatatatatcaccagactcatgaactaccattctcatcgatgattagaggtgcatggaatactttatcatgccacataacatttctaatccgttctcc

SEQ ID NO: 510155 - DNA, 181 bp, Homo sapiens
  misc_feature (68)..(68): n is a, c, g, or t
  misc_feature (109)..(109): n is a, c, g, or t
  misc_feature (179)..(179): n is a, c, g, or t
gtccgatttccgcaaagagttctacgaggtggtccagagccagagggtccttctcttcgtggcctcgnacgtggatgctctgtgtgcgtgcaagacccttcaggccttnttccagtgtgaccacgtgcaatatacgatggttccagtttctgggtggcaagaccttgaaactgcatttntt

SEQ ID NO: 510156 - DNA, 418 bp, Homo sapiens
  misc_feature (218)..(218): n is a, c, g, or t
  misc_feature (230)..(230): n is a, c, g, or t
  misc_feature (257)..(257): n is a, c, g, or t
  misc_feature (259)..(259): n is a, c, g, or t
  misc_feature (308)..(308): n is a, c, g, or t
caagaggatccccttgttctgtttacattgaaaggctgtgttgcgagggtcacaatgagctccaggaggctgaggctgcagtgagccgatatcacaccaccgcactccagcctcggtaacagatgtgggacctatctcaaataaaaagaaagtggctagtctttgccacttttgtgcagaaaagtacagaaagcaagtttctttttgttcactgtttncttatgtaagcnagaaaatactctctttctgtctctttntntctttctgtctttctctctttctgtctctccatctttccgtctttcttnctctccgtctctccatctctactaaaaatacaaaaattggctgggcgtggtagcggacgcctgtaagcccagctacttgggaggctgaggcaggagaatctccagaacct

SEQ ID NO: 510157 - DNA, 1675 bp, Homo sapiens
  misc_feature (1395)..(1395): n is a, c, g, or t
cctgtattgttgagtgttgggctccagactacactcgtgttttggttgcttttgttgctccctcttttgtggtggtgtgtggatagatacacccccacttgcctgccgtttgttttgtggtgcggggctgcctccccctcgtgttgtggaattttgttttcttgtgtgtgggagtggtcgcccccccccacacacggtgggtggggttgggtgctcacactcaacataaatatattcctgcctgctgtgtcgtgtctgtgtttgttaattaatctgcgtgtcgtgtggctctccccccctcgtgtttgtttttttgttaccccgggcggcgttttccttataagtggggtgtttctatgacgtctccttcttcttttggtgtggggtgttgcgacaatatattttttttggcgcccccctcttattcgggggggggcctaccctcctcttgtgtgttccgcatctaggatgttccttatcactcactgtgtttgttctggcggtctgtgttggtgttattaattttgtgttttggttggtccactcttctttctgctgtgtgttgtgcgcgcgtggtggtggtgttctgctccgcctgcgcacacacccacgcggggtgtgggttcaccctacaaccctctccgcgctggtgttgtgtggtgctgcggtggtagggtgttgtgtcgcagcagaagatagttttgttgtgtaggagtatgtgtcggcgctcacgtcgtggttgagagagtataagtcctcccctgcgcggtgttctcccgcttcttcgggaggtaattattctccccctgcgcgcgctgtgctgcctccaggttacacctcgcgtggtgtgtgctctccccgggagttctctcctctctccgcgcgcgcgtgtgtgtgtgtgatgtagagagagcgcgcgcgcggctgcgccctccctctcctccttgttgtgctgctgccctcctggtgggtccacttctctcgcccccttcctctctgtgtgtcctctgtgtgtgtgtgtgtgtgtgactgttgtgtgtgtgttgtgtgtctctgtgtgtgtgactctctgtgtgtgatgagagagagacctcacacacagagagtgtggtgagtctcacacactgtgtgtgagaagagagcgcgctgtgtgtgtgctccccgctgtgtcaccgctctctcacagtagatgtgtgctgctgtctctccccacaagggctccccgccgctccctctctgtgtgtctccactgcgctgtgtgtgtgtgtgtgtgtgtgtgtgtgcgcgcgctctctcacgcgagagagaagagatataatacactctgtctcacactgcgtgtgtggtgaagaagagaagataaaggtggtgggtgagatacatatatgtgggggnggggggagaccacaccacgcgtaataggtgtgtaggtgagggagagaacacacacccacacgggggccccaccagcaagggtgtgctcctccacacagcgcgcggagtaagaccacacgctgtgtgatacacaccacacgacgacccccctgtgtgtgtgtgtgtgtgtgtgtgtgtctcacagagggatgtgtgtgtatatgtgtgtgtggagaaaccccccagtgtgtgtgttttaatatatccccaaatataaaggtgtgtgtaaaccgtgtttata

SEQ ID NO: 510158 - DNA, 885 bp, Homo sapiens
ggtttgtgttatatcctcccccccctcctttgggggccggccgctattatagaaagggcgtttgtccgatctatgtttgggtgttttcgtcttttcttgttagagcgagatccaccccgccctcgggtcgagacacgcatgttgggtgcacactcgtgcccacgcaagagagaggtggtttggtcccacaagagagatattactcgcgctcgccgcgctgctatgtatggtgctgctatatgttcctcacgcagggtggtattatctgtcggacaatatatttgtgttttatataggggcggagctgctccccccagctagttctccgctgagaggtgttttatagaagaacccatcatatataagtaggggttgcaccacacccactgtttgtattgttgaaaagagagatactctctctggaatattaccacctctcttttttgttgtatagatatcgagcaataattttcttggagaatcaactgtgtgcgtgtttttggtgtagacaagtacagtcagataatacgtcggcggagtatagtgcagtcccggggctcttataacacaccacacccctcttttatcactctatgtatagagagagagagagaacaatatatcatcactcattattttcccccctattgagaggcgcacatagactcactctttttattttattcaacgaaaggttgttcttcaccacactgttttttccgcataatttgtgaatgcttccttataataaatacggcggtttccccacaccaaacaacccaaagtaggaggttctccgggggccccccactgaaatcatatttccccttttttttttttccacagcgctaaaaacacattaaacccaatttttccatttaaata

SEQ ID NO: 510159 - DNA, 290 bp, Homo sapiens
gtcgtatgtgcaccccccttggtgtcctattaacgcagcaacaatattggggctcctcttctcgcggcgagaaaaatatcctcccaggattattgtcctcacagagcgccaaattcttccgaaagaggactattccaccacaaaaagctcctttttggtgaaaacccgctcccccgtgggggcacagatgttctccaaccaggacgatggtcgacaaaccacggggagggggccttcacacaccgctgggggtgagctctgcgggaacttatttctgtggtgggaacccc

SEQ ID NO: 510160 - DNA, 299 bp, Homo sapiens
  misc_feature (236)..(236): n is a, c, g, or t
ggcagtgcaacgcgtgacatacctgcaagctgactcctagagtatccccccgcggctacgtcttacgggtcagcactagccaggacagcttccgggaacttggcttgctgtgcacttccttgggcagatccacacttagggtcctttcagactgctccatgagggctctcgtcacctgggctgtcagagccagagtatgcagccagaacatcccctctccatgcgctcagacactntaccgcggtgggtaccgaggctcgaccttcgtaaatcttggctcactagctattctcctgctg

SEQ ID NO: 510161 - DNA, 304 bp, Homo sapiens
acgccacgcccgggtcgagcgaccctccggcctcagcctcccaagtagcggaattacaggcacgcgtaccacgcccagccaatttttggtattttcaatagagacgtggtttcaccatactggtcaggcgggtctcaaactcctgacctcaaatgatcccccaactcaggctcccaaagcacggggattacaggcgtcagccacctcaccgggcccgggccactttgtgtgtgtgtgtgtgcgtgtgtgtgtgtgtatgcttgaaacaaggactgaatctgttgcccaggctgggcgtgcgtgg

SEQ ID NO: 510162 - DNA, 1091 bp, Homo sapiens
ggggtgcggtggctcaagcctgtaatcccggcactttaggaggccaaggcgggctgggccatctgaggtcagggcgttcgaaaccagcctggccaacatggtgaaaccccgtctctatggcaaaatacaacaatcagccagcgcgctgcctggcacatgcctgtcactctcagcatactcaggaggctgacagcaagcgcagaatcgcttgcaacctgggaggcagcacggtctacacgcgagccaaacatcgcaccactggcactccagccctgggcaaccaacgacgtgaaactccgctcaaacacaccacacacaccaccccccaccacacacaccacacccacaccatcccccccggccaccaggcgccccgcgccgcacaaacgccccactacacaacacaaacacgaacaggcccccaccggcccccacacacgcccacggccgccccggcggcaccaacgccagcccccccgaggcgacacccccggcccaccacccaacatacactcacctcacaactatctcccccccacaatataaaaacaccacactccatcgcccaccacaatctcattacccattacttccaccacacccttctcccacaacttcccctctctaatcacctacaataacaagccgaacaccacatacacacccagagtacccccaaccgccacgcccacaacaacccaaacaccaaaaccccaccacgaccggggcacacccaccgcccacccagccaccgcgaccacccaccacccacacgcaacacacacacctcacacaccccacaccccacccaccacccaaacacacgcatctacccacaccacgtcccttcccccactcccaacccatcactatcctctaccatcccaaaacacatccccccccacactccaacaaccgtgggcgcaagcggcagggacaacgcaagagccccgcacccccacaccgcgccctgacccgcccccccagcgcccacacaccccccctcccgccgcccaccacagcggacaccccccaaccgcccacaccccacgcacccaccgcgccgcccgggcgccccccgagcccccacc

SEQ ID NO: 510163 - DNA, 402 bp, Homo sapiens
ttatcagtggatggagaatatatgcactgtgtacagtccagatggcctcgaattgtaggatgcgctagaggaccaaccggtgatcctgcctgtgtggttttgacctgcacgcattcagcggccaggacgtagttcagtatctgacgtctttgtcgttgtgtctagggtgtctgtttgcttgctgtatattcactgagcacagcgggcttctccactggcacagggcacgcctgggcctgtgccctccctgccccgctgggtcagtggttgacgtcaggatatctgtcactgggcatctaactgggtggggcgggctggtgtgctcagcgtctgtctgtccactttctcccatgcttgttctctggaaggttccctgtcctgcgcccagcctgcaggacccca

SEQ ID NO: 510164 - DNA, 215 bp, Homo sapiens
  misc_feature (3)..(3): n is a, c, g, or t
ggncgactctagttgatcccccaaacaccgcaatctggacctggatagcatcatcgctgaggtcaaggcccaatatgaggagattgctcagaggagcagggctgagggtgagtcttggtaccagacaaagtacgaggagctgcaggtcacagcaggcagacatggggacgacctgcgcaacaccaagcaggagattgcggagattgcggtgtttg

SEQ ID NO: 510165 - DNA, 389 bp, Homo sapiens
aattatgaatctaaattcatttaaagaccatataattttctaatatgccaactatatttattagtcccagtatgaaatgaggaattggatgggctgagcaggtaaaaacctttgataaaaagccctattcttaccatttggacctggaccattgtgacaaggttttaatttctctcaggatctacttcaccttttaaaaaatcccacctaatggtattttataaaaatgaaactctttttaaatgtttgacatgtatatattagaactagagtagttgccaaaataataataaaatgtccatgctttaaactctatacttcataatattggcttagccaattttcttttttcagtgtaatggatccctggcagcttaaccaattattga

SEQ ID NO: 510166 - DNA, 449 bp, Homo sapiens
tctttgaaatattaagcattttgatttctcgaaaaggtgtaaaagatcttacttttagaatagtacaatgaatgaatggccagtaaaatttgccaatactcctggtaagagaatacgcagtgaagtacaaaagaaatccacacgtcggttatgatacaaaacacgagggtgtgaaataaagtgatcaatttgggacttgtttgttcgtgtggtggtaaactgtgttacaccaattttgccctttctcagtgaaaagagttaccaccgagaacgaaggtgtccctcaagattacaaaaagaaatgggcgtatcggcgggctattcttcgaagaacctttgactatgttgtgggtattaatccttgtgccgcaccagttatgttttaaagcgccgtggaccgtggaggaatctctagaacctcaaaagaggctctaggtgtggtttgtaca

SEQ ID NO: 510167 - DNA, 395 bp, Homo sapiens
  misc_feature (7)..(7): n is a, c, g, or t
gattttncatacttaaaactaccccaaactgctggggttacaggcgtgagccaccacacctggctaccctttcagttttaagccataataaaaattacatgaaattgggctgggcacgatggctcgctcctgttatcccagtgctttgggaggctgaggcaagaggatcacttgaggccaggagttccagaccagcctgggtaatgtagcgagaccctgtctctacaagaagataaaaaaattagctgggtgtcgtggtgcgtgcctgtgatcctagctactcaggtggcggaggtgagaggattgcccgaacccgggagtcaaaagctgcagtgagctactgtgatcatgcctctctactccagcctgggcaatagggtaagatcctgtctctg

SEQ ID NO: 510168 - DNA, 123 bp, Homo sapiens
cggaatcctgccagatgacgcttcatgcggcgcagtccagcgtgcctgctgcgcagtcaaggaggcaggcataagggagcagtgcgtcctttctgaagaacagatccggaagaagaaaatgat

SEQ ID NO: 510169 - DNA, 326 bp, Homo sapiens
gagacagctacaaacaagagagaccgatcaccccaccgctactctcagacggtggctcacacgagggagaccgaggaccccacgggctactctccgacggcggctcacacgagggagaccgaggaccccaccgctactctccgacgtcggctcacacgagggagaccgaggaccccaccgctactctccgacgtcggctcacacgagggagaccgaggaccccaccgctactctccgaggtcggctcacacgagggagaccgaggaccccaccgctactctccgatgttggctcacacgagggagaccgaggaccccaccgctact

SEQ ID NO: 510170 - DNA, 598 bp, Homo sapiens
  misc_feature (235)..(235): n is a, c, g, or t
  misc_feature (237)..(237): n is a, c, g, or t
gctcgaccgttccgccggatacgcgccctcctcctgtggataactcaacacaccacgcagcgtaccgatcggcagatacggcttctgcggcaggaacaaataacgctcggccggcaaacgaatgttgccatggccgtttggcacaaattgcccatggccctcagcaaggttgatttgccgctgccggaacgaccgctgagcatcaggcgctcaccttcggcaaccgtcagttgcncncgttcgagcagatgacgaccatccgccagatccaggctgaggttgttcacctgcaaaccgccgccctggcctggcaactcgatgcccatgttgcggccttcgttttcttccatcgcctcgccgaagctcagcagacgatcacaggtcgcacgccagctggccaacacggtgtacgcgtcgacaaaccaactgaggctgccctgcacactgccataagcctggggcacttgcatcagtacgcccaattcgatcttgccggaaaagtaacgcggcgctgccaccacaaacgggaagatgatcgcgatctgcgagtaaccgctggtaaagaaattcaggggttcttgagctgcatgatgctcca

SEQ ID NO: 510171 - DNA, 113 bp, Homo sapiens
ggctctatcaatgtgtggtatggtggaggggcatcatatgtcactccaggtatatggatgggttcgttctactattaggacttttcgcttcgcgtaacacgataatccgacgg

SEQ ID NO: 510172 - DNA, 532 bp, Homo sapiens
tagattttgggggatctagattctagtttagacatcactgcttactgtaagatttaagtcccattatttatttttcagtttcctaaattataacaataggcatagctgctacacctgcctcacatgaaagtgcttttttttaatgttaattttaattttatttttgagacagggttttgctcttgtcactccagtctgtgcgacagagcgagactccatctaaaaagaaaaaaacaaaaaaaaaagaaaaataatacatttatatagaattacctacaggtgtgttaaataaaaacacttcatacctagattttgggggatctagattctagtttagacatcactgcttactgtaagatttaagtcccattatttatttttcagtttcctaaattataacaataggcatagctgctacacctgcctcacatgaaagtgcttttttttaatgttaattttaattttatttttgagacagggttttgctccagtctgtgcgacagagcgagactccatctaaaaagaaaagaac

SEQ ID NO: 510173 - DNA, 1558 bp, Homo sapiens
gaattccggaacgttgaagcacaagactttgcggccattatgaatgaccccgttggtcaccatttgcagtatacgcagtggttccaacttgctaaacaagtcaaccaaacgttgtttgacttacgttcgtcggctggaattattttcccagctgaccagaaagaaatgtaatttatgccaattaaaccagcgctacaagcgcaatttgaacaacaatttaaagcccaaacacccattcaagctgctgtttgggagaagttagcgcagggcgacaatattttcggcctagcgccaactggaacagggaaaacgttagcttttttgctgccaattcttagccgaattgatcccaaagttaagcagacacaagtcttgattttggcgccaagtcaagaactcgccatgcaaacgactgctgttgcacgggaatggggcgctttggtcgatgtctcggtgacgagtttgattggtggtgccaatggccgccgtcaagcagataaactcaaaaaagataagccacatattgtggtggggacattaggtcgtgtattgacaatgcttgatggtggcgccctaaaacttaatggcttgcaaaccgttattttcgatgaagcagacgctatgttgtcagatgaacggcgtgacagtttgcaagcattagcagcgcaattaccaacagacgttcaacttggcctgttttcagcaacttctggggttgatttgaaatatgtcgccgacacttttggccaagaagtccgacccgtatcagttggcacggatgcgccagcagcgattacgcatgaatttcaatatgttgaccaaaaggccaaggctagtttgttgattcaactagcccgtaataagcaacaagctttggtgttctttaatacgattagtggcttggttaatatgcaggcgacgctacgtcacgcgcatgctagtgtgatgagtattggcagcaatgacaagcgacaagtgcagcgtgcagatgcgttacgtttattcaaaaaaggcgaagtatcgctgcttttggtgacagatgtcgccgcacgtggcttggatattgaagatctaccattagtcgtgaacgcacagttaccacaacggaaaaaaacatatattcatcgcgctggccgtacaggacgaatgggtaaaccaggccgcgtgttaaacttgggtaatgaccatgatattcgtgatttgaaacgcgaattaggggatgattttgttttggtgaaagccgctaatacgtttgccgatgcgaagcaggcgacaccgcaaaaaagtaccgctgcggtcaaggctgcacgcgcaactgcgccaactgatcaggcaggacaccaagcgtcgggccaagcggccaaaccagtgacgcaacgtccgacaactcaggcgaagacagtaccggttgttgaaaagcctaagaagaaaaaacgcttaaaggcatccaaagataagggaaagccaaaatgggctaaaaagtcggccgagtaagccacatatcaaaagggtcacagctaatcatcaagctgtgacccttttttaatatccggaattc

SEQ ID NO: 510174 - DNA, 1601 bp, Homo sapiens
gagcagttcggcggtcccgcgggtctgtctctatgcttcaacagtgtatggacggaacagatctcggggtactctcttccacgcctctcgaaccagtcccttccgatttactctcgtcctgccttagtaaccgtcctgggacctatcttctcggctcatcatccctgctctcatggtgcactctgtcacaggtactcgttatcgccgtggttaagcttcccattctttgccagaccaaccatgcagctcccaagattcgtcagcacatttatttcgcactcgacagttgggatgagccagctcgttcaaacaggtccctgggtccagagtttgtaacccatgtcaagggccctcccattcaaccttaaccttctttcttcgtggggctatcttagttacgaacccggcgattgaattgtctggctctgtgaccaggggcgcttgaggaccctacttgttcctatcctccgactgaaacaatttgcgtgcagcacgccgcagtaacaaggctgtccggaaggggaagcctaaacgcgaaggcaggctctttccgcaatgcatacgaacttgcacagcaagatagccacagacaggctcggcgccggtgacgcctgaccgtccatcccttcatattccccaaggtggacccaccttccaacagaacacagctccacagccactggtataatgcaattagcacacgttgggcgcgagcttatacacaagcgcgcgcaccaatgcacaactcgggcaccatccatgcgatagaccggcctaggcacctagtaggggtccccccttgcgcgacagcaacaccgaatatggccttggaagaatccacacggtgcgcccccagtattctttagggggaacttcacattgtaccaacgtaggccccccacttgaagcgttgtccttcggaccaccggatgacaggggacgaccctcaacacaacttcattacgttgggtaggaaaccatggttccccttggggaagcaaccctacgacacggtttccgccgctcaagacacctgacacgcggaaaactgtcactgcaaagagggccatctacattcggaacgcaaatacggacaattgtgtgtcgtgataacccccaacccttgtggaagcccacactcactctgtcgcccaaccatcaggcacctggcgcgctagggactccaccggagccagcgtcattggcgtcgcctgcgcagccgtgacagtaatcactccctccatctcgcgcgacagcacggcggccctaccaatctcccatcgccaaacgcccaccggcaacgctttaacagcaaaggcccctctgcatttgaatcgaccccacagtcacggcacgcttcctggacagggtggtccccacgttgtgcctaaaaagcgtacaacttaccggggcatgttcccggccgatgtaaagacccttgagttcgactgttcacactgccccacaccataggggcaacgccttatgtcgtctgacacctgtagtcccgtacacacacgctcgtattggtcatcaccaccagtgtgcgcaatcacaacaggctcgttcttattcgaatgtcacacaaccactacgcgcat

SEQ ID NO: 510175 - DNA, 241 bp, Homo sapiens
gtgggttgaccgtggcttgtagggttgaccgtggcttcggtcgctggctcgggtccagcccagcctccagcatactcctccagcacctgtaacgtaggctacttaccacttgcctagagggctagtaggcctccttagctgacccagggccggctacaacactagagcctagggctatccgggcaaggcctactcggtaggccaaaacaccaaccaggtacccaacaactatcaggccact

SEQ ID NO: 510176 - DNA, 568 bp, Homo sapiens
gtatcaacgcagagtggcattatggccgggggggggcaaaaaaaaaaaaaaaaaaaaaaaaaaaaaacttttttgggccccctggcctcgaaaaaattttctaaaaaccaacctacgtgggggggcgaccggaccccagaaaggattaaagtgccaaacgtgggcccaaaaggagtgtagtcccaacgagacaaaacctcgtgggacacgtcaccaccagcgtgcgtgtgagatacccctgcacccagaataaaaaaacgcccccgcgggaaacaaccgcgaggcggttccgtgagacaacaaagccccacaagatggagcagccaaaggaggagcaaactcaaggggggtcttcaatcacaaaaggggggaggcacaacacgcaaggaggcgagatatacacaaaagatgacagcgcccgcgaactggtgatgaagcaacaagacagaacaccacagagtacacaaacacgacgacaaagtcaaccgaagaacacgaaacaggaaacaagcagaaacagcaaggacgacagaaagacgagcatacaaaggacaagagaacgagaaag

SEQ ID NO: 510177 - DNA, 855 bp, Homo sapiens
atcccagcactttgagaggctgaggtgggcggatcacgaggtcaggagattgagaccatcctgcctaacatggtgaaaccccatctctactaaaaatacaaaaaattagccaggcatggtgtgggtgcctgtagtcccagctactcgggaggctgaggcaggagaatggcgtgaacccaggaggcggagcttgcgtgagcggagatcacaccactgcatccagcctgggtgacacagcaagactccgtctcaaaaaatactactaaacatttaacaataaataaataaataaattacccagtctcaggtgtatctttataccagtgtgagaacacgactaatacagaaaattgctaccaggaatggggtattgctataaagttacctgacacatgtggaacgcaccttcggcactgggtaacggggtaacgggtagaggctgcaatagttggagggctcaggaagaagataggacgatgagggaccgttcgccacttcctagcagactcgtcgccctggtcgtgaccaaaaatgctgatagtgatatgggacagcgaactccaggctgaggtggtctcagacggagatcaggacttcattgggcccggagtaaaggtcactcccgctacgcttaccaacgagacctgtcagcctttgtgccccctcccggggatctgccgaacctcgcactgccagcgatgccttcgcgatcgccgcaacatcctacacgcaggcctcacaggcgccggctctccgcatggctctaccgacgacgacttctgacgggccactacagcgcccacccccccgcggcccgccccccgccccgccgccccgccgcacccggcgcctccc

SEQ ID NO: 510178 - DNA, 1209 bp, Homo sapiens
gtgtcgtcagattgttctcattagtatgcgctgtggctcttttactccgcctatgttttgtgtcgtctctctctatactgctcctctttctaccttgtgttcgcctctgcccgcggccgttgtgggtcccgcgaccctttgggtcagtgtcctagcttctttcgttgcactgtctttgggttctgtctggccatctcggctccgcgcgtctggagttcctcttgggtttcactgatctttgttgcataacgcttcctggagctcactctgatctcccgggatttggacagtattgggatccccggctgatagctctggctttttggttggtggcattggcctgtcttcatgcggttttgcctctgtcgcgcacggtgtatatttgcggtcctgtcttgtgtcgagggttgtctttgccccgttctgcgtccctttccttttgtggcgctgtatgcgcccttcggcgcttcgtgtacgctattttccttcattccatggcgcatcgcctcggtctctgtattggtggtccttgtgcctttggatgcctgtggatggcaagtcctcggtccgtcctgtgccccctctgctcctcagccctccattgcttcatctgctccgggcagaatctgtgtggcccctgcctgtgccagccattgggctctgggatggactccctgggccccacccatttgccaagtccaggaatggcagctttcgcttgttcctgcctcgggacagccccgggtttcctccagcatgcctgatgtgtcccctctccccagcttcagaggccagcccagctcagcaccatccggcctggccttgcctgcagagctattaaatctataaccactagtctcgacaccagtctgcagtaccaggtcgtgtggagccgcctcccggcttcggggaggtccctcggtggctgggaacgcctgtgccttcgctgcgctcgaagccaacgccccctctgtccttcgcctggccctgtctgccgatccaggagctgcccagctctgtgggtcggtctggccttccctccttcgctccttttttatattagtgattttaaaggggactcttcagggacttgtgtactggttatgaggggtgccagaggcactaggacttgcggtggggagtcccgtgttctattataatgccaccccatataatagagccactgctcgtttttttctgggttgtttt

SEQ ID NO: 510179 - DNA, 567 bp, Homo sapiens
  misc_feature (544)..(545): n is a, c, g, or t
ctaggaacagtgtcatgaaatctgggttgaagcagaatacagtatatatgagaacacttaaagttcaaatagaaatcatttctgaagacaaaagcagaggaatattgtcagtgccaagtaatggaagaataagggcggcatttacactgtgcaagtattgagaagagtgcataaagacagggaactactctcatggagacagtttctctcttataatcaagtaactagaaggggaaaaatcatctaagttatgaaatccaacataggcgctatattacaaactgtgccggattatgcaaattgtagttgttactgatcaaagtttaattgcttcattctttgtttaaaaagcggatactgagtgtcagcaaaatcctgtaaatatgttttattccacaaaagatggtaagataatggtatacacgactctggtaatgtgagtggggatggcgaaaatattttaaattctctaagtggttgttttttttttgtaaacgaaagaaactccacatgtctctataccgaaagaaaatggaataaatannaaatacgaatatggcccatgaa

SEQ ID NO: 510180 - DNA, 457 bp, Homo sapiens
  misc_feature (118)..(118): n is a, c, g, or t
aacagccccagctcctgtgctggcctcttcattgcttcacacatcgggtttgactggcccggggtctgggtccacctggacatcgctgctccagtgcatgctggcgagcgagcacagntttggggtggctctcctactggctctttttggccgtgctccgaggacccgctgctgaacctggtatccccgctggactgtgaggtggatgcccaggaaggcgacaacatggggcgtgactccaagagacggaggctcgtgtgagggctacttcccagctggtgacacagggttccttacctcattttgcactgactgattttaagcaattgaaagattaactaactcttaagatgagtttggcttctccttccgtgcccagtggtgacaggagtgagccattcttctcttagaagcagcttaggggcttggtggggtctggagaaaattgtcacagact

SEQ ID NO: 510181 - DNA, 832 bp, Homo sapiens
  misc_feature (189)..(189): n is a, c, g, or t
  misc_feature (237)..(237): n is a, c, g, or t
  misc_feature (282)..(282): n is a, c, g, or t
  misc_feature (407)..(407): n is a, c, g, or t
  misc_feature (658)..(658): n is a, c, g, or t
gcttcaactcttatatactaagtctgcgactgacatactatgcgtatgtcattgtgcgcgccgtcactgtaggctgcgtacgtccgtaccgtcctggctgcttatcgtcctccgtgtagtacggacgcccggatgctgcgtggccaagcaccaagcctgaccatatctgagcgctcatacgtatcgaanacttgtactgaggcgcatctcctgcggtctcctagccacgcatggcgncttcgcatacgtgaattcctctagtctgcacgtagtgtatcatancctgcactcgagtatatactggagagccatctagagaaaacatgaaacgtaagttgcgccgctacactaacacgagatgcctgcgcacgtgaataagtgatcattgtatcggacccgtctgtganaactaactagtgacgacttttcctagcacatcatatactcatcacactcatacggcctttacgtacgcatgcgtcgtctgtattgatttatcagttgtgggtggtcgcccatcaatgtgtaacggtggtttggaagcaatgtacgtgaccacgtccccgggttgaacccaagtgtgtaaactgactaccgcagcaccctgaggaactcgtgcgcgtgtggtagccattagaactcgattgctttgcgtccntgtgaacaccgttagctagggttgttctcccgtcataatgcttaagtgggggcacatcgaacttcttcggatcactagatcgatatttgattcaataaataggaaacaccctctgaagcattaacctcccaagtgaaccagataactgtcctcccatccattgcgtttctagat

SEQ ID NO: 510182 - DNA, 438 bp, Homo sapiens
cacagtcctggaagggacactcatcattttatattcataatttggtgttcttttaaaaaagaggttcacacattacctatgctttagaccctgcaacacctcgctgtgctccacttggcatgtatagctcctttatgcaaatttcacaacatggccaggcatggtcactcacgcctgcaatcccagcactttgggaggccaaggtgggtggatcagttgagctcaggactttgagaccagcctgggcaacatggtgaaaccctgtctgtacaaaaaatacaaaagttagccaggcatgatggtgtaggcctgtagtcccagctatttaaggggctgaggcaggagggtcgcttgggcccggaaggcaaaggttgcagtgagctgagataatcgtgccactgtactgcagcctgggcaaaagaacgagaccctgtatca

SEQ ID NO: 510183 - DNA, 1483 bp, Homo sapiens
  misc_feature (106)..(106): n is a, c, g, or t
tcacccaaacaaattaaacacaacaacatgcaacattcaactccagcaaccagcacaactcatgtggcacaattgcaatcaaccatgacttgtgcaatgcactccntgtggtcaaatcactgcaacattacaggccatcagcatccaagcacacattcatcttgcacacactcacatcaagcacatcaacagcacaccaagttgtcacccagcacatcttcttgcggcatgctcagctcaaaagcacagtgttcgaagcaccagcacacattcaatcagcaactacacatgccccaccatcgaccaaaaagcgtagcacacagcatcttcaacagattcacaccaaccatccaccacacgtcaacacatcagcagcaaaccgcaagaaacagaaaacccccaaacagcttaagccagcaatcaccacagcaaacatcaagcatctagcagccagcaaaatccaaggcagcaccaagcagcacaataaaaacacattctttccacaacacatattaaacaaatattccaggcaggccgtaggtatttatgcagacaacaatacatatcaatccagactggctcaacatcagcacatcaatcaccagcaaggcaccacagcagcagccaagcaatcccaaacaacaattccagcaccacatcgactcacacagggggcgacttcatccaacccaagttgaatccccccacaaggcaatatttcacaacggccacagccaactcccggaagacacttatttattacaaacaaccttacttctggcaacaattacaaatacaggaaaaaactctaaggacaaaaactgacgacattccaacttttcctgggacaaccattacaagccccgttcctataaggggatgaaaaacccaggggcaaggaccccatgggcactcccgtgtgaaattaggagccacacgaaacggcacatttccgtgaacacttcgaccgccaggcaaaaatacaggtctacaccaaaaacaagaacagaagcacacaacatataaaaacaccacagacacacacgacaaaaaaaatatccagaagtaatccccaccgagcatgataaaacaaacgcgcggcgacaacatcatccgcgcacaatttctcacaaaatgtaaaacaggaggcacaccgcaaaaaatactaaagacgaccacactcaacagacaacaaggcgggagaagcatagagacaccaacaacacggcggcaagagagacaaagaaaacacaccaacagagaggcgagatacaataaatgcagctacaaaaggttgaccaaacgcgacagatcaaacaaaatctaaaatgacagaaactaataacgacgaaaacagacatcaagagtgagcacattccatgccgcacccctaccacttctatacgacaatataggagaagatgaaaattaatatatgaagtaacaagcaaactaaaagacgacaaaagagagacgacagatt

SEQ ID NO: 510184 - DNA, 203 bp, Homo sapiens
gtgtgaggggtagttcctaggcttagggtcatagctatccgcgtgtgttaacaaaagtggagtctgtaactaaagagggtacccgaggatgtgaacagttttatgttcgtcaggacattggaattgcattcgtgtcttgacccgatcacatttcatcacgactgccaacttcagtactctcccactgcaaccccgtaacacgg

SEQ ID NO: 510185 - DNA, 324 bp, Homo sapiens
gagagctttctgcatgtatctatccaacatacgaagggcctggtcgctattttaatacttttttctaaagacaaggtcttgctctatcacacaggctggagtatggtggcacaatcatagctcactgcagcctcaacttcctgggcttaagtcatcttctcaccgcagcctctcgagtacctgggactagcggatatgtgccaccacacacctagctaatttttctattttttttgtagagaggaagtctcactatgttgcataggctggtctctaactcctggggtcaagtgatcttcctgccttggcctcccaaagtgctgg

SEQ ID NO: 510186 - DNA, 1654 bp, Homo sapiens
tgtgggtggtaacagtgttttatggatgatgatgtccagggttcttgttgaagcctggggggggaggggcacaaagcgcgaagaagtgggggcgtaagggaaatgtcttgaagaggttgtctcgcggtgatagtgtgcgggtgcggaagccttccagaactaagggcgaagggcagggttggaggcctgcgggacaacacagcgcgggcgccccgagtccaccgcgtggccacagattagtgggaggtggcgtgtcgcggtgccctcgtggcgttcagggactatctgtgtcccagaggtgtggtctccaacatctcacagcgcacaacatctcgcgccagcgcgagatatctccagagggcgcgtgtctccacaacatatctccacaaccacagtgtggcatatgtgaatctataaggtgcgcacatatttaaatattcacaaaagagggtgaagcggggggggacaaaaccagagagctcgcgggggagagaggtcttgagaaatattctctctccgagaaacaaagagggaaaagaagcgagtgaaaagagctcctctaagtaaaacacacagagaaagaactcgagaaagagggtgtgttggcacaacatagcagagaaatacacagagacgcgggagagagtgtgcgcgtgcgggggaaagcggggcagtctcaaactcgcgcgggcgtgtgatgcgggaaagcctcttcacagccccccgtgggcgcaagtgacaagtgtgtggggggtggcgcgtggggggtgggtcctcccacacgcgcggtgcttccgcgcgcgcgtccacggggggggtggtgttgtgggccccccgttgtgcacactacactagttgcggaaagttttcctccacgcggggtgtgatccgacgtggatgtgtggggtttgaactatgacgagtgtctccgccagctgtgccgttgttactcccccgaaaagttgggggggatgcacttcctatgtgggggaacggactgtcgtcgtggcggcgcccattgacacaactgaaaaggggcctcctgtggcggatctcccacctacctgtgcggcgctactctcaacaccccttctttcccgcaaggaacaacgcgcccgagaaatattacccccggtggtaccgcactacacaggggtactccacgtgctgccaccacacgaggtgggtgggctatttgatttacaccaagcgggtctgggccgacgcgcaatataacttttcactacatttactcacgccccaacacgggccacaacaaaaggggaggtatacagaggcgagtgccaccacggcagtactctccccaagaggggcgcccccaacggcgtcgttgtacacagcagtggtggtaggacacgacacccccaacaatttccccattaaccaacgagggaagggggaggaggagaacgtacgcggcggaggaacacccccaaagtatgggtgggacagccccacataatgggttgttggccccagacacacccccgggtggggagggacgacggcgtactacatagcgcacagaacagagcacccccagggcatttctgtggtgcagcgacacgacggccccacacaccaaccgcccataaagcgtcgtctcatcacatcaaggagccatgatccaatg

SEQ ID NO: 510187 - DNA, 162 bp, Homo sapiens
aacctgggacgaatattcataaccagttgtaaagtagaacataacaggttatggcaagcagcatcaccaccactcatcatcaccatcatcatcactatcaacaccaccaccatcagcagcatcatcaccatcatcatcatcaccaccaccatcatcaacatc

SEQ ID NO: 510188 - DNA, 402 bp, Homo sapiens
gaactcctgagcgtcaggtgatccactcgcggccatcggactcccaaagtgctggagattacaggctatgagcccccgtgcccatgcatcaaaatgctttttattgtctgcactatgttggaagtactcttttacacatttaaaaaaaatgatctgtttatgaagtgcaaagatgtgtcaatatcttggagaactttcaatgaaacgcgccaaaacaacacaaatgggtcaaacaacgggcaagttcgagaaaacttatgagaaatctaagggtacttcgggcgaacgtggaagcactggcaagcgtaagtttgcaattaagagttcagcaagagcgtttgtgatactctgttctggtatattacagttgttgtgtgatcttttagagaacaaagcgaacta

SEQ ID NO: 510189 - DNA, 152 bp, Homo sapiens
cttaatcggcagtcacaccataggaagagaatgggctgtccctctgaggtgtccccagtagaaggaaacgggcatcacccgctttcttgctggttgtcatttttgcagtagagtcatctccatcagctgtaagaagagactgggaaaatagg

SEQ ID NO: 510190 - DNA, 148 bp, Homo sapiens
gaaaggtgagaaatgtttattgaatacagtgcaggtttataaataaaacgtatttacaatttcatagagttggtccatagagaggtggttaaatctcaaacagtttatctaagatttacagaaagtcaagtacatctcttttaaatag

SEQ ID NO: 510191 - DNA, 1095 bp, Homo sapiens
ggtgaagtccgtgccatgtgacctgaggcgagtgggggacaagaggttccttgtgggctacaacgaatcctcgcaacactgtctcgtcacatccatctctcgaatgacttatgaaagggttatgcataagagttaagtctcatgagctcaataccgagtctttgttcttgacaagggccacatgtacaatgtccagacatagttcatgtcgcgaccaggcattcatgcttcctaatcgcgcatgcacgcaaatgtataagtcatcatatgaccacgtactgaaactcacatgaagacgtctcatcagagtaatcagttggagcgggcatgaaggtcttatattcgatacgaaaaaagcaaaaataaacagttagctaaaactagtttgtgacactaggtcgaagtatctcatcgggttgtcaccccacctttttacaggtcggccgggggtcacttactttttggattacgaggtcctaaagggtccctccgaggcggttacccttaacctcaacaacgcctcgtactacctgatgaagatattgtggtgatgcgtgacaggaacgttcttatgcgttgtgatgaacacccaaatgaaagttgacccctgtcccaggtaaagtgaccacaagctgggggatgtgaaaacgaacactcgtggtgttgcgcccacgtcaggaacttggtgtgtagcgagcactgtccattggaaattttaaagatgggttccgcaacccatcgcagaaagttggacattgcaacgtctacatatgaagagaccacagtttgtgggcactatatgatagtaggtggctaggcaaaagcaacaaccgaattactgaaccgaccaccgtgaaaatcctcctggaatcgtccggaacaggacataccattgaatgtgcctctccgatttgtgggggacagacctgttgggaaaccggttgagaatataagcccctagagtgtgagccacattttagcacgctggtgtaccatacatagggcgacaccgttggaggagaaagcggacacttgccattagttggtggaaatcaactcaacacatgcgcgttatgaggaagacaacagtacacc

SEQ ID NO: 510192 - DNA, 307 bp, Homo sapiens
  misc_feature (50)..(50): n is a, c, g, or t
  misc_feature (52)..(52): n is a, c, g, or t
  misc_feature (278)..(278): n is a, c, g, or t
tggataaccctcaaagaacctcgtgaaagctgtggttacagctgggcacngngtgtcacgcctgtaatctcagcactttgggaggctgagaggccccggatcacccgaggtcaggagttcaagaccagcctggccaacgtggtgaaaccccatctctactaaaaatacaaaaattagctgggcgtggtggtgcacacctgtggtcccagctactcaggaggctgaggtaggagaatcacttgaacccaggacagaggtcgcagtgagccaagattacnccactgcaccccagcattggcgacaaacg

SEQ ID NO: 510193 - DNA, 167 bp, Homo sapiens
ctacaggatccccccggacagtgagatgatgcatcatgcattttcttccggcgcgccttgccctggtacttgacgcgccttcttgcgtgtccgacacgggccctctccacactcgtctcactcgtcgtgttccagccattgtagctcaatcctagtacactcatctc

SEQ ID NO: 510194 - DNA, 382 bp, Homo sapiens
cccctaggcagccaaagcatctgactcgctctcgcctggtctcgtctcaacatcagatacctggcggacactttatccaagcaaacattaccgagtccagccagcaggaaatacagcatattgtgactcggcacggtcctgcggcagacaggcatttattacgctgtctattttcgcatgtggattccagcggcgatggtacacgcagcggcaacgatttccatcagactcagcttctgatccagccagtgtgccgttgctgatatacaaagccaaactttctatctcgaccgctgtccctactgccattgactactcccattgcaactatccagcagagttttacagccctgcaccccccactttattttgcccacgcttt

SEQ ID NO: 510195 - DNA, 245 bp, Homo sapiens
cccttatcatagaacaccgggggcgagatcggggtcgaaatgcattatattctttaagtacacgctagatacaactgtctggcctggtcctaacgctcgcaacgaacctaactaatactaacatctcagacgctcaggaaatagaaaccgtctgaactatcctgtccgtcatcatcctagttctgaaccccctgccatacctacccatactttacataacagacgatgtcaacgatccctccctt

SEQ ID NO: 510196 - DNA, 1656 bp, Homo sapiens
cgaggcgccgacgccgccggcgcagccgccggagccgcaatgcctaaaggaggaagaaagggaggccacaaaggccggcgcgaggcacgtatacaaggccctgaggagatcgacgcgcagctgcacggctgagaacgcaccaaggccacgggaagaaggaggacgcacatagaagaaggtggagatgtgggctgcaggtgaccccaaaaaggagacagacatctctagcactctatgatgatgacgtgatggattgactggaagatgactcaccagacaaaagcgcaaagcgcgttgacagggtctcatctgacgatctgagaacccctaaccgggtggcacagacactatgtttgaggaggactgggaggtcgggagagaccatgagggagaagagggatacggactgacataatcgtattgaagaacaggaaaacgaatgaccggaacaaggtggtatgacatgtaattgataaggccgattctgaacttagtgagttgtgcattgctatattctgaaaggatatctgcgagaaggtcacacttgtggattgggggtgggaagatgaccatgggtggaggaacttgggggggtaagatgagatgcatggcatttaacagtagatcaggtaagttgggtacggattgatgatgacgccattgtgaaaagggaggggatcgggataaggtacacgcaaggggagggggcaaagccattgcgatataggaaacccacgggagtgaagacgcatatacaacacatcaacatgtagcgcactgggaacacccattggtgtctctggccacattggagaggtgtggccatcaagtctttccaacattaaccgcaatgcgggcgcttgaaattccaaccagcattgggaggaagcaccactagagatgataccacatatagaggtgtcacctctaggcatacgggcgctaacagatggaatagtatggatcgccgcactgggggtctacaggagccactcggtcatttcgacctttgggacacacatacgaggggaagaagcattccaacgcgttcatttcgtaggacacaccttataccgttaggccccgacgggtgagcccacgatagtacaaacgaggtgtgggagatacaaggggcagcaatgctatgacaccaagttgtagcgcaaagaccagctacgtcacctatatgtgagaacacacatatcgcaaagagaaaatagccgctagctgtacgagaaagtaatgatcatagtggcagaactgagagcgagcaacaaatgtcggcgcacgcagagagagcacccagcgagtgcgcaaactatttggggagaacaactaggcaagcgggcacaccctagctgcgcgacggcaagcaatagtaaaccggtgggccgccggcgacagaatgagccacacagcagagccgacgaagacaaggacgacgcgacgaacagtagagtcaaagaggaggcacaaaaaggcaaggacaaaacacagacgcgcaagcgcgaaaaacaagaggagggaacgaaaggaggagcgagggcggaccacgcttgggagaagcgaccacacgcaacgcgggcaaacatagatggagacactcgagcgctaggaagacagaggagcgagcgagcgagcacaaactccggtcgg

SEQ ID NO: 510197 - DNA, 414 bp, Homo sapiens
ggccttcacaagaccgccggtgagccgctgacctggccgtgttctgggtggagttgtgatgaggcacaagggcgcgccacacctgcgccccgagccagacctcacctggtaccagtaccattccttgacgtgattggtttcctcttggccgtcgtgctgacagtggccttcatcacctttaaatgttgtgcttatggctaaccggaaatgcttggggaaaaaaagggcgagttaagaaagccccacaaattccaaggacccattgagaagtggggtgggaaaaataaggtaacaaatttttgaaccatttccctagttcatttccaaattgaaaacagatcagtgtaaattcattttatcttataagggaaatactttgcataaattatcagcccagagtgctttaaaaaatct

SEQ ID NO: 510198 - DNA, 449 bp, Homo sapiens
  misc_feature (24)..(24): n is a, c, g, or t
  misc_feature (50)..(50): n is a, c, g, or t
  misc_feature (58)..(58): n is a, c, g, or t
  misc_feature (80)..(80): n is a, c, g, or t
  misc_feature (222)..(222): n is a, c, g, or t
  misc_feature (344)..(344): n is a, c, g, or t
  misc_feature (389)..(389): n is a, c, g, or t
  misc_feature (401)..(401): n is a, c, g, or t
  misc_feature (417)..(417): n is a, c, g, or t
  misc_feature (429)..(429): n is a, c, g, or t
tctgcttgagatggccagggtgtntcaatgtcagagtaacgccataacanaagaaatnagactaagaggctgggcatggnggctcatgcttgtaatcccagcacttcgggaagcagaggtgggtggattacttgaggtcaggagttcaagactagcctggccaacatggcaaaaccctgtctctaccaaaaatacaaaaattaccctgaggccaggtgcggnggctcatgcctgtaatcccagctctttgggaggctgaggtgggcagaccacctgaggtcaggagtttgagaccatcctggccaacatggcaaaacccaatctctactaaaaaatacaaagcnttagccaggcatggtagtgagcacctgtaatcccaggtactcggnaggctgaggcanaattgcttgaacctgngtaggtggaggntgcagtgagccgagatggtg

SEQ ID NO: 510199 - DNA, 496 bp, Homo sapiens
agaacacatcttacccagccaagggtttaatctttcccgacggcctaagagggattcagtacccagcggtaacaccctacttagccctatcccagggctatcccctatcagcaaggggtacaatggctggaatggtgggtctgacttccttatggagtggtaagatctctaaagataggaatttggtaatagcgtacactattccatcctcaggggcttaacagattctaaaaggtagtcacagttctaaaattgtatagacaaaatcttggatccaccatccaattccccctatatataatcccattaccagaagtcaggagtccactcaacaagccaggaaacaaacacttactcggagggcatctctagtagtttatccaaaagacaggaaactttctcctaaaaacagaaaaatccccacctataaaaggagggctgctctgggcacaaaacattccgaatcctaccctttcaaagtcttcagatagatggg

SEQ ID NO: 510200 - DNA, 153 bp, Homo sapiens
gatgagctggtcccagtatagaaagggctcgcaaggagcccttttcttgccgctatcaggggatcagcaggctggagccgctggtgctgcgactttccagcacctggtgcgcccgctgggcgtcggccagcgcaaatttctgctcgtctctca

SEQ ID NO: 510201 - DNA, 439 bp, Homo sapiens
agataatctggattagctgtgttacacattcgcaagcgcatgtttgttttctttgtacaccaagctttattaaaccttgccctaagagaaattaggaaatgttcatgttttgattaatccgttttaatcaaatattgtctttctccttgctagttggtatgttttgattaaaaaggcagaggattagatgtaacctaattgaaataggctttatttgtttgcgcaagaacagacttgaataagacaaccatagcaaaatactcatgctttcctctaagagctgttgctcataacagaagtgatgattatacgtaaacatctatattttggcttgtttgggtttaagcctgtttgaaatcattcttctttctcggaataaagcacatgtggtgttttattttgaagtgcaaataaaatttataagaaattttgatctgca

SEQ ID NO: 510202 - DNA, 381 bp, Homo sapiens
  misc_feature (318)..(318): n is a, c, g, or t
  misc_feature (323)..(323): n is a, c, g, or t
  misc_feature (357)..(357): n is a, c, g, or t
  misc_feature (364)..(364): n is a, c, g, or t
agaaacaacagaaattttacttcttacagttctgaaggctgggaagtccagcatcaaggcaccagcagattcaatgtctgataagggcttgctcaaagatggtccttaggctgggtgtggtggctcatacctgtaatcccagcactttgggaggccaaggtcgggggatcccttgagcccagggagttcgacaccagcctggggcaacacagggagacctcatcttaaaaaaagatgggcaccttatttgcagtgtccttcacgtgggcaaaaggggcactcatcttcatttcatggacacaaggagccctcgtgganttcanttccttaaagggccccaacctttttaattacccnttcacantggggtattttagggtt

SEQ ID NO: 510203 - DNA, 591 bp, Homo sapiens
cgcggtggctcacgcctgtaatcccagctctcagggaggctaagaggcgggaggatagcttgagcccaggagttcgagacctgcctgggcaatatagcgagaccccgttctccccaggaaacacaggaaacaaacaaacaaaacaaaacaccaaaggcacaaaacaaaaaacaaaaaacacacaaaaaaaaaatctgtgtggggcgcgcgcgcccggggtctctaaaaaaggggcgcccccggagaagttttttaaaaacacattagcgggggggcgcgcaggggcccccaagagaggaaaggcggacaccggggagcaaacaggggtgaccaagagagaacccggggcgaaaagcacaagggcgggggagttcccacacagtaacaaaaaacaccgggggggggaccacaccggcacgggttttcgaggaacaaaacgccccaggaggggagacacaggaggggccaaaaagaggggggagaccaaaccaaaaggggaagcgcccacacaggggagcccgcgcaaaaacaacaaattacaaccccccgcagcttcgcgggggggcactcgacaagaaagacagcccactg

SEQ ID NO: 510204 - DNA, 483 bp, Homo sapiens
ggtcctagttatgcaggaggcagaggtgggaggattgcttgggcccaggaggtggaggttgcggtgagctgtgattgcgccactgcattccagcctgggcaacagagtgagaccctatctcaaaaaaaaaaaaaaaaaaaaaaaaaaacacactgtggtgggcgcgcggcctggggccctcggaaaaagttttctaaacaccatatccggttggggcgcgcggggggcccaagtagggtaataggggacactggggccaaagagcgggtgcccatagaggagagaaccgggggccagtgaaaagaggggcggggattcccacacccaattaaaaaagcgccgcgggggggaacacgcggagggtttctggaacaaaacctccgagagagggggagttccgggggggcccaaagaggggaactcttattaaaggggggagttcaaggggaaccccgaatttcaaattaccccggggggggggcc

SEQ ID NO: 510205 - DNA, 349 bp, Homo sapiens
aggttgaattccaatgcttggtagttgagcccgatgtacttgtcgagcagctgtcgccctctacgtagcacaggttgtagccgatcagttcgtcgcagtgccagtagcagaacacccgcccgttgctggcggcgtcctgcaacaagctgcggaaaaacgccggggtcagcaggtcaaagtggatctcgctctggtcgtacaccgccttgtacaggccgtacaactgcgcaagccaggcctcatcgttgaagcgcgcatcgccagtgtccaggacttccacccgcaacgcctcgcggctgcgcagtttgcgtcggatattgcgtcgacgggtgtgggacaaacgcgccag

SEQ ID NO: 510206 - DNA, 309 bp, Homo sapiens
acactatcatacgatgcggccttaacgaactaggaggcgcccttgtcatactagtattcatcctcatcctagctatattccccctcctccgtatatcctaacgccaactcatcctatcacgcccacgacgccaatcagtataccgactcatagtcgccggcctcgtcagtctaccctgaagcggcggacaacccgtcagcggccctgttaccatcgttgtacacgtagcatccgtcctatacttaacaccaattctaatcctaatagcaactatcttcctaattggggcccaaatactcaaatgggccc

SEQ ID NO: 510207 - DNA, 398 bp, Homo sapiens
  misc_feature (23)..(23): n is a, c, g, or t
gatagtttttaaaatcccctttnctgaagtataatttatatccaataaagcataaagtttgaattttgatagttgtgttaatgccagtcaaaatataaaacattttcgggccaggcgcggtggctcacgcctgtaatcccagccctttgggaggccgaggcgggtggatcatgaggtcaggagatcgagcccatcctggctaacaaggtgaaaccccgtttttactaaaaatacaaaaaaattagccaggcgcggtggcgggcgcctgtagtcccagctactcgggaggctgaggcaggagaatggcgtgaacccaggaagcggagcttgcagtgagccgagattgcgcccctgcagtccccagtccggcctgggcgacagagcgagaccccgtctca

SEQ ID NO: 510208 - DNA, 729 bp, Homo sapiens
tcggcttcttcatctataatgtgaagggttgaataagcatgagtccccaagctcctctggctgtgggagcacagatgagtctttcagaggcaggatccattgttgcagatagctatgatctgtgtggcaatcaggcttcgtagcttggggaggtagagttacattgactatgtatcatgtaataacagcctttgagacttggtacaaatatggtgctgagaatgaaaatctagagatgattgaagtttgtaggtcggaagtaggagtaggtttgtttggccgttgtttgataaattgctgttatgtcacagagtttgcagattgctctggataccttcaaatcctagctctcagctgtgggattcttgatctcagaggtgtttattttgcagcagtcagcataggcttgtgccactgactcctccttcagtcggctttgcccaaaacaaatgtgaggtattactggtattaagtttagtccaggggactcagaaggatagattcagtagcaacagacacatcatgaaattatattccattcccagtagagagaatgcgcttttggatccgtttagtccatctggattaacagagtattttctcttcctgccgagaactaggtgactcaggcaattgatggcatatgcaaaggcctggtcatagatgcacttacaggatgcctcatagacgatgaggggtctgaaagggcaatccgaggttggagaatcg

SEQ ID NO: 510209 - DNA, 845 bp, Homo sapiens
  misc_feature (1)..(1): n is a, c, g, or t
nctggccgatctgggtttattcctcattccttttccctactcatgtttattctccatggaccatggttctgttcatttcagtgatcaaacaatcctttctgcatagcaattgattcacacttgcctttcttttgcctccttagctaagcaaggtatcacatgtctctttcccttcagctgcaaagatgaagccagaggcccttttttgccatagtcacaacaccttccacaaaggccaactggactcattactatgactctgatctacggacaagagccatgtatttggtacaaggtcacaaggagacagttctccatggttctcttctgtttcttcattggcagccttttgtttcagactaaccttccaaggatatttttgtagtgatgtctccttgaggacaaaggttgggtaggtttgcttgcaacccactcttaggattaaagtttcttaagctcagtgtgcttctcctgtagcacaatccacagcatagacaggtgtctgtctcttagcccttgtcacatggcactgtgggcaatggggcttggaaactgcataaatgataattatttggttactgctatggctggaagtaataaactgtgttttggcatctttattcttctgccacctccatgaatcggtggcaggctaacttgataagcttgggggcagggtgaaagctcaaagccttaccggtcttgggacactttgggtccatcatactggtcaagccggctggaaaagttcatcaaatatcatgggcttcatagagagggggaaccactcccagtaaatagatctgaaggaaactcggaatggataaaaggggcaaattaatctg

SEQ ID NO: 510210 - DNA, 432 bp, Homo sapiens
tctcatgtgtcacgtgtctaccctacctttctctttgtcttggactgtccctcccactttatgtcaggtacactataatcttatatactgccagagttgatagcattatattttttcctattgtagaaccaagtctccatgtaagtataatgatcaaatcaggataattaggacgtctatccccttaaacttttatcatttctttatcctgggaacatacagaatcctctcctatctatttgaacatatgcaataaatgatagttaactagagtcactctacagtgctgtagaatactagaacttattcctcctatctagctgcagttgcgtgtcggtgaaccaatctttagttattcctctgcccgccgtacgttatttctacctctggtaggcaccattctactatcaattacttcgagacagcatatca

SEQ ID NO: 510211 - DNA, 659 bp, Homo sapiens
ggcgcttctgaaactcatctttcctgatggagcgtttgaaagtgagaatcgagcattgatcaatgtccaaatgctgaacaattcaggattcgctaggggaattattgaagagttccaaaataataatgaccttgagttacaacaaaaatgtattaatgtactaagcacatatgctatgattcagggacaaattgatgcaaataaggagattgggcagttcttcatacaaactttaacacagttgaatgttcgccctgaaattttgatagaaatgacaaattcgcttttccaaatttacggggatgcctcttacgactataatgaaccaatatttgtaaggggtggatttttatctattctaaaagaccaagttgtaccaaatttgaggcagcaattcaaaatggttgataaaaacaaaaatcccgaactaaaagaaagatgccatgattgctttactacgttggatagtttcattcactacaaaatgaatgaaaattctactaaccaatagatttattaaagtgtatatagttgccatacttatagaaaatggtacaaaaaatatctttctatttacttagcataagaaacaaagagcaaaaaattatttttgagaatttgtaaataatgttattttgctctatttttgttaaaaaaaa

SEQ ID NO: 510212 - DNA, 952 bp, Homo sapiens
cgcggtagctcacgcctgtaatcccagcactttgggaggccgaggcgggtggatcacgaggtcaggagatcgagaccatcctggctaacacggtgaaaccctgtctctactaaaaatacaaaaaattagccgggcgtggtggcgggcgcctgtagtcccagctactcgggaggctgaggcaggagaatggtgtgaacccgggaggcggagcttgcagtgagccgagatcgcgccattgcactccaacctgggagacggagggagactccgtctcaaaaaaacaaaaacaaacaaacaaaaaaacatgcaaacaatccagcaatattgcacccctaggcatttatcctagagcaatgaagacttatgcccacacaaaaagctgcacacaaatgttcatagcagctttattcatggtagccaacaattagaaacaatctagatgtccttcaactggtgaatgattacatccataccacgaaatactttttcagccactaacaaaggatgaatcatagtacacagcagaacctggatgatctccaggaattatgctgaggtgaaacagaccgccatctcaaaaggtaatatctgtattaatccattatatcacatgcttaaaataactaactatcgacatggacgaacagatgagtgatggcaaggggtaacggggccacgatggcgcggggacgggtatggcacaacaagcaccacccttttgcccgcgaacgtcagattcggatgtgcaagggagcacggggggagataggcccgatcgcaagaaccaccagcaccgggaaacgcgcatcgaaccgggacaaccaacgcagacgaacagccacagacgatacgagccggcacaagacacgcgacagcgaagaggacaggaccagcagacccagacaaggcggacaagcaagggcgagacggccacccgccacacgtccgtcga

SEQ ID NO: 510213 - DNA, 186 bp, Homo sapiens
  misc_feature (118)..(118): n is a, c, g, or t
ctggccgatcgtattttattttgttttattttattccagattcacgcagggccctctgcagactgttggcacataaaaggtgtccgggggcgacatgcataatctggacttttcccanaatgctgcagcagaactaccctccagatagacactagcctgcgggccacagtgctacgtgagtcttgc

SEQ ID NO: 510214 - DNA, 829 bp, Homo sapiens
gggattctgtgagatgtagtgtacttggtatctctaaatctaaagatagttttttaaaatcccaaagaaaatctgtctcctttctgatctaaaactcatttgggggtaaagagttaagtgtccaaaggttgtcacagttcatgaggtcagagggagctagcctggacctggactctgccccatccacagtgacagattccaacagaagtgtatttaaattctccagtagacaatgctgggtaagggagggggtagggctggttattaagatacaggctgctgtattttacattggtcgtggcggacggggagcctgagaaaacaaagtcactattcccttttttgaaacaggacccacacacatatttttgtctcagtaaaactggtagagaattcccactgtccctagccacaaagggaccagttccactgagaagtgaacagtggaactccaaccattccagaaacatcgggggcagggaaaatcggcttctcttactgggagatgttccagtggggggggggcgcccccgctccgccggcatgcgtacggttggattggtccgcagtattttgacgggagcttgtgccttcattagggttcccaaccacgtatgggcacaatccgtgggttcgtaacattatctcaaataaacgccccgtggacgtaacaaatcacactcaagcatacaaactagttgtcgggcctggcctcaacaagttcaaaactctttgggcggggcatgaagaccgggcatcggccaggaaccgctcataggtgttccaaaaacggggcggtgcaacagtgcggacggtccgccactcacgc

SEQ ID NO: 510215 - DNA, 160 bp, Homo sapiens
gctgcgcctacgctgcctcgtgccactgcctgccgcgtgctggagccggagcccgagcctgagtggctgccggtgcccgactgtggtggctcctgtggcctgctggctgggctggtgcgggcgatgctccacgagtgcctgatccatgtccatgtgaggc

SEQ ID NO: 510216 - DNA, 318 bp, Homo sapiens
atgtcatacaccatattctgaaatgtctggctaaacagcatcagccggaccgagaacgtgcgctcgactcaaacaaggccactgcaagatctaaaacagttttatcatctgcagcggccttgattcgtcgaaccatgcctcggatcagcgggtgtctgggatacattacaactgtttgctactgactcgcatagtagcttggtacgacgatgtcctatgactcgtctggtacgctggtgctttcatagattcatctgcatgtttccagaccatccgtactgcccggcgttaaaaacacacggagatcctgttggctgg

SEQ ID NO: 510217 - DNA, 331 bp, Homo sapiens
ccaagaattcatctacgatttctattttatcttttaaaaaaagagatgcacatggaaatatcccagcagtaacacatcacagtagctctcagaataagatggtggtaccattgcttattgagaaaggaaaaaaaacacacgagtatattaccaggggcaaagaagggatgtgatttctcatgattgaaagcttgatttagattggatacaggttttgctaaccaagaccaagcggctctggcaagacagggtggttttccaaatgccagaccgaggtggcttatgaaggcagctggcgatggttccagatgtagagagtctccgtcgaact

SEQ ID NO: 510218 - DNA, 230 bp, Homo sapiens
tacagcagaaagcaggctatgactagtgatcagtgcttcaggggacaccaagtataactatctgactaatatacagagcctgtcctgggggagcacaccaagtcagcagggacatgaaacataggcaatggaaacattatagcacataatacgataatcaaccagcacactgtcctatacggtctgtgcacatggtgacatattgactgtagatgccacaggaactcaga

SEQ ID NO: 510219 - DNA, 107 bp, Homo sapiens
gctgggacttacaggcacgtaccactataccctgctaaaatttgtatttttacgtagagacagggttttgccatattggccaggctagtcgtaatgtctctttttaa

SEQ ID NO: 510220 - DNA, 423 bp, Homo sapiens
aaatgtccatccacagttgaagctacagtgaagtcacagggtcgaatactactgcacagcaacgaatatgaatgaaaatatcgctatgcacagcaacatggataaatttcacagacatgaggtcaagcaaaagaggtcagatgtcctcatcatcaagagagagattcattagtatgatctctcgttcctacaaaagagtacagaaatagagcacaacatgatccactggtgtgtagaagaccaggtggaacagtgtaacagcgggagtggactactgagggaggcggcatacctggacgtgctgtgtctgacctctatctgtggtgtgtgatattacatgagtgatatgacagtttgctcttccagaactccctgactggaccctgtggaatataaaagtcctctctaaacataaaaaataaa

SEQ ID NO: 510221 - DNA, 242 bp, Homo sapiens
atttgttaattgttatatagtgggaagccttgacactcttacataaatatttggggtttctgctatccaagtccctctgctataattctcctcaagagttgtttagatatatcaacttcgttgatgatacatctgcaataaaaaggggaaaaaaactggcatgggacccagatgagggtctatgaccagagaaacatgagtaagattctacctttttaaggatctgacaatattctggtttc

SEQ ID NO: 510222 - DNA, 363 bp, Homo sapiens
aaaccgagttcccattcttgcagcaaaattggtcctataaacccttttgtaccagattatcatagtcttctttcacagagaaaaattccatatcgcagttaagagttttctcaaaagtttcaccattatattgctcatttttatttaaccctttaagatttttatccatgctgtgtaatataagcgcaaaagaaagcgcagaaaagccttcttggtatgaaacttaatttttaattttagtttctctcttttttttttttttgacacagtctcgtgctcgtgtcgcacagtctagagtactgtggcactatatcagctctgtgcaacctgtgtctctcgtgttcctcgtgccgttttcctaca

SEQ ID NO: 510223 - DNA, 660 bp, Homo sapiens
ggcatcattaacaaaggataaaagtatcaattcttgaaagaaattggttttaaggaaacttcggagaaaggcattagatctggaaagcttgagcctccttgggttcgtctacaaattggaaggaaatatgaatgaagccctggagtactatgagcgggccctgagactggctgctgactttgagaactctgtgagacaaggtccttaggcacccagatatcagccactttcacatttcatttcattttatgctaacatttactaatcatcttttctgcttactgttagcataaaatgaaatgaaatatgaatgaagccctggagtactatgagcgggccctgagactggctgctgactttgagaactctgtgagacaaggtccttaggcacccagatatcagccactttcacatttcatttcattttatgctaacatttactaatcatcttttctgcttactgttttcagaaacattataattcactgtaatgatgtaattcttgaataataaatctgacaaaatattagttgtgttcaacaattagtgaaacagaatgtgtgtatgcatgtaagaaagagaaatcatttgtatgagtgctatgtagtagagaaaaaatgttagttaactttgtaggaaataaaacataggacttacact

SEQ ID NO: 510224 - DNA, 494 bp, Homo sapiens
  misc_feature (347)..(349): n is a, c, g, or t
tcctccccccccctttccgcccccgggtggtgttgtggcaaaggtggccctggtggcattcggggagaaaaaggtgccctcatggtttgtggtggtcccggtggaatgttcaaaggtgcccgtggtggaaccaaaggtggcttccttggtggccggggcatggccccaggtggctttggtggaggaaaaaaagggggccctggggggccccccggcccttttttggacccaatggggggaaaaaagggggggcgggggggccctggaaaaatggataaaggcgggccccgtccggggggcagggatgggcccctttaaatgcaaagcccccccaggggtgctttgtnnnccccaatttttttttttaccccgaaaatgttttaaatttataattccctttttttaatgttggcccccccctttttttttttccttgtttggcctttggtttttttccccctttgtgaagaaccctttaacccagtttaatggga

SEQ ID NO: 510225 - DNA, 298 bp, Homo sapiens
aaaaaaaaaaaaaatagggccgggcgcagtggctccgctgttatccagaccttttgggggggccaaggtgggcagatccaaggtcaggagacagcccatctgggcttaccagggtgaaaccccgtctctactaaaaatacaaaaaaattagccgggcgtggtggcaggtgcctgtggtcccagctacttaggaggctgaggcaggagaatggcgtgaacctgggaggcggagcttgcaatgagcagagattgtgccactgcgctccagcctgggcgacagagcaagactccttctcta

SEQ ID NO: 510226 - DNA, 2278 bp, Homo sapiens
acgaccactacatgtacttgaaccatggacagcagacgatcccgaacggactgggtatgggggggcagcacaattactttgggctttgggtggatgttgattttgggaaaggacacagcagagccaagcccacgtgcaccacgtacaacagcccgcagctgtcggctcaggagaacttccagtttgataagatggaggtgtgggcggttggagacccctcagaggagcagttggccaagggcaacaagagcatcctggatgcggaccctgaggcccaggccctgctggagatcagtgggcattcgcgccacagcgaagggctccgggaagtcccggacgatgaatgaggagccgcctgagccttcctggagccaggacctggattcctctgggtagagggcaccgcctgcagcccctcttccctcccacatggtttaactgtaatagcgtaccgcacgggtcacagcctggtagtcccacatgtgccaagaagacgccctctgaagccatgtcctgactcatgggtggatctcccagaaatagatgttttttaagttttcttttttgccctacagggtcaccctcaggatctctccaagaaatcttgtgtcaaattagtaactcagtcttatactttgttcttttttaccaacgaaatcctaagcagctgagacctttcagacccccgctggcattagggaattccgctggcattagggaattccgctggcattagggaattccgctggcattagggaattccgctggcattagggaattccgctggcattagggaattccgctggcattagggaattccgctggcattagggaattccgctggcattagggaattccgctggcattagggaattccgctggcattagggaattccgctggcattagggaattccgctggcattagggaattccgctggcattagcattgctgggatctcaacttctctattgaggagggggttcctcccgctggggttcatatggcctcactcaggccatccctgttagaaggtggtacctgatggtctgttctgacgggtgagggacagaggcatctggatgaaaatctcgacgctttctgggaacagcttccaatggcatgggagttctgtatttaaaagcatgaactgtgtataaaatggggaaatggaggcaggagactttgaggtaacatggtctggtggtggcatgagtcctcagaaggtatttgtaataaggttccacacccagctctctcagctgtttttaaatgaatgtgtgtgaggaacagatgggaaagttgggagatctgtctacagagaagcaaagttgtggttctcttgctaacttcaaggtgagggacattgggcaccctaagtttgggaacttggttgataaatacgtatatggtccattccataaatcagtggtgagtgactggcctgggttctagacctctgggaaccagcacctgagtcacagctgtctaggcctcggtgctggcctgggttctagatctctgggaaccagtgcctgagtcacagctgtcagtgcagccatttgcccagggctgctcccgagggggatgatgggaaattcagcagtgtagactcactttaaacaagctccggtgatcctgaaatgctgaagatcgtgtaggtgggttgtggggtcagcagagctgccatctgcccacgtctggaaaacaacacacggtgagtcaccggttggccatgagatctccccacttaaaggtgctgtgagcttgtctctaagatatatacctcttccttttgtcttttgctgtaagctttgaccttttgcagatctgatgaaaatacaacctcttattgtatagtttgccttgattataagccatagtaaatcgagctgttcgcatttttgcaggccttgcattttttactgggaggttcatcaaaccttccatttagcaatagccctgactcaggcagaatgcctcataaattagccttcgaaagaaaagtgcacgctcagacagtgtgtggaggggcaggagcgtgatgcagacaaggacttagtcatgactgattttccttagccagtttgtaatggcttatggggaacattgtgagcttcctacctgacatgttggcagaagtagaatattaggatcctcaagcatctctaccgtaagtccaaagaatttaggtccctattgtcactttgttttgcaatgttttttataaaaatgcaattaaatacctcactattaaactgccatgatgccttcagttt

SEQ ID NO: 510227 - DNA, 797 bp, Homo sapiens
agcggaggcaggcgcggacgtgccttgcatgcctctccctcgtgcgagtattgggcctggttcctttacacttgccttcatctggtggctgttgggatatttccgacgtgccttgggcccggcgcgctactgcgagcacatcgctatcttggaagcggccggccggcgccatagatggcatgcatttcgcacagcaagattacgagtttggtccattattgaaaagaatagaagtgtatgtcagaataaataggaaactacagtgttagcaatgcagaactggaaataacgggagaatcaagcgcggatcagacaacgacgacatagactctgcggaagttctgaagtcaaggaggagagatggggtctgtactgtgttgggcaggctgggcgtcaaactccgtggcctcaaggcagtcctcccgccttggactcccaattgctgggaatacagaatgaatgagagccataagtctgaatttatagagctgaggaagtgggtgaaagctaggaagtttcaagattcaaagttagcgccgtgttgttttccaggtacaggaagagggctgatgagtcaaatattccgtgcaggagggagcagatgatgatttcgtagccgtgagagttgcgtgctcacctacggacactagtgattgcgaagctacttaggggcatacattactaagtggaagccttctcgcatctactctgatgggctgtgacctttgagtttcagaaaagcatgctggggacagatctctatggaaggcttactggagattttaaccaagggtata

SEQ ID NO: 510228 - DNA, 2239 bp, Homo sapiens
acgaccactacatgtacttgaaccatggacagcagacgatcccgaacggactgggtatgggggggcagcacaattactttgggctttgggtggatgttgattttgggaaaggacacagcagagccaagcccacgtgcaccacgtacaacagcccgcagctgtcggctcaggagaacttccagtttgataagatggaggtgtgggcggttggagacccctcagaggagcagttggccaagggcaacaagagcatcctggatgcggaccctgaggcccaggccctgctggagatcagtgggcattcgcgccacagcgaagggctccgggaagtcccggacgatgaatgaggagccgcctgagccttcctggagccaggacctggattcctctgggtagagggcaccgcctgcagcccctcttccctcccacatggtttaactgtaatagcgtaccgcacgggtcacagcctggtagtcccacatgtgccaagaagacgccctctgaagccatgtcctgactcatgggtggatctcccagaaatagatgttttttaagttttcttttttgccctacagggtcaccctcaggatctctccaagaaatcttgtgtcaaattagtaactcagtcttatactttgttcttttttaccaacgaaatcctaagcagctgagacctttcagacccccgctggcattagggaattccgctggcattagggaattccgctggcattagggaattccgctggcattagggaattccgctggcattagggaattccgctggcattagggaattccgctggcattagggaattccgctggcattagggaattccgtggcattagggaattccgctggcattagggaattccgctggcattagggaattccgctggcattagcattgctgggatctcaacttctctattgaggagggggttcctcccgctggggttcatatggcctcactcaggccatccctgttagaaggtggtacctgatggtctgttctgacgggtgagggacagaggcatctggatgaaaatctcgacgctttctgggaacagcttccaatggcatgggagttctgtatttaaaagcatgaactgtgtataaaatggggaaatggaggcaggagactttgaggtaacatggtctggtggtggcatgagtcctcagaaggtatttgtaataaggttccacacccagctctctcagctgtttttaaatgaatgtgtgtgaggaacagatgggaaagttgggagatctgtctacagagaagcaaagttgtggttctcttgctaacttcaaggtgagggacattgggcaccctaagtttgggaacttggttgataaatacgtatatggtccattccataaatcagtggtgagtgactggcctgggttctagacctctgggaaccagcacctgagtcacagctgtctaggcctcggtgctggcctgggttctagatctctgggaaccagtgcctgagtcacagctgtcagtgcagccatttgcccagggctgctcccgagggggatgatgggaaattcagcagtgtagactcactttaaacaagctccggtgatcctgaaatgctgaagatcgtgtaggtgggttgtggggtcagcagagctgccatctgcccacgtctggaaaacaacacacggtgagtcaccggttggccatgagatctccccacttaaaggtgctgtgagcttgtctctaagatatatacctcttccttttgtcttttgctgtaagctttgaccttttgcagatctgatgaaaatacaacctcttattgtatagtttgccttgattataagccatagtaaatcgagctgttcgcatttttgcaggccttgcattttttactgggaggttcatcaaaccttccatttagcaatagccctgactcaggcagaatgcctcataaattagccttcgaaagaaaagtgcacgctcagacagtgtgtggaggggcaggagcgtgatgcagacaaggacttagtcatgactgattttccttagccagtttgtaatggcttatggggaacattgtgagcttcctacctgacatgttggcagaagtagaatattaggatcctcaagcatctctaccgtaagtccaaagaatttaggtccctattgtcactttgttttgcaatgttttttataaaaatgcaattaaatacctcactattaaactgccatgatgccttcagttt

SEQ ID NO: 510229 - DNA, 269 bp, Homo sapiens
caggagcgtgttgctgcgggtcgttctagaggatcccgtgtgtacgagtaacggctgaggaggagaatcacctgaacccagatagcggccgttgcagtgagtcatcattgcaccactgtactccagcctcggtaacagagcgagactccatctcaaaaaaaaagaaaagaaaatgatcaagtcatagaatgaagaaaaggaaagtttttttaatcagtttcgcaacagagttagctggtgacttttaccaacataggtagacgagtaat

SEQ ID NO: 510230 - DNA, 233 bp, Homo sapiens
ttctgtggcaggggctgcagtcctgccttgggtggagcatggggaagtcccactgggctgctatccatactagatccatgaggctctccctggtctctgccttctgatcttctgctcagattacctgtcttcatgctggctctctcatctcctgttagaaacaggttcctccttcttggaggctcccagggtctctatttgaacgggcccgtgtgatatgagctgtaatcagt

SEQ ID NO: 510231 - DNA, 239 bp, Homo sapiens
catgaactccagtctgcttgatactcggcttagataaggggggcatgggagcatgacctgcatatatattacagagaacaggaaagacaaattgttcaattataaatttgtttgtcttctgtacattattgcattagggagccacaaaattatgtagcatcattacaaatgaaaacaggttagaaatgaagaagatacttatatagaaatacatggattcatgaaacattcgccatcgg

SEQ ID NO: 510232 - DNA, 682 bp, Homo sapiens
tacctgcacttggtttactggacgcatttgtccagatgcttgaccagtatgagaagttggcatagaagaaccgcaaggattccgaggatggttctcatcttgacagaggatttgaaccgcgagtgtggccaccgacagcgagctggtgcagagcggcaagagcgagatctcggagctccggcgcaccactgcagaaacctggacgactagagcttgcaagtcacaagctacagcatatgaaacgcatcccactggatgaaacagccatggaggagaccaaaggtcgctactgcatgcagctggcccagatccaggagactgacttggcagcgctggaggagcagctggcccagctccgctgcgagatggagcagcagaaccaggagtacaagatacctagctaggacagagaagacgcggctggagcaggagatcgccacctaccgccgcctgctggagggcgaggacgacccacctctcctcctcccagttctcctctggatacgcagtcatgcacacgcgtgtggccgcctccagccgccatccgcaccaggtcatggtggcacgagggcaggtggtgtccacccacgagcaggtcctcgcaccagacgaggcgcccagcccgctcaggcggggggccccccggtggcacaggcccacggagtcccctcccgcccgctat

SEQ ID NO: 510233 - DNA, 1732 bp, Homo sapiens
gattgacgtatccttccactttcactctcggggctcacggcgcgcagtgacatgtgcgtggacgcgctcacgtgcgcgactcgatgagactactcctgatgaccagttactctaccatctgctactccatgtcccggacgactcattctacatgtcgtgggtgctcgagctgctcgtgcttatgctcagaaccttcgtcggcttgacgagacgactcatcgtgctcagttccgagtgcggatgagactagtcgatcctaggacccttgagaaacctactggagctccagtcggaacaagtatgaggaagctcagtgaccttgctacactggagtatcaccggtatgtgacgtctaggtgcagatgttgcataactgaggttcctgaatgcgaggtagtaacggaatcgcagggatagggtcagagggaccaggacaaaatgtagagtccgggcaagttcaaccgggattcctgttcttggggcccctagcgaaggtaaaggcacagagacaagtcaacctttaagcccgatggcagtatcgaagataaacacacggacttctgtccaaacaaggagacgcctgcagagagaaacaaatttgacccggctcggaatagcggcacagcacaagcggcgcgatccgtttgcaacggggacaccccattagagagtatcaaattctggcggcacttgcctccgtagtcacaatcacttctgtacggctcgggtaccattaggctagcggctatcacataggcaagacagttgtttggtcccagagaactttaattacccaacgaccgcaactccgaggaggcaaatgggcggccccctagtttgcttggacaggggacgatcaccgtgaacccccgtttgaaacggaactgcgtatgcacccccaattataccgttaccgccttggctcggcaacacttgctcacaacaagcagtttatggcaaaagcctatccagattttccccccgtggcatgtcggcccatgctggcaattaaagccccctgtgatgatgtgagcactaacatccaggatcatcgcaacgcgctaacaaaggcaccattcacctggcacgctcgcacagcaattggaacattttgccccgctaacttcgccgttgagcctctacgcatggctgggttcccagttgtcccacaagagggcggttacacactacacaacgcgaagcattcccattcgcccacaaggatctagtaacctaacgcatcaccacttaaaccccacaagtgatgtcacccctatggcacacataacgaacaacaggcaagccacagcacagtgagacaagtcaagaagcgaccacacgtacagacacagattgcagaatcttcgggtcacacagacatcttcacacgcacatacaagacaacaacaagaaccacaacacagccaacgcagaaagcgacgcctaatatatgtctacacacgactcatccgaaaggcaacccagcacgcaaggcaacacaatacgacacacaacgcgacaacacactgagacgctcgaccaacaccaagcgatcacaccacgcatccgcgaccgcacacccacttaaccttagacgaacagaaagcaggagccaacaccactactacgcgcagcggaccactacccaccagaaatagaagcagaacgccccacctcaaactcacatcaccagctaacaactgcgacacacggctatcacacccgccacgta

SEQ ID NO: 510234 - DNA, 330 bp, Homo sapiens
ccagctacttcagctataagagcagcatgcttgcggcgcctgttgacacaagctagagagaagcaccaggtatatatggaacccatgaatgtcacatgccagtccataggatactgacttcattgcttaataagtctagctgaaaacgacagattgagatcatccaaaaagtgcgtgatgcgagtagtttgcggtaagatcttatagggctgacactaaactcttaaaaccaaatggccaagaactcccttccatggacaaagccccatactgataacatgctgtgaatataatccacagctgttgtaacaattgttgggggatcctcta

SEQ ID NO: 510235 - DNA, 241 bp, Homo sapiens
tttgaaattccctcccccccaggttagggggatgggcccttttccccttccttttcccctttggatggtttttctggtccttcgatatgctaaccggtttcagccctgggccctggggagggggggggggccgccctccggccggttttgggggtggaactctttaatgctttgggtattttttccattaggtctcttttccgaaggggttataggaccataaaaatttttttcttttgga

SEQ ID NO: 510236 - DNA, 156 bp, Homo sapiens
agatttaaacctagtaattggggcatggattccaccacagtgaccatgagggtggcaatgtaagtacccataccagccatttggtgggcagttcccttaccgacccttaacctcgtcctttgacagcagccatgaacgggctggcaggcctctcca

SEQ ID NO: 510237 - DNA, 201 bp, Homo sapiens
gcgtctcagtgactacacgaagacgtctggcagaaagttctcatcgaagcggcctgcgagtggcagtgctgaccctgctcagtatgaccgctatgtcaacaaggatatgtgcatccaggagctggcggtcttggtatctgggcagaagtaggcacaggtcttgaaactcttcgtaacggcagatgcttggcctctcctacg

SEQ ID NO: 510238 - DNA, 447 bp, Homo sapiens
tcatacttcagacctgtgagcagaaagagaaaactatctgattttaatcatgtgattaggtcaggccactctgataatttttctgaaggtcaactgtgccatttaacataacctaatcgtgggagcaaactccaacacattcacagtcgtgggattatccaggttatgcagtacagcagaagcaggaaatctggggatcatcttagaattctgcctaccacactattctgtgtatccttcatgaagctgttgacattcgttaaaggaagctgcttatcacaaccaacaagcattatgcctagtcagtgctaggccctatggaagatataaaatgcacataggaataagcccatctctgaccctttacagttttcaaagcacttttatagctgtgatctcattttctcttttaaaaaccaaaaaacatgctcatcatcactggccatc

SEQ ID NO: 510239 - DNA, 316 bp, Homo sapiens
gatcacaccagccatgcttaacatctgcccaatgcctcttaatggtgcgactcattttcccagggatatagatccctttgggaccaccagatgtacaagactcccagattaacaggggcccaccttgagtcttggaggactacacccccggcgtcataggctgcttatgtggggtgcggagtctaagtgagcagatccccaaacccagagaagcccccttaccacctgtttgtccttttgcggggagacctataagtagtttgaaaagctgtgatcctctttggctgggcgcagtggatcacgcctgtaatccagc

SEQ ID NO: 510240 - DNA, 390 bp, Homo sapiens
agagaatctagcaggatccccgttacgtggcataaacccatgatcataacccagaatagcaagaaaatcacatgatagtacattcccaagtacaccagccattccagacccacaagtcactctgctcttataattcacagaactgctgaacaagtagacatatctatctaaaagtagaaaaaaaggttagtatagaaggtatatctgttatacaagtatattacacagcttgaggtagtaacaggtccgaaaagctctactcaaccactgatactttaagctcaaataggagagaaaacaaacaagcaagcaaagaaggttaatctacttacagaaatttaacagtcacgtgtatcacaacattaattagcaaaatgccaagtaacgaga

SEQ ID NO: 510241 - DNA, 240 bp, Homo sapiens
ggtgacctagaggatcccactctcactattatcagagaaatgcagatacaataataatgtgatatttctctttatccaccagatcggtgataatgaaaggataggatagtattaagtattggagaatttgggtcacggctattactgtccattgtcgatcagggtctacgcttggcggggaatttagcacattgggcgtagctgaacctccacatattaccagcgatccctctttctagc

SEQ ID NO: 510242 - DNA, 359 bp, Homo sapiens
  misc_feature (35)..(35): n is a, c, g, or t
  misc_feature (140)..(140): n is a, c, g, or t
  misc_feature (268)..(268): n is a, c, g, or t
  misc_feature (331)..(331): n is a, c, g, or t
  misc_feature (341)..(341): n is a, c, g, or t
tttctccaagctgatcaaggtggggccctatgggnatgttaatgcacacgggaggttgtgtataagactgagacagtggccgggtgcgagggctcaggcctgtaatctcagaactttgggaggccgaggcaggtggatcncccgagatcaggagttcaagaccagcctgaccaacattgtgaaactccatctctattaaaaatacaaaaatcagccagatgtggtggcatgcatctgtaatcccagctactcaggaggctgaggcagnagaactgcttgaacccgggaggtggaggttgcagtgagccgagattgtgccactacactccancctgggcaanagagcaagaatccgtctc

SEQ ID NO: 510243 - DNA, 324 bp, Homo sapiens
tgagactccgtctcaaaagaaaagaaaaaaattacgggaatcgttgtgcctctacatctggtcatgcgggagcttattgtataataggcatctttggggagaagtgtgctactgttgactaattctttgaattcaggaaatggattttcagtttgaatgccaaagtctgatcaattcaagtgtgttgagaggaacacaaggacaggtgcagtggctcatgtctgtaatcccagcagtttgggaggttgaggcaggaggactgtttgaggccacgtgttcaaaaccagcctgggtgagatagcaagaccctgtcttgatctttta

SEQ ID NO: 510244 - DNA, 549 bp, Homo sapiens
aacataataaggccagaacgtatcgacggcccgcagtgaattgctcaatccaatgacatgcatcagggcggtgcacatccggaacgaaagctttacacagcgtcttgtcaccatgaaagcaactatggtttgtaagagccgcctttttcatctacggcccacaattaacaatggatgtggctaacagtacaccttctgaagcaaacttaaacattactgtaaatgctcaagagccttatcatttggcaaacaatcaagattagtgacatgcagtttatacccacttctcttcagacacctcccgagtcaagtacagtagaccaggctaagagagctggaagaaatcagtctccgccagtgggttatatgtctcagcccaagtccttgcagcttttaaagccatccatattgagttctttggtaccgcctccagtttctgagtcatctccaagtaggactcccacttgtaaaaagtcaccaataatcacaacatgtaattcagcaaaacttcagccaacatctagtcaaacaaatcttgcaaataatcag

SEQ ID NO: 510245 - DNA, 130 bp, Homo sapiens
tcaatcaaaataagggtaaaccagacttgcataccacattgccaaattagacaaacagcatcaattttcaaacaagcggtaacccaagtcacaaatcatcctagtaatacagtgatttgttcccccggta

SEQ ID NO: 510246 - DNA, 110 bp, Homo sapiens
tcaattgtttttattatgtcctacaagcattaattaattaacacactttagttagtatgttcgcctgtaatattgaacgtagtttttataaataataaataaataaaaaa

SEQ ID NO: 510247 - DNA, 231 bp, Homo sapiens
gtcgaccgatctggctgcgacatctgtcaccccattgatcgccagggttgattcggctgatctggctggctaggcgggtgtccccttcctcccccaccgctccatgtgcgtccctcccgaagctgcgcgctcggtcgaagaggacgaccatccccgatagaggaggaccggtcttcggtcaagggtatacgagtagctgcgctcccctgctagaacctccaaacaagctct

SEQ ID NO: 510248 - DNA, 185 bp, Homo sapiens
  misc_feature (110)..(110): n is a, c, g, or t
gtttctgtgtggacactgaagaactgaactcagtgagtcagacaccagtactgttattccaggcaataacccagaaaacaccaccagcatcatgctgagatctcctgatngccagcttggatggactacacattcccccaaagaacagaagaaagcatgtctgccccaatcctgattcttactct

SEQ ID NO: 510249 - DNA, 695 bp, Homo sapiens
tgacggagtctcgctctgtcgcccaggctggagtgcagtggcgggatctcggctcactgcaagctccgcctcccgggttcacgccattctcctgcctcagcctcccaagagtcttttgtatttgagatttctttcttctagcccaccttcatttaattctatttaaccttttatctttccatatctgcctagatattgtctcttctggatgccttctcaaacctgcccccagccccaacacatggttagtgctcctttggctgccaaacacccttgtgtttacccttgtgataaaatttaagctccttgaagtaagagattatgttccattctgcattctatcactggatcacaatatactcctcagcatgttgttagtatttcaacatttgataatttttaaaaatctgaataaatcactcttttctctgtcctctactctttttacttgtacttttgtcatggaacttattagctatcactacttttgtaaattgttttctctcccacaaaaactggtagcttctactaatctttggattcctttgattgacaagcattgtgcattgcacaaagtaagtatttactgaatatatgctgtattaaatgtcaccaacctcctaaaagtaattataatgttgtaaaactgattttgtgggtgggctttaaaccggctctgaagaatttttaaaaat

SEQ ID NO: 510250 - DNA, 1569 bp, Homo sapiens
gcagcatcagtaactttgaggaggccagaaccagctatggcacagatgaggacatcctctttgtctacttggacagaatgacagcagtgagcctggtgctgcctaggcccatcggaccccatcacccaccaccagaccgtggccctgctcatgtgactgccctgtgacccagtgcttgggtgctgcttggtgtgtttggaaatgtggaacatgcaagccaatcagacccaatcatggacagaagtcccacggaacatccggaggactggcacagcttgctttgtcttgccagattgccgtgtgttcgctcactgtcacatcaccaccaatgcaacttgcatgcgctgctggacacgcataccaccaaagaggcccacagccttgacgtccacgctgctaccccaccacgtgcaatgtcccaagctccctgacaagtggcccttgttcgccctcttgacgcaccagcatccaatgcgcaactggtactcccccgcaacaagacgcaggcaaggcacgtgcacgcactggcagcaagcaggaccgctacgctatggaccggactggccacctcggtcagctgaccagttactcgctgagctgatactgggacgacacagcactatagctggcccccccagatcctcactatcgcctcgtcctgacccaccctccccaggcgccacactgatactagcgattggcaacgactcgacatgaagcttcttgcccgcattggatgaaccctggaaggcatcggcacgacataccccaacctaccgacactgtaccataacacacaattcgtcgtcccaacggactaccttagagctccacacacaaccggcaggacctactagggagtacattgcaatcaacacaacaccctaaacagaaatcttaacacaattatttcccctttgcatcttatcagaatcacatctgcacccctctgcgcaaaacacatcatcacaccactcccactaaatccaccttccacttacgctctcccaaccatctactcatcatcattaatcacgaccttatcaacaactaacataccactcttccttctcgactcccctcctacattacaccactatcagctaacgcacaacaacaaccacactcgcccacaccccaacctctcctcctaccaactacacctcccaccaccacccaccaccttcactcccctgattccctaccaacctcatcccaaacacaactccataacatcgcacacccaccaacatcaccatcacacccatcgacaacaacaacacaccacgtacaccacacaccagatatgcacatcatactaaaccaccacaccaccatcctacacatctactacttcttcatccacaagctacaatcaccaacatcccaaccgacttcacataccaccaccccaccctcctactccgacacctaccaccccccacgaccatcaacaacgacatcacaccgcgtcacgaaccaactccacctccacatctaccgtcacacacctaacctacaccccacatcccccacccacctcacatcacccctcaaaccctcacacac

SEQ ID NO: 510251 - DNA, 547 bp, Homo sapiens
ggtgcttatcaataagctccatgcgtctggatccactgacaaggaagcaggacccaaatgattaaaccctgtttgcaacagtccttctaagagaagacttctggttttttgtttgttttgttttgttttctgtctagaatgccttcttctcttcttctgctaatggaactacttttttatggggaatcccccactttccagagaagttagcatgtgatctaagttcagtcaatcagataaatctattcctttggaatgggaagaggcagaaaaccctagaaaagccaatcagattcttccttgagatttgatgtttaaatgcggagagagagagagaaacggctcttttttcagtattggatcacaagattgtaaagatgatatagaccagagttgctttctgtcacctttcctggatacctggggaaagccatccatagtgagagacaatgaatctaaacattaagagagaatcacaaatgaagagagatgagagatggatggaaagagacagagtcctgaggacattacttgggaccccgaaatc

SEQ ID NO: 510252 - DNA, 642 bp, Homo sapiens
gtattcattcatgctatttttttgtacctattaattgtccccagctttccccaccccacctctcactactcttcccagcctccagtaaccatccttctactctgtatctccatgggttcaatcgtttggattttaatgatgtcgacaaataaggagtattttggtccttgaaaaagtgttcttatatatattttttaacttaatataacattaaaaacatgatcatgctattacctgtactcgtttcttgagctcttttctgttgggattcagccttctatgttttgcaagtcggacagattgaaatctcctttttagcaagagtggtaaaagtttgcatctgtagagttgactactactatttgtgtttatcttacctgaggcctagagaggactgtctgtatttttcaatgaatatgtagccacgtaatatcagtagaattgttagcgtcagtattgtagtaaattgtttgagagaaagtaaagcagcttctagaattttggtcttatatgactggttgttgtaaactttgactctgtacataaatttgtatttaatgactgaaccaatgaagatcttaggacgttgatctctttccaggtaaaggaaggtggtttcgaccgatggccaaatatccccgg

SEQ ID NO: 510253 - DNA, 961 bp, Homo sapiens
  misc_feature (3)..(3): n is a, c, g, or t
  misc_feature (826)..(826): n is a, c, g, or t
ccnggacgtcggattctccccagacgccgagatgcgggtcatggcgccccgaaccctcatcctgctgctctcgggagccctggccctgaccgagacctgggccggctcccactccatgaggtatttctccacatccgtgtcctggcccggccgcggggagccccgcttcatcgcagtgggctacgtggacgacacgcagttcgtgcggttcgacagcgacgccgcgagtccaagaggggagccgcgggagccgtgggtggagcaggaggggccggagtattgggaccgggagacacagaagtacaagcgccaggcacaggctgaccgagtgaacctgcggaaactgcgcggctactacaaccagagcgaggacgggtctcacaccctccagaggatgtttggctgcgacctggggccggacgggcgcctcctccgcgggtataaccagttcgcctacgacggcaaggattacatcgccctgaacgaggatctgcgctcctggaccgccgcggacacggcggctcagatcacccagcgcaagtgggaggcggcccgtgaggcggagcagcggagagcctacctggagggcacgtgcgtggagtggctccgcagaatacctggagaacgggaaggagacgctgcagcgcgcggaacacccaaagacacacgtgacccaccatcccgtctctgaccatgaggccaccctgaggtgctgggccctgggcttctaccctgcggagatcacactgacctggcagtgggatgggggaggaccaaactcagggacaccgagcttgtggagaccaaggccagcaggagatggaanccttcccagaagttgggccagctgtggtgggtgccttctgggacaagagccagagatacacgtgccatatgtcagcacggagtgctgccgggatccctcacactgaaatggaagccggtttccaggccacaatcc

SEQ ID NO: 510254 - DNA, 500 bp, Homo sapiens
  misc_feature (153)..(153): n is a, c, g, or t
  misc_feature (375)..(375): n is a, c, g, or t
  misc_feature (397)..(397): n is a, c, g, or t
  misc_feature (430)..(430): n is a, c, g, or t
  misc_feature (466)..(466): n is a, c, g, or t
aaagccgctgtagcaaagaagccctaaatacagtggctcgaataagacagaagtttatttctctctcgtgtaatagtttagacctcaacaatggctctgctctaaaattccagaattgggatttctatcttgtagctctaccagcccctaggnagtagctcagagttcaaaatgcacatgagtaccctgggtggtttcattaaattgcaggttccagggccaggcacggtggctcatgcctgtaatcccagcactttgggaggcaaaggtaggaggattgcttgaggccaggaatttgagaccagtctggacaacatagcaagacctgtctcgacaacaattaacaacaacagaaattagccaggtgtggtggtncacgcctgttagttcccagctnactggggtaggggtaggcttcaggttcggaggnttcgtttgaggcacaggagtttggaggttaacagtncagcttttgatttgcattcagtggcattccagtc

SEQ ID NO: 510255 - DNA, 473 bp, Homo sapiens
acatggaataattagagaatggactttcaggtctagctctctaacctccagggaggggcaaggggctgacaattgagctaatcacaagtggccagagatttaatcagccatgcctacttaatgaaagctccagataactgggcacaggttcctggagagtgggctgcctggagaggcgatagaagctccttgcgccatgtcccatagctcggcggtaatgcacctctatccaaatgggccgctcatctgtgtccttgcataagtattccttaaaatagttgtacctagaagtgttcccttgagtgctgtgatctgctctagaatcttcactggaaccaaggatagtgagggatgggcagtgagctggtgcctgtgagaagtcctaatcaatcagccggttggtcagaagcacgaggtcacacctgtgtttgaaactgtgctctgcagtgacgggcagtcttctgggactgagc

SEQ ID NO: 510256 - DNA, 871 bp, Homo sapiens
  misc_feature (46)..(46): n is a, c, g, or t
  misc_feature (131)..(131): n is a, c, g, or t
  misc_feature (147)..(147): n is a, c, g, or t
  misc_feature (175)..(175): n is a, c, g, or t
  misc_feature (203)..(203): n is a, c, g, or t
  misc_feature (305)..(305): n is a, c, g, or t
  misc_feature (321)..(322): n is a, c, g, or t
  misc_feature (346)..(347): n is a, c, g, or t
  misc_feature (356)..(356): n is a, c, g, or t
  misc_feature (361)..(362): n is a, c, g, or t
  misc_feature (375)..(376): n is a, c, g, or t
  misc_feature (383)..(383): n is a, c, g, or t
  misc_feature (499)..(499): n is a, c, g, or t
  misc_feature (506)..(506): n is a, c, g, or t
  misc_feature (519)..(519): n is a, c, g, or t
  misc_feature (522)..(522): n is a, c, g, or t
  misc_feature (538)..(538): n is a, c, g, or t
  misc_feature (547)..(547): n is a, c, g, or t
  misc_feature (554)..(554): n is a, c, g, or t
gagtctgagcctccggcaccggccgcgcagctggaggcggcggagnggaagccccaccatggttgcaatccgaaagaagctggtgatcgtggggatggtgcctgtgggaagacctgcctcctcatcgtctncagcaaggatcagttnccggaggtctacgtccctactgtcttgnagaactatatgcggacattgaggtggancggcaagcaggtggagctggctctgtgggacacagcaggcaggaagactatgatcgatgcggcctctctcataccggacactgatgtcatcctcatgtgctnctccatcgaagccctnnaagcctgaaaacattcctgagaanntggaccccnagagnntgaagcacttctnnccccaangtgcccatcatcctggtggggaaataagagggacctgaggcaagaacgagcacaccaggagagagctgccaaagatgaagcaggagcccgttcgtctgaggaaggccgggaaatgngaaccgnatcagtgccttgngtnaccttgagtgctcagncaagaccanggagggngtgcggcgcggtgtttcggcgatgccactccgggctggcctccagggtccgaagaacaagcgttggagggctgccattctctgagatcccaaggctttctaattgcccctcccttcaaggggtcagaatttttcccttaagccaggtctggggctcatgtgaggccctttcagcctctgccggactgtgtttctgccccggtgggggggccccctccgggtggagcgcttcggcttgtaggccggttgcccttgctccggtggcaccgtttattgccgggttggggcgcccccgtgtggcgctatcaggggagagcc

SEQ ID NO: 510257 - DNA, 191 bp, Homo sapiens
ttccgaggattcagcttgatagccagcgtggcgtacagtatatacgatcccggtcactgcaaactccgctcccaggttcaagcgattccccacctcagcctcccgagtagctgggaccacaggcatgcgccaccatgcctggctaagttttgcatttttaatcagagacagggtttcacctgtgtatggcc

SEQ ID NO: 510258 - DNA, 423 bp, Homo sapiens
tatggattgtgtcaggtcctgccgggcaaaatgatgtctgtcatattacgactcatcaggactgtagttctatcacttgcagaaatggagatcttctctagcatggatacatatagctgtaggatctggagaaaaggaatctgctaagcctatcatgaagtgaggtcttctttgttatactgtccaaacttttgacacagtcggatgatttgtcggtccataccaccggaccacatcggccccctcctctgactccgctcggaacaccccaagccgtgccatcaacactgccgcagtcctcctgtgtcaaatgctgcttctatgtgcctgagctgactctgtacatctgcccaatttcgggcgatggtggtcacgcggatgcgtctctgggtgctggagtgctgataatgcgtgacaaactgg

SEQ ID NO: 510259 - DNA, 1588 bp, Homo sapiens
  misc_feature (1)..(1): n is a, c, g, or t
  misc_feature (279)..(279): n is a, c, g, or t
  misc_feature (552)..(552): n is a, c, g, or t
  misc_feature (814)..(814): n is a, c, g, or t
  misc_feature (985)..(985): n is a, c, g, or t
  misc_feature (1050)..(1050): n is a, c, g, or t
  misc_feature (1133)..(1133): n is a, c, g, or t
  misc_feature (1241)..(1241): n is a, c, g, or t
  misc_feature (1268)..(1268): n is a, c, g, or t
  misc_feature (1275)..(1275): n is a, c, g, or t
  misc_feature (1292)..(1293): n is a, c, g, or t
  misc_feature (1348)..(1348): n is a, c, g, or t
  misc_feature (1350)..(1350): n is a, c, g, or t
  misc_feature (1446)..(1446): n is a, c, g, or t
ntcatgccgcctctccctcgtcactgtgggtggaatcctctgccctcgcggtgggttgttgagcccctcactcgttgtggtggatgtgtcctccccgacggtgttgctttttccgggggggttcactacaccccgacgagttgtgtgttagaatgaaaaaggtgggttattacatctccccccctcagagatggcgccacccagcgttgtgtgcccccttcttttccaaggaggccttctcctctgggtgagaattgtgggaaccccccttgccccgcnctcccttctttggggggatgtcttttcacccaaagaccgggggccacccaccacaccccagcggaaggcccagaattttttttgttggggaccctacataacgaccccacagaggaaaatgttgttgtctttgaagagagtttggtggcggccccgtttttttccccctcttctgggacccaatcccgcgcgccgcagaatttggtttcttctctggaggattctctctttcgggagatatttttttcccctttttccccagtctttatgggnagaatataaaccccctcggggttgttggtcgcgcccaaaagaaacccacccgtgggtctccccgcgaattgtgagagacccccaccgtcccccgggagattggggttgttttcctctggtggtgcccgccgcttttgtgtcgcgccctctaccagctccagtcccatcccctctatgtcatgtcgctgtctctcctcttggggccttggggggaaacacaacaactcggggtgctcacaagagatgtattagggggaaaccnctcgcggctctttaatcttgtgcccacacagctctcgagagagacgcccccacccccaccacttctgggggcacaacacaccacgcggcttattttctcgagacacaccgcggctggagaactcggtgtctctctctcccacagcagtggggagtctcccctctctcgtgnggctctttctcgggagagcgccccacgagagtttggcccacacgcgcgcccactcgtgttatatnggggagattctctcacacacgagaaaggggcacacacaacacacactctttacacacccgcgctatagagatgggttgtgggnacacacatcatcacttcacacaccgcccccctcgttggggctctttcacagccaacgctcataacccgcgctatatctcggctcttgttgctcgccacacacaggccncccacagcactccaggaagattctgtnggagatntttatagagagggagannaagagattcacatctgttatagagatgagacactcgagagccacaccagagaagntntatatacacagtatccaccgccacagcccaagcgccacagaaccccacccccacgtggcaccctctccctcggcctcggttctcgctcgatggccnacgacttctcgtttgtctcggctatacccggagcacacacctcggtgcgaagtgtggccacaggtggagccacttggcaccacccctatgaaagttttttggcacgagcctttaccaataaaaaaaaaactggcttttttga

SEQ ID NO: 510260 - DNA, 393 bp, Homo sapiens
gcaacgccgctctttggacccccagcgcatagatattaccggaaaatatgcttttcaagagcccttctttgggaatccttcctagggagaaaaaaaaaggaggtggttaccaattgggaatcccatttcttatttaagtttctgctgcagaattgggttcccacccattttaattcccagcatttatgttctgtggttttctccctttagcccaggaccatttttatttaatccccaattcccaaagtttggagacagatggcccccctactaattatgggcctctagttgaattttaaaaggggaaattttggctttgcagccggagggagctgcaaatctggtaaagggggagtgtggggttaatggggagttttttaataaagggaaact

SEQ ID NO: 510261 - DNA, 168 bp, Homo sapiens
gcagaccacttctgcgtctcctctgccgtcttggcaatgcagacaaaccacttattcttggccgtgtagtggatcttccagacacgaaggtgacggtatagccgtggctatggtaatccgctgtcccatcttccacattctccacctccatgccttcagtgttgattc

SEQ ID NO: 510262 - DNA, 106 bp, Homo sapiens
attttattattgccaaaaccatttactccaaccctttaattttcctttttctcactattcttgaccctattaaaagaggaaaaagcaaccatgttgggcccccata

SEQ ID NO: 510263 - DNA, 244 bp, Homo sapiens
gcacagcagcggacccaggtagccctggacatggctaatgcttacaggggacaggaggaacaggccaaccaggaacttgacgaacttatccagagggtgaaggacttcctcaaccgtgagcctaccacgggtgccaggccatgtgcatggcccgtttgccacactcccggtggcctgcatctcccttgcatcatacgttgagcctgagggactacactgggttaggagcttatgattcctagac

SEQ ID NO: 510264 - DNA, 760 bp, Homo sapiens
ctcatccaaaccccctggaagcttcaacgggcgcagtcattctcataatcgcccacgggacttacatcctcattactattctggctaacaaactcaaactacgaacgcactcacagtcgcatcataatcctctctcaagggacttcaaactctaactcccaactaatagctttttgatgacttctaagcaagcctcggctaaccttcggcttaaccccccaactaattaacctaactggggagaaactctctggtggctagtaaaccaacggttctcctgaatctcaatattcactcttcctaacttatcaggaactcaaacatatctaggtcacaaggcctaatacttccctctaacatatttaccacacacacaatgggggctcactcaaccaacacattaacaacataaaaacctcattcacacgagaaaacaccctcatggttcatacacctaattccccaattctctcctattcctcaaacccgacatctattaccggggttttctccttaaaaaaaacaaaaaaaaaaaacaaaattcactggccggccgttaaaacgtcgggatgggaaaacctggggtacccaagtaaaggcgggagacaatccccttgccacgggggaaacgagaaggcgacgaatgccccccaagtgccgccctaggcgagggcaggagcgcaaaatgtaaaacgggaatgtgacacccgatacgcagagcgaacgccacacacccgcggggtgcacccggcgcccacgc

SEQ ID NO: 510265 - DNA, 1336 bp, Homo sapiens
  misc_feature (262)..(262): n is a, c, g, or t
  misc_feature (640)..(640): n is a, c, g, or t
  misc_feature (847)..(847): n is a, c, g, or t
caggactggaacatgagatccggagtacgttacttcagcgccttggctgcgccggcatgctgagtgttagtcacactcggctactgacaacttggttgtgcatcaccacgcggcgtgttatgtcgtcgacactggctgctgccgataacaatgttctcgtgcaccacgtggggtgtctccgctcgcagctctttataaacggctctgtcgagttgtgaatatggttgttactgtgttctgaaatattatcttttgcgtgccncacaatcttgttgagacctcctggcgaatttcgcgcctgaaattgggtggcccgcacgactttgtggtgtaaaaaacaccctgtgctggtcttcaaaggaaggtccccttaattgtctggggacacccaaaccagggtgtaccccggggctgtgtttatatgtttaaggataattgtgaaaaccggggcggtttctcccggcccccggaatatggattcgtaatttaggagtggaccccttagaatgttgattattgattgagtgtaagcgaaggttctccgggtcctatgatgctaccagacacccgtgtgtgagacaatttaggcaccccaactggaggacccggcgcccattggacccaccatggactcttcgcncttgggccatgttatgggtaaattctgtgttgacgtctccacgccctttataagtacgtcgccctggaggttcacgcggctcaccctgcactgtcacgcacccacttattcactaagagggctcccctcggagcacctgagaccctcctaaaagggagaaaaggttctacccctcggaagccccgcgagcactccacgcggttgtgnctctgggaggcccttgaggagaggtgaagacccaacgggctataggacactcgggcccccaggccccgcgcacgcacactggctaactctgggagaggagagccacactctcacccccttgtatattaagttatattataaaacaatataaatttgggctcgggcgccacgctgggctcaccgccctcgtatattccccgccacctcttgggaggtccgaggccacttcggagttcacacttgaggtctcacggaggttttcgaagaccacccctcgggcccaatattggtgagaaccccactctctacttaaaataccaccaagttatgccgggcgtggtggcacaggcgtctgtaatcccacagctgcttgggaggctgaggcacggagaactcaccttgaaaccctggaaggtggcggttgccacgtgagcacccgatcatgcccctgcactcccgcctgggccaccaaaccagacttcgtttcca

SEQ ID NO: 510266 - DNA, 129 bp, Homo sapiens
  misc_feature (22)..(22): n is a, c, g, or t
  misc_feature (24)..(24): n is a, c, g, or t
  misc_feature (89)..(89): n is a, c, g, or t
  misc_feature (95)..(95): n is a, c, g, or t
taaggtatactcacatgctctnantcaccacactggagtgcacacacgtaccccgcacccagtatttcctgacagaaagctcctcccancccccngggccaggacccagcatgatcctgaaatctgccg

SEQ ID NO: 510267 - DNA, 538 bp, Homo sapiens
tctgagcagctggcaggaacatgttaagtccgctgaagctgtgcccacagttgccccttcccccaggtgctctgtcctagggagatgggagttttatctaaaaacccctggctggggctgctgcctttctttcagagatgccctgcccagtgaggaggagtctagagaggcagtctggccatagccactttcccgcactgtggtgagttctgcccagtctaaactgcctggcctccttagcactgtcaggggaaaactgcctactcaagcctcagtaatggcagatgcccctgcccccaccaagcttgatcgtcccagatcaacttcagactgctgtgctggcagtgagaatttcaacccagtggttcttagcttgctgggctctgtgggagtgggacccactgagcgagaccacttggctccctggcctcagccccctttccaggggagtgaacggttttgtctcgctggggttccaggcaccactggggtacaaaaacaaaaacaaaaacctcctgcagcttgctcagccgggtac

SEQ ID NO: 510268 - DNA, 270 bp, Homo sapiens
gggcccccagggtccccgggggtttgggggttttttttccccgccggacccccaattttggggggttttttcgccccccgaaaaaatggggccggggccctttttttttttcccccccctccgggccccttttttttgtttttttggggggggggggtttttttccccgggaaccctttccttggtcccccccccccccgtcccccccgttttccagtttagggcccaagggtttttagggggtttccctaaagggttttttgggcccca

SEQ ID NO: 510269 - DNA, 330 bp, Homo sapiens
  misc_feature (124)..(124): n is a, c, g, or t
gagacggaatctcactctgttgtccaggctggagtgcagtagcgtgatctcggctcactgcaagctctgccacccaggttcatgccattttcctgcctcaacctccagagtagctgggactacnggcgcccgccaccacgcctggctaattttttgtatttttttttgtagagacagggtttcactgtgttagccaggatggtcttgatctcctgacctcgtgatccgcccgcctcggcctcccaaagtgctgggattacaggcgtgagccactgtgcccgggctgcttatacgtttttcaattcagagtttcccttctgtcgtcttctc

SEQ ID NO: 510270 - DNA, 323 bp, Homo sapiens
gagatgggacccacgcaatgcaacatagaacgccaagtgcaacatacctgggcccattatagcgcaccccagtctaccgcatgtgcagatgcaaagcactggctacgctgggctaatggcatcatcgtgctggggaggacacatgacctggatggctggcccaatgagaacctggtgtgcatggccaatgcgcattaccactgcaaaacaggattattgccccaagctatcccaattcagggcaggaagactatcacaaggatggaataggtaatgcctgtgatgatcacgatgacaataataaaattccagatgacagggac

SEQ ID NO: 510271 - DNA, 304 bp, Homo sapiens
gacgtaaatcatccgctgcgtaggctatatgccgcggccagggccagcgtctgcgcaaagtggctcatgcgtatgacgtgcaggccggtctcgttgtccttgaactcggccgccgtgcccaggcgctggatgatctgcaagcgtgtatcgcgcactcctgtgcctgcacgagcgacaagtgggtgcgcacgcgggctttgacgataccgggatggtagggcttgctatgtagtcgaccgcgcccagttccaggccgcgtgtctcgttgtcgacctcgctcaggcggtgacgaagatcacggggt

SEQ ID NO: 510272 - DNA, 364 bp, Homo sapiens
cagagacagacaaagcgttaggagaagaggagaggcagggagcccccaggcccggaggacgaggactccaccctggatgaatctgacctgtatagcctggcccattcctacctcggaggtggaggccggaaaggtcgctccactagagaagctgctgccaacaccaaccgccctagccctggcgggcacgagaggctggtgaccaagctgcagaattcagagaggaagaatcaaggggcacggcgctgagacagacctggagatgatgccagaccatggacactacacccagcaatatagacggtactgcggatgtgaggacccatgacaggatccaggccggcttgccacaccttacagccct

SEQ ID NO: 510273 - DNA, 192 bp, Homo sapiens
ggtcccagtttctgaggtctctccagaagcagatgctggtaccgcacttcctgtcagccgcagaaccacaagcctattaaacctcttttctaattacccagtctcaggtgttcctttacagcaacgcaaacggactaacagcacgtggaagtgtgtggggcggagcactgtgtgctgggaaggcacctgggg

SEQ ID NO: 510274 - DNA, 419 bp, Homo sapiens
gatccccattcggcgaggcagtctcgaaaagctctggttataactggcctggttctgattttgctgtgttaaagtttctggtggggaacagtaggaactggggcattcatcttgaacaccgtttgcatggattggaatggagctgcatttacattgattccactgctatgtaaaggtttgcttgtcccagcctgaaatacttgaggctgagacgcagcaggaagggatgatgatgctgtagtctggtctgtatttaaagagattgttgcctgaatctgatcaattggttccttctgtggttgttgctctgtagcatgagaaggctggtacaagggttgagatgctgtgtacccctcacttgtggatgataccaaaggaacctgtgtcgcttctggttgtacaggaacttgattaggctg

SEQ ID NO: 510275 - DNA, 601 bp, Homo sapiens
gagctgctcccagtgttccctccccacgaccgcctagtgagaccactatttggcagggtgaggaatgtactggtgaagaggagaggaaggggagccggacacgactacccagcacagagccggtgcacatgggtttgtgtgtgacctcagtatagggagcatttgacaagaaagctgggcactacacgataagcatcgcagagcgacaccatcgagaggcatacaacatagcagaacgagacgcgacacagcaacaaacacaaaaagagcacaacacagcaacaacagacacaacaaccaaacaaaacacaccacaacaaacaacccaaagacgacacacagacgcagagacgcacgagcgaagaggacaagacacagagcaagagaaggcagaacctacaccgcgcaaaccccagacccaccacacgaaaccgacgctagatggggaaggagacacagaagagagggaaaaaacagaacggaacccaagcacgcgaccgacgcgagacaggagagaaaaacagatgcagggagaaagcagacagaagcagaagcacgatcacgcccccaacgccccaaaccgcgcacccaccacacacaa

SEQ ID NO: 510276 - DNA, 890 bp, Homo sapiens
cgagctaggagagactgcgatgttaatcggccgaggctccgctgcaggcctctcagccccaggagcagtactcgctcttcagtgcctgccctggaatcctggaggctacacagctgcccactcctcctggggaggctgcctgtggaggccatggagatccctgcccctgtgagccctgagaagacagctctttcctctcagtgatcctgctctttccctgaaagagaatctcgatggatatatctgtggttgttgtgtcttccctgaatgccatggtccaatggaatctggtgagtttcaatggatgtagggcttgtggacttcacccagtggatggagtgggtgtcaactagactcccctcagatggggccttgtaccggtgatgtgatgttggagaactaccagaaccttcttgccctagtgacctccacttgcacaagccagatgtgatctctcatctgggaacgagggcgacggagccattggatgcatgcagatgggaagtccccagagggccctgtccagaatgtggagcttgatgtgctggtgccctctccaacagcagtggccatatgcaaatgaagaaccggcccaggagcccatcagtggagcgggccatcggacggagcagcagagcgaagggggcgccaggcagcgtagatctgccagaaggagtcaaggctagcgacaccaggggcggcacgcaccatgccatggcctgcgacgtccctgggagaggaatcccccctcaggggtcccccatacgccaaaaagggaaccgagggtgcccctgcatgggaacagaccaaaaagagccaacaatgggacaaaaaggccgggaaacagggagagaaaagacaaccacgaacacaggaccagtggccacacc

SEQ ID NO: 510277 - DNA, 523 bp, Homo sapiens
atccttaggatcattctttgacacggagcccgtagaacctccctgggggggggccatgcgtcaaccactcagcgtggtgaagcggcgacccaagtgcatctgtgtttcacactgcggtagaggcgagtgtgttggaggtgggagacaacacaagatggcggggggtgggccatcacacccctgcggacggaccctggctcttggtgcgtggccgcatacgccaacagacgaaggtgggtttcgatggacagatgcgttggcactcctgcagttgagggacgactgcacgcaccgccccaccagctgggacccaggtcagtctctttaccggcacgcctggggcgacgaaaaaaacagccaatgtccctgtgggggcccgcggaagaagcgaagtccagggacaggcccgaagaggaacaacaaaggggcctgtgtaggccgcaagagagcaccagacatgtgatgaccaggccgcggggggcctcaacaaaaaaaaggttatgatgcccccccaacaagacaa

SEQ ID NO: 510278 - DNA, 195 bp, Homo sapiens
  misc_feature (27)..(27): n is a, c, g, or t
  misc_feature (30)..(30): n is a, c, g, or t
  misc_feature (83)..(83): n is a, c, g, or t
  misc_feature (175)..(175): n is a, c, g, or t
  misc_feature (178)..(178): n is a, c, g, or t
gtaccattcgcgttcttcggcctccantcnccgcagctgctccggcgacggccataacgatacggggaccaccccggaggcgngccgtaacgcgcgaactgctatatgcgtagcgcggtcccagctgccaccgcgggtcaggaggtcctcggggtctggccaccggtagatacgnacnggcgcgggggcggtcca

SEQ ID NO: 510279 - DNA, 1475 bp, Homo sapiens
  misc_feature (450)..(450): n is a, c, g, or t
  misc_feature (509)..(509): n is a, c, g, or t
gcactgacacatccccaaagatcgctttgtcctggacgtagctgcatcatggtgttatatagatgttgccaattagatgcttgaaatcttagctatgacccggtgtacctgagtaggtacaaaggactcgaagaaagaggtgtcactgagcatagtaggaagcatcatggctcattgcttgccggtgggctcagagggagagcgagtgatcggtggatgtcgatccgagatatgtagttgagtcgttcaacggacgcagtatggatcatccgtgagaccaaggaacagcaatcggcacgagctgtgttcacacaaaaattctcagtcgtagtataggactggagattgcatccagcgtccatgggaccactgcgaggagcagtgtaccataaggaaactcagaaggggaaacatgtcaaccccacctgaacatggggtagtcagcaaaangggggaaaggtaacgggaagtttcccgcgtggtgggcaaaccctacatgatttacttcncatctctcgcgtgtaaaaggaacattcactttgaaaagcctgtacattggggcttagtacatactgcattcttcctagtcaaataggtgtatcgtaggaagttcgcgtaccaattcttggtacggataccaggtggcgctatcaaggcaagaagtctagtcccattgaacgggaagttgatgcaatttatgcatgtctttcatactagcctcgagaggtactggaggtatcttatcgctgagggccaaggatgcattgcacatatttcgcggctagacttttcccaggactaagagggaaaaggtaggggtctgtaccgcaatgtcctgtaacaccagttgagctgaagataaactgggatttcccatgggaaaaggagaatgggcaaaaccccgggaatggccgtgaggtttcacaaaggaggtaacctttaactcgttcgaggaaaggggcgagcgccttcacccaacggcaattcgttgggtggcaagaaaagcccttgtccaaagacggcgagggacagcggaaatccttggcaggggatggacacccattgcgtccatttggccgcatctaggggttaaagttatggcccttagagaggtcgttggcgcgcgttccaaggggctaagccatggcggggcgctccactttaaaaccggggcacaacccatggatggccgtttgtttactgagatgaaacccacatgaatttctttgagccaggtgcgggtggcaaacttgtaaatatagtgggcgatggtgtgttaaaacaaacgatgaggtgtgtggaaaaaagagagcggtcaaaggagacacagagatgtgggggtaggcgaggactgcacaggtgccacatggttgtaacgcggacgtgcgtaaatctgtccgcgaagagcaccacgatgagtgagagatggggtaatgagaatagccacaaacaggcgcaggggtatacgcgcgata

SEQ ID NO: 510280 - DNA, 745 bp, Homo sapiens
ggctgatagcatgtacggctgacacgtagacggcaccttggcactacggcctcagcctcgcaactggcacagctctgcagtgagaatgcctcccaactaccgcctgttggacgaactcgctgaaggcctgaactgcgtgagttatggcccagctagctcgtgtctacaaacactaagacttgaccctttctgatggaccggatgatagtctggccacctagaacatttataacactgcattacatgcttaacatgtaatgcgtcctaattaccctatgcaacgcccttggtgagatttgtaacaatcattgatattgatggagtaactcgtgctaacggagtggtggacccaagatccatgtcaatgctacccaatttgcagaatgcttcttgcttcgaattgagctgctacatcttctgcacctactgatgtcttaaaaatatcttagcctttcttaaccatcctacggacattgctacctcattttattcagtaactaattaccattgggtcctttcggcaggcttccaattttgtccaatccccttttcttttataccttctcctatatttatttcatccttttctctcactctctaaacatcttactgggatcttccgtaacgttccgaaattcttctttcaacttcttgttgatcggttcctgattttttgggcaatctctaaatttctcttgtcgtgttactcatcttatcattatttcctaaatgttcatgctcttaa

SEQ ID NO: 510281 - DNA, 447 bp, Homo sapiens
aattcggcacaagggggccattgagccaagccttcctgacctcccgatggagagggggaagagagaacaggacctccacttatccacctacccgctgctgagtccctttagcccttggcatggtaattaacggtcaggaagttatgcatcagcctcagcaagctaacatggcaggagatccctcctgacagcagagctaataagaaatttgctaatgcaatttatcactttaaaaagccatatgtcggtggggatgagcacttctctgcagcagctagtgtaattgtcagaacagagcagcgagcagctctgagaagggggtgaggatgatgtcttcactaaatcagtggtgcaatgcagcaggcgagggggctgggaggaggggtgtggtgctgggtggagggctcccagctctcaaactcccaggaagccagtgctgcagacctg

SEQ ID NO: 510282 - DNA, 905 bp, Homo sapiens
atataacctgggatgtgtagcatgtactcatccgtttaatgggtttcttatcacacacgatgactttgaaagttcaccaggtctgcagggtatcagtagctatatgccttttattgctgaggtagtgtcccatgtatgtggaatatgccatcattagatttattctgtacttcacgcatgtagatgtgacctgtgggattgtatccagtcggggctacttgtgaataaaactgtcaggaactttgtgtacaagcctactgtgtagagataggtttccttgctctggggtcaagtaccgtaccaggtaaaatggtagggtcgcagtggcagatttatgtttcataaagtaactgccaaagtgttgttcaccgaaaggggctagtaccctttatattcgccacacagggttgtaataagagttaccaatgtgtccaaccactcaggttgtgtcacgccattctgattgggaatcatagtggtcatcctcaatgagtggtttgattctgcatatcccccgggtgactaatgctggcaagcaatgtctaaggtacttttggccagggtgtgttgtctgtgaacgtgggttggtccaaaatcctttggggccatcctaaagtgggaagtgttggcgtcatcgagtcgtaagacgtacttagcatatagggataaaggcctgtggacgaccaagatatgacccctttttaaattggatgggatgcaacaatgttgggggggtcgggcaccggaaatttcagcgcactcacggtggggggggaccatttattggagattgtccccgtttcgtgagaacctgccttctctggtggtttcacaaaaggcggggaagcgtttacctggggtgcgttgtgttaagccgctcacagcggcgcggaaaagtgcgcgac

SEQ ID NO: 510283 - DNA, 342 bp, Homo sapiens
acttcttcgggccctgtcatctcagcaaaggtctccttggagttaatgcgatacaactcgacttcctcatccatggagaggctgctccaggaggccttcgccttctccttccgtgccttctgtctggcagacaggtgcttgacatggtccagctccggcaagtggtggtcacgccgatccatataagctgggagcgaaaagtcttcgctcgtcacaacactttcatgagctcgtacacacacagaggtggaaattgcacgcttgccaactagggtaaataccttggtagccaacattctgcggccactgcccgccgcgaacgccctctacaaccggtgttcc

SEQ ID NO: 510284 - DNA, 655 bp, Homo sapiens
  misc_feature (552)..(552): n is a, c, g, or t
cgagggggaggaggagagggggagagaggggagaggaaagaaaaaggaagaggagaagagggaagaagaaagggaaagagagagaaagagggggaaggaaagagaaaggaaagagaagaggggaaaagagaagggagggtggggaagaagaggagagagagagggaaaagaggaaaggaaggaaggaaagaaggaagaagaaaagaggagggggagaggaaaagaggaaagaggggaaagaagaagagggaagaagaaggaaggagagaaatagggaaaggagagaaagagggaagggagaaaaagagggaggaaaaaaggagagaagggaaaaagggaggaagaaagaggaagagggaaaggagagaaggagaggaagagggaaagaggaggaaggaaaaagagaagaagagaaaggagaaagaagaaaagaggaaaaagggaagaagtaaagaagggaggaaaggggaggaaagaaggagggggaaggaagagagggaaaaagaggaaagagaggagaaaagggagaaaggagaggggaaagaagaaggnaagaagaggaatgagaagatgataaatagatatcaagcgctcactctctctctctctctctctctctctctctctctctaaacgtgccgaattcctgcagccc

SEQ ID NO: 510285 - DNA, 253 bp, Homo sapiens
  misc_feature (204)..(204): n is a, c, g, or t
  misc_feature (211)..(211): n is a, c, g, or t
gagatgaagctccgcctcccgggttcacgccattctcctggctcagcctcccgagtagctgggactacaggtgtggctaattttttgtatttttagtagaaacggggtttcaccatgttagccaggatggtctcgatctcctgacctcgtgatccgcccacctcggcctcccaaagagttgggattacaggcgtgagcacttgngcctggnctacattcattatttcattaactctttacacagacctgagag

SEQ ID NO: 510286 - DNA, 645 bp, Homo sapiens
atgctgacggactgctgcccacaggcccacccaccgcacgcatgacatccgacggccagcctgccagctcgcccggccctgccaaccccacgggcaggctacgagcctgcctgccggaacaccactcataacacgcgtccccacggccaggcggctcccggccatcccggtcccagccccacggtccacctcagccacggacggcctacaccgcactgcgacatggaaagcccaactcaaagcgagatcacccttcaaaccaaaatacccatgagcacccaagacacgcgccggtccgcaccagcacgtaacggcactgcaccacccaaacgaccacaacgagaatccagagtagcacggacctggcgccttggtcgccacccacagctgctggcccggacccgaggacaccgttcgacaactgtccgcacgcaggaacggtggcatcccacacaccgggcgacgccggtccccaaaggtcacccgggcacgaggcgcggacaggcctagccccccgtcgcgcaccgcagggattgcgactcaagcaagaacacgcgtgccaccctgaccacgcgtcagacaacggcagaagcccaagggccattgacaccccccagcgcgcacacgccgtacgacggcccccag

SEQ ID NO: 510287 - DNA, 123 bp, Homo sapiens
agaagttgtctagccttccgttccagaaaattcagcacagcatcaacgcgcaagaccatcagcccactccagatagctgcatcatcagcatggatgtgggccagcttaaggcggatgaagacc

SEQ ID NO: 510288 - DNA, 424 bp, Homo sapiens
  misc_feature (237)..(237): n is a, c, g, or t
  misc_feature (390)..(390): n is a, c, g, or t
ccctcacaatctcatcacagcacgttgcatgttctctctatatgtgtgaacacgtgattgcgtgtcatctgctgtctccggatgccaacacaaggcagctcagctttgtgtcagaaataaggatattgatcgggactccgatcagaacttgagtacctggggctgctggcactgtccaagatcctgaagatccaccccaagtccgtgcagtcgcacaaggacctcatcctgcagtgnctggacgacaaggacgagtccatccggctgcggcgcctggacctgctctatgggatggtgtccaagaagaacctgatggagatcgtgaaagaagctgatgacccacgtagaccaggcagagggtaccacctaccgtgacgagctgctcaccangatcattgacatctgcgggcagtccaactaccag

SEQ ID NO: 510289 - DNA, 514 bp, Homo sapiens
cttaaaaatataatcaaagccttaagaactgaaccaaaatggcttaggtgaaaataaaataccatactctgctctaagaaaaggaaagaacattcactgaattataccttcagcaataagcacgtaatggaacttgtttcatttaaaatgcatcacaatcctgtaaattgataatcatcataccgcaattttatagatgagcaaggtattaggcggacctttttcaaaaggtcatacagctagtgacaaatatttccaaatttttcataacatttctttttttgagacggagtcttgctctgtcatccaggctggagtgcagtggcacaatcaaggctcactgtagccttgacctcctgggcttaggtgatccatctcagcctcctgagtagctgggactacaggcacacgcctccacacccagctaattattttttttttccttaatcggagatggggtctcactgtgttgcccaagctggtcttgaactcctgggttcaagcagtcatcctg

SEQ ID NO: 510290 - DNA, 104 bp, Homo sapiens
tgtgtgtcttgtctgggctgcttgtccttcctcaggaccagctcagagggtcttctggaaccagctgtctgtggagatgaatggggtgctttcgtcagggactg

SEQ ID NO: 510291 - DNA, 959 bp, Homo sapiens
  misc_feature (11)..(11): n is a, c, g, or t
  misc_feature (329)..(329): n is a, c, g, or t
  misc_feature (837)..(837): n is a, c, g, or t
  misc_feature (945)..(945): n is a, c, g, or t
aggggaagganagaagaagtgtgtagaaaaaaggagggtgggaggggtggggaattggggggatgagggtgggagagggatagggttggggggggggggattggggtggagtaggaagagaaagtgaaggggtaggagttgtggggggtttggggtgtgggggagggagagggtggtgggggaggagggtggtgggaaaagtaagaggtaggtggtaggggattgatgtggttagtgatagtgggggggatgagtggagtgtggggaggtggttgaggaagtggtgtgtgaaatgggagggaggtgaaaggagaagggggatgtgtaanagggggtggggaaggagaatgggtggggtggtgggagggggttgaaagtggtagaagtggataaggaattggaagtgttggaaggggtgagagggggagttgaggtgtgtgtagggggagggaggtggagggaggtggtgagggagaagatggggggggaagggtggggggaggtggtgggtgtggaggtggagggtatgggtggagtaggaggtgtggtagagatggagggggagatgagggaggtgtggagtgggaaggagatgatggaggagtttaaggggtgcggtggggaggtagtggtgtgtgaggggggtggtgatgtaaggggtgtggatgatgttgatgagtatatggagggggaggtggtggtaggtggtgtgaagattggtagagatgtggtgaagggaggggggtggtttgtggggaagatattgggagggggggatgtgagggtggtgtagagggaggtggaggtgttgttgtggagggtggtgtgtgggaaggnaggaggagggggaagtgtaggatggaggggttgggtgtgtgtgaggggtatgagggtggggaggggttgatgggggaggtgaggaaaggggtggtggaggattgttangagggagatttgaa

SEQ ID NO: 510292 - DNA, 337 bp, Homo sapiens
gagtgagactcggtctcaaaaaaaaaaaaaaaaaaaaaagcctgtagggtcccatttcttcatttatccaattaagtgaaataaacagctgctgcctagggtggctgagctgggagtgccaaggtgcttttggaaagccgtgggacggtgcgcatctggaattgccaatgtcttcactcctttcatccagcaatcacattcatgagaatctatccttccaattctaattatggaaaaagctatgcacccaaaaatatgcatcggggcataatttaatagaaattgtaagtgacccaaatacctcatacgaagttaaatacataatgatatttccata

SEQ ID NO: 510293 - DNA, 203 bp, Homo sapiens
  misc_feature (51)..(51): n is a, c, g, or t
caaatggacgaacactcttatatcttttttatttctgtgaattagtagcangttgccacttcacttatattttagtaatttgagtttcttctttttttcttagtctagaatctagcttaaggctggtcaattctgttatcttttcaaagaaccaacttttgttgtcattgattttctctattatctgtctgttcgttccattt

SEQ ID NO: 510294 - DNA, 127 bp, Homo sapiens
tactcgtccattgggaatgcgtcagtcatggccctgaaatactaatcgggattgatggatggaaggctccatcatctttaataaattcaggtctggtcatctcctataagacagaagaaaagcccat

SEQ ID NO: 510295 - DNA, 105 bp, Homo sapiens
acgcatgccaagctctgggaagtcatcacagaggaaggagacccaggtgatactacttgacacacctggcattatcagtcctggtaaacagaagacggcatcacc

SEQ ID NO: 510296 - DNA, 132 bp, Homo sapiens
ttgtggtgaccgtgtgctgcttgattgtgatattgacgcagtcatgcacaaagttgttctggtagctgtactcatccatgggcctgtagtgcacttggaaggggtaacggtgcatgtattcacgatagaaac

SEQ ID NO: 510297 - DNA, 965 bp, Homo sapiens
ggtgagcgcaaagcctcaggcccggtccctcctgagctgcgccgtgccaggccgccgcggatgcagtgggccgtggccggcgtgggctggtgggccgcgcttgctccgtggcttgtcgcaagcggggtgttgacccaggtcgtcgtggctcttggctggggtaccgccggacgtttcgttttccagcgcgtaaggagtatacgcgcaagtttggccgcgcggaggttacgctgggggctttgtgcccaggagcgctggccatttcctcttcggtcgggctcgtggacaccttgcgcggcggtttgcaacccccaagtggccagccgttttgctttgtccccggacggaaggactcgctagcaggtgggctgctcctgtggacactttgcctagggatgagcattggcacattggccgccccacttgggtccactttcctgtgacgggccatcgggcggccaccgaacgattatggtgcgagtggccacttccggggccaccggcctttttggggtactttccctgcgcgccaaactccggggcgccgcgcacatctcgtgcggggcgtggcagacatccctgcgggcattccccaaatccaattcgttcaggtggacacaaaccgattttgcaccagccgagggtttggaaacaacacaggtgacaaccccaccccaaaaagacgagttgacaagtgctatcttatgaaataaccccccaatggtgcgtaacagaaccggagtctagacctacccacagcgtggcccccatgtgcggttggaagcgcggcagaacccatgcctggtgctgcaaactctgctcgggaccccaaaacacaccacgtgtgagctctggagtgcagaccatcacgtcgcacgacgagtgacatacatcccaactcccaccatatctcgacaaccccccttgggcaccatctcgccgcgctcatgtaccaccgccaacac

SEQ ID NO: 510298 - DNA, 738 bp, Homo sapiens
tggccgggtccgaggccgcagacctgattaaggcaaggcctgggataatcagcggatgacggtcaccaagctggaccgattgcacaaggacatgatgatcaagttactgatgagtaactatctcttgtccgtgcctatgaatgaatcaacgagcattggtaacttcctactgacctctgtaaaggatgcgggattgatgatcatgccagtgcataagcagagccgtggctgacagcgcaccaggttcaaggcatacgttgctatcagctactacaatgttcacgtgaatctggtacataagggctgcatgcatgtggacatcgtcatctcttagacatgatcttgggcaagctctacatcagtcctgctcgcacagtatactagaggctacagagcgtatagcctgacgctagcccattgatgatttcgggctactacagctactacgctgctacgtatcagccatgccatacattgtaacagaatcagttcaccgaatgtgcctagatacttattatacagctcgccatgacgagtgtttaacctagcactggatctgactttcaatcatggcagactttagcaagagccaccttgttagtattggtaacgaaccaacgcaaaccaggaccctaggctctagctggaatccggatttaacaacgttccctattagtattcaatcaccctgtcaggtacctcaccatggtctcttccttatggacataagtcttttcg

SEQ ID NO: 510299 - DNA, 360 bp, Homo sapiens
  misc_feature (4)..(4): n is a, c, g, or t
acgntggtctagcactcatcaatggtccagcgtttgacataccgacgttggctttcctacaatacacgcctctaagcaagacactaggctgtcccgaacccctggtaatagaattgtttacctttataccaagaagagttgggaaagcaccaaaatctgcatgttgtgtgtgcccaggcatacttctatgggttcgtgctgtatgacctatagttcttatgagattgtccatcaacaaagaaacatgtcagcagggtcctatggtggctccagtgtgtgctaaatgtgttcgtgacacggatcaacctttttgtgcttatcgaggagcagaaaatcgttgtgaaagtgttgaagccacgt

SEQ ID NO: 510300 - DNA, 113 bp, Homo sapiens
gagccaggctacatccagcaaccatgtccaagggacctgcagttgggtattgatctgggcaccacctactcttgtgtgggtgttgtcagcacggaaagtcgagataattgcca

SEQ ID NO: 510301 - DNA, 523 bp, Homo sapiens
  misc_feature (513)..(513): n is a, c, g, or t
cgcggggccgggctgaggtggcgtgtgggtggccgtgcccctctgcctggagccgcctcaaatcaactttattgacagtaggcggtgaccgacaggcggggtgcacgctgggcacacgtgcctggtcggtgttacttgaagcgtggggactagaagtcagaccctgaggagcatgatctctggaagctggagagaccttaagagttaggccaacctgttgtgggtgctggaatcctttgggcaccaagaagtgcttgcacacgctctattgatggggaacttaacacttcatgagtgagtctagtcttccctggacagtgctgtctgttgattccttataatgcacatcatagctttcattgattgtattaagcacctactgtgagccaagcattgagatatgtgctgtatagctcattctcacagtaccccacttgggtaattagtgttattattatctccattttgaagacggttaaactgaagcagaaattgattaaatgagccgatatnttaatttaaa

SEQ ID NO: 510302 - DNA, 405 bp, Homo sapiens
  misc_feature (16)..(16): n is a, c, g, or t
ccacatgcctggctanatttttgatttggtagagatggggtttcaccatgttggtcaggctggtctcaaacgcctgacctcgtgatccactcgcctcggcctcccaaagtgctgggattacaggcatgagccaccgcacctggccctcattgtggttttgatttgcatttctccagtgattagtgatgtagagcattttttcatatatttgttggtcacttgtatgtcttcttttgagaagtgtcttttcatgtcttttgcccattttctaatggggttatttgtttttttcttttgtcgcttatgtttttagtgtcaaattgatgactttataaaacatcactatgaacacctggatttgggcatacgtgaagggcgcctgtctactgcagcccctatgcttac

SEQ ID NO: 510303 - DNA, 646 bp, Homo sapiens
  misc_feature (381)..(381): n is a, c, g, or t
  misc_feature (408)..(409): n is a, c, g, or t
  misc_feature (411)..(411): n is a, c, g, or t
  misc_feature (416)..(416): n is a, c, g, or t
  misc_feature (424)..(424): n is a, c, g, or t
  misc_feature (445)..(445): n is a, c, g, or t
gccctgatccttcagctaacattagtctggatggtgtagactgtgcctctagggaccgggatttcatctggtgtgaatgaccacctctctactatataacgagtacattgtctatgatattgctcaggtaaatctgaagtatctgctgaaactgaaattcaattttaagacctccctgtggtaattgggagaggtagccgagtcacacccggtggctctggtatgaattcacccgaagcgcttctgcaccaactcacctggccgctaagttgctgatgggtagtacctgtactaaaccacctcagaaaggattttacagaacacgtgttaaaggttttctctaacttctcaagtcccttgttttgtgttgtgtctgtgggnaggggttgctgggggttgtattggtcnntnctctnccaggtanataaaactgacatagagaaanggctggagagagattctgttgcatagactagtcctatggaaaaaaccaagcttcgttagaatgtctgccttactggtttccccagggaaggaaaaatacacttccacccttttttctaagtgttcgtctttagttttgattttggaaagatgttaagcatttatttttagttaaaaataaaaactaatttcatactaaaaa

SEQ ID NO: 510304 - DNA, 163 bp, Homo sapiens
gttgaactcctggcctcaagctgtgctctctgcctcgggcctcccaaagtgttagggattatagggtgtgaggccaccagccagactaatagcaggtgccaatcatgggattttaggtcagtcaccacacagttgaggtgtcccttgttttctctctcacagg

SEQ ID NO: 510305 - DNA, 506 bp, Homo sapiens
  misc_feature (22)..(22): n is a, c, g, or t
  misc_feature (76)..(76): n is a, c, g, or t
  misc_feature (100)..(100): n is a, c, g, or t
  misc_feature (102)..(102): n is a, c, g, or t
  misc_feature (113)..(113): n is a, c, g, or t
  misc_feature (118)..(118): n is a, c, g, or t
  misc_feature (133)..(133): n is a, c, g, or t
  misc_feature (163)..(163): n is a, c, g, or t
  misc_feature (178)..(178): n is a, c, g, or t
  misc_feature (241)..(241): n is a, c, g, or t
  misc_feature (265)..(265): n is a, c, g, or t
  misc_feature (273)..(273): n is a, c, g, or t
  misc_feature (306)..(306): n is a, c, g, or t
  misc_feature (317)..(317): n is a, c, g, or t
  misc_feature (355)..(355): n is a, c, g, or t
  misc_feature (365)..(365): n is a, c, g, or t
  misc_feature (402)..(402): n is a, c, g, or t
  misc_feature (428)..(429): n is a, c, g, or t
  misc_feature (443)..(443): n is a, c, g, or t
  misc_feature (452)..(452): n is a, c, g, or t
ggaaggggtagtagcggcagtnggccggtgggaccagcgccatcacctccgtacggatgttctccctccggaagcnggcctccagcagcgcgggcacctncnttttctcaaanatganggtgatgtttgagtncttggacttcatcagcgccccccaggaggngagggtgcagtgggngaggacgcccccgggcttcagcaggggaaaggcgtggtttttgatgaagtgtgaactggtgtnttttccagggctcctccgagagtnggttcgtnttgtacaggatcccatcaaagttaccgttaggnaggtgtgggtnccacaccctcccacaggccttttaaggggatgaccttnttttttttcngtggggcccagttccggagccgctggaagacgccgtnatttcacttgatgatccaatgctcannaatgggcgccttcngcacctttnacgctgcgatggccatgccaaagcccacctccaggacccggccccctttggagg

SEQ ID NO: 510306 - DNA, 254 bp, Homo sapiens
gacataaaaaattgccaccagctatataaaaaaacatatttaagatcactaatcatcaagaaaatgcaaactaaaactacaatgagttgtcatctcaccccagttagcctattttcaaaaatgtgaaagataacaagtgctggcaaggatgtagagaaaagaaaacccttgcacactgttggtagaaatgtaaattagcatagccactataaaaaacagtatggattttcactaagaaaaaaaaaaaagtcgac

SEQ ID NO: 510307 - DNA, 384 bp, Homo sapiens
ggcgcacagttctcaggagcaaagcaacaggaaacaattcaatgctgtggcttcgattctgagtagctagatttttccagacatgtctttcagtgatgaccctcaacttagctcaggtttgaaggccctaaatgaaactgattatcactcatagggacaaaccgagggggttcggttacatcttggtgatgatgcagttgtctcatacttatatcagattctttcacatttcagtttgctgtgatagggttgggttagtgtttcttctgttgtgaacctttcccctgggttctccattagggtagttccttgacatgaatttcatttgtctctgagtgcctaccttcccagggcaggtgtgcactgggttctgttcccctccaa

SEQ ID NO: 510308 - DNA, 992 bp, Homo sapiens
  misc_feature (1)..(1): n is a, c, g, or t
  misc_feature (87)..(88): n is a, c, g, or t
  misc_feature (101)..(101): n is a, c, g, or t
  misc_feature (125)..(125): n is a, c, g, or t
  misc_feature (128)..(128): n is a, c, g, or t
  misc_feature (133)..(133): n is a, c, g, or t
  misc_feature (138)..(138): n is a, c, g, or t
  misc_feature (150)..(150): n is a, c, g, or t
  misc_feature (194)..(194): n is a, c, g, or t
  misc_feature (197)..(197): n is a, c, g, or t
  misc_feature (199)..(199): n is a, c, g, or t
  misc_feature (218)..(218): n is a, c, g, or t
  misc_feature (265)..(265): n is a, c, g, or t
  misc_feature (316)..(316): n is a, c, g, or t
  misc_feature (318)..(318): n is a, c, g, or t
  misc_feature (436)..(436): n is a, c, g, or t
  misc_feature (450)..(450): n is a, c, g, or t
  misc_feature (462)..(462): n is a, c, g, or t
  misc_feature (467)..(467): n is a, c, g, or t
  misc_feature (469)..(469): n is a, c, g, or t
  misc_feature (493)..(493): n is a, c, g, or t
  misc_feature (515)..(515): n is a, c, g, or t
  misc_feature (567)..(567): n is a, c, g, or t
  misc_feature (569)..(569): n is a, c, g, or t
  misc_feature (591)..(591): n is a, c, g, or t
  misc_feature (598)..(598): n is a, c, g, or t
  misc_feature (619)..(619): n is a, c, g, or t
  misc_feature (654)..(654): n is a, c, g, or t
  misc_feature (745)..(745): n is a, c, g, or t
  misc_feature (756)..(756): n is a, c, g, or t
  misc_feature (795)..(795): n is a, c, g, or t
  misc_feature (831)..(832): n is a, c, g, or t
  misc_feature (849)..(849): n is a, c, g, or t
  misc_feature (887)..(887): n is a, c, g, or t
  misc_feature (899)..(899): n is a, c, g, or t
  misc_feature (908)..(908): n is a, c, g, or t
  misc_feature (912)..(912): n is a, c, g, or t
  misc_feature (920)..(920): n is a, c, g, or t
  misc_feature (977)..(977): n is a, c, g, or t
nttttttttaattttgatttacttattattcacagacgacaccacacaccactgtcacgagggaagaaagagcgcgggcaatccagnnttgagtccccgangagtgtcggcctcctcttcaaganttntaggnggcanggccttgtagtnttggtgggtatccttggaatacctccgcttaataggcgttgttnganantaagatggtgactcgctgncattcatctccagcctttaccgctcggagtgtactttccttgtacangcaaggctgttggccagggctcgctttacatactcctctctgcgcaccttnangttctccttcttcccgccccaggccttcagggcagaggcctgcagggctcggccgtagagaaggtcagggcccagggcttctagcagggggcactttttaatggcattgaggttgatngacgcctcctcctnactctggcctcnattanantgtataggtgatcccagttacagngggggggcactgtgcggcgcangctgttgacggttcgccatggcaatctcctcatgagaaaacttctgagtgcnancatggcctggggtgaccatgtngggcttnagcaaggtgccttccaggtanatgtggtggtcactcagagccttgtagacagcagncagcaccttctcggtcacatactggcagcgcttcaagtcatggtccccatcagggaggatctcaggctccacgatgggcacaatgccattntgctggcaganactggcataacgggccagaacattggcattttccatganggcgagggctgagggggtgtgttccccaatcttcannacacatttttttttggngaagtcagccccgtccttcttgtactgggcacagcgcncagacagcccanccaaccctngggnggtagtcncgccatttgtccctgccagggggaccacgcccttgtctaccttgatgccacaacacntccttggattttata

SEQ ID NO: 510309 - DNA, 208 bp, Homo sapiens
  misc_feature (15)..(15): n is a, c, g, or t
  misc_feature (185)..(185): n is a, c, g, or t
caatttaattctaangcagaaaaagaagtacaaatgtttagtatgacagaaataagagacaagggccagatgcagtggctcccacctgtaatcccatcactttgggaagctgaggtgaaaggatcgcttgaggccaggagttcaagtgatccacctcctcggcctcccaaagtgctgggattacnaggtgcgccgtcgtacccggtgg

SEQ ID NO: 510310 - DNA, 213 bp, Homo sapiens
  misc_feature (43)..(43): n is a, c, g, or t
  misc_feature (58)..(58): n is a, c, g, or t
  misc_feature (85)..(85): n is a, c, g, or t
  misc_feature (97)..(97): n is a, c, g, or t
  misc_feature (99)..(99): n is a, c, g, or t
  misc_feature (122)..(122): n is a, c, g, or t
  misc_feature (125)..(125): n is a, c, g, or t
  misc_feature (141)..(141): n is a, c, g, or t
  misc_feature (167)..(167): n is a, c, g, or t
tgtgtaggtgtcaaggaaccccaaactggtgttgctttggggnctctaaaggagattncgctgacaccaccatttcccccacganccagattctctnanggaggttcgtttctttagagtanganccagagtgtcaagggnctgttagatcctggaatcccttcttncatccatccctccctggtagctaggtcccgatatactcctgtcttg

SEQ ID NO: 510311 - DNA, 348 bp, Homo sapiens
gtgatccgaggattctggcaggtggaaatcaggaccatcctggccagtacaatgaaaccccgtctctaccaaaacacaaaaaaccagccaggctatgtcggcacgcgctgtaggaggctaaggcagggggactacctgaacccgggaggtggaggctgcagtgagccaagatcgcgccactacacttcagcctggcgacagagcaagactcagtctcaaaaacaaaagaaaacaaacaaaaatcttttttttaacttcattttcctgtagacggctaaaacatttcaacttcctctgctctgctgttagcaggatttacctcccttcctcctgatttccaccttgcca

SEQ ID NO: 510312 - DNA, 394 bp, Homo sapiens
  misc_feature (155)..(155): n is a, c, g, or t
acgcttcttgacggcgactgtacaccggccgaggcacctgtagatatgatagtgccagaatatgttcgagatttgtggagccagcgtagtgagaacaccctagctcctaccgctgcacaccagcctgtgaccctggctatcagcccacgccaggnggcgcatgccaggatgtgaacgagtgtgaaacactacagggtgtatgtggagctgcccggtgtgaaaatgtcgaaggctccttcctctgtgtctgccccaacagcccggaagagtttgagcccatgagtggatgctgtgtccccgcacgaacttctgctggcacgtacccatgctcgcagccccaggcacctgctagccccgttctgcccgccaggccacctccggcacccctgccccg

SEQ ID NO: 510313 - DNA, 177 bp, Homo sapiens
gtacttgttcgtgactgggatacctggggcgtcggcaccgcgaacaacccgccgaggccgcagcagcgagccggtcgccttcagcgagcaggagatcgaggcccgcgtggcgcacatccgcgcgctgatgcaggacgaccagcaggaagacgccgtgacggcgctgcacgaattgca

SEQ ID NO: 510314 - DNA, 164 bp, Homo sapiens
cggtccaaatatattctttgcagccaggtatggtaactgtagtccgaacactttgggaggccaaggcaggcagatcactcgaactcctgacctcagatgatccgcctgtctcggcctcccagagtgctgggattacaggcgtgagccaccgtgcttatctcaat

SEQ ID NO: 510315 - DNA, 373 bp, Homo sapiens
cctgtaattccgacacttgggaggcagacgcaggaggatctctgagttcgaggccagcctggtctattatagctagagttccagaacagccagggctacacagagaaatcctgctttgaccaaaccaaaccaaaccaaatcgacaaacacacctaaacaaaacaaaatagagggacatttctgtgagtttgtgtttcaagggtttgaggtaccacctcaagcttcttgcagtgactggcttgagctgaccaaatttgtggttgttctacatggtataaatgtgtgggatgtgtggcttttgtttcttgtcttctgttcatatggtggttctgcaggtagccatggaccagcatcatatctttgccgtcgacgc

SEQ ID NO: 510316 - DNA, 206 bp, Homo sapiens
  misc_feature (30)..(30): n is a, c, g, or t
ggaacttttgtggggaaaaaagcttttaanaaaggaggggggccttttaagagggattaaaattagccctgggagggaggaagggaccaggaggggtggctgcctttttccgtcccccccctctccccccgtggagggtggggccgtttttagggaggaagtccccttctgttccgcccccaaataaaggggccgttccctgggtc

SEQ ID NO: 510317 - DNA, 255 bp, Homo sapiens
  misc_feature (176)..(176): n is a, c, g, or t
  misc_feature (250)..(250): n is a, c, g, or t
agtgaactcccattcacaattgcttcaaagagaataaaatacctaggaatccaacttacaagggatgtgaaggacctcttcaaggagaactacaaaccactgctcaatgaaatagccaggtgtgatggcaggcgcctgtggtcccagctactcaggaggctgaggtagggaaggangatgcgctactgattcgagggaccatacatggttgttttcattcacagacatctggaatttagcaaagcatttncaaag

SEQ ID NO: 510318 - DNA, 843 bp, Homo sapiens
  misc_feature (560)..(560): n is a, c, g, or t
  misc_feature (843)..(843): n is a, c, g, or t
aaattaggtcctaggtgcgaggctggtggtgctggaccagagagccctgagcatgccaccgctgcgcggctagttaccatcacaccccgggaggagccgcagctgcctgcagccggccccagtcaccatcacctgcaaccatgagcatgcgaggccgagacccagcagccgccgcgccccgcgcacgctcacgcgccgccgacaccaagccctggacacataagggagcagcggagcaacggatgctggttggcccggcgctgaccatcaaaagtcagtaagtactcacatgtcacttctgtgtctacaagcaaaggtcactcaacaaccgaaaagtatatgggaaacacgtcaatatagactacaaagtgtaagagaacagacaataatgaatctcccaacacaacaaggaacatgcacacacccaaaggaaacgaccagatagtacgcaaacaccacagaacacgaccaaaaaaacagaacaccaccatacacaacccagctcaagatcaccactatcacacagtgcaaatagcacacaactggaaaaagcacgagcngagacaggatagagaagatgtaagggatagagagaagagaagcataaaaaagcgcgtagaagacgaggagcaataagaaaaaggttagacaaaggagattccaaagagatagtgatagaaaccaaagaatttacaaaacttactaagaagagaacagaaattgaaaaacaagaagaagagaaatagcaaagtttaataaaaaagcatataaatacaaataagattctataatgagttttaatcaaaaagatagaagtaaactaaagagaaaacaatatatcan

SEQ ID NO: 510319 - DNA, 417 bp, Homo sapiens
agaaagagcaagctgcctccatcttctgctgcccttcaggttggcaagaggctccctcactaggatctcagggcggaagagcgcatcacataccctcacttcaacgttcgaggtggtgctctcacaccaaccctgtttcacctaactccatcattcctcccgttattctgacggaaagaataagatcttagtccacactggtcagctgtagaccatggtcttggtgcttgtgtaggtgtgtttggggaacagagcacgccatgccaagagctcttatttcattctgaatgtaatcaaatatatccttactctatgtgggttgtataagtctatattcaaccattcccagatggaaaatatattttaaaaagcatatgtagtaaaaatgcccagaatttttacaaaaagaaaaaaaaa

SEQ ID NO: 510320 - DNA, 347 bp, Homo sapiens
  misc_feature (10)..(10): n is a, c, g, or t
  misc_feature (64)..(64): n is a, c, g, or t
  misc_feature (120)..(120): n is a, c, g, or t
  misc_feature (164)..(164): n is a, c, g, or t
ccccgccatntacccagttcagccagtacgtgtgtcagcaagacaggcctgcagataccccagntcccagcccctccaaagatttactttcccatccgtgagtcctggaatgcaggcatnatgacggtgatgtcagctctgtcggtggccccctccaaggcccncgagtactccaaggagggctgggagtatgtgaaggcgcgcaccaagtagcgagtcagcagggccgcctgccccggccagaacgggcagggctgccactgacctgaagactccggactgggaccccactccgagggcagctttcccgttgccggcccaataaaggacttcagaagtgaaaaaaa

SEQ ID NO: 510321 - DNA, 366 bp, Homo sapiens
gctgttctatattctacaagatttaatctattttttattccaggatttctattaatttatgtttatttttattcagctataacttgcataacctaaagtgcaaaaattttaagtatacacctacagattaagttataaaagatatccagtatcctagtagatgcctttctggttctaccagttgatggttctaaaggtaactactgtcctggcttttgtcaccagagattagttttgcctattttaaactccatataaattgaatcatagtgtacaaggcggaataatgccctttttcccaccccaaataaagatgctcaagtcctaatctttgaaacctgtgactatattgccttacatgggaaa

SEQ ID NO: 510322 - DNA, 467 bp, Homo sapiens
acatgatatagccatttgattaggctaaggctgtagatcatttagccccttttataatttgtcaacatatggaaagtttgtggatccatcagcatctgccataaggatcttttctcctcgagaagtgaatatacacattgtaatcgctccacgttttcgaggattcttcaacagtgttatcacatgtgctcagtcacttgtatatatctggcaataattagaagccaccttagaggtttgatgtcccctgccatcatcaaggactatcacttcataagtggacgcatggatatcgttctccgttttttttcattgtatgaaggcgccaagacagagcagttgtttggtaggtcagtcccatatgttgggtaaagtttctttttggccctgtgcatttaagaaatatgtctcttattcatgtggatggagagcaggcatatttgtagcagttgtacatgcagggactg

SEQ ID NO: 510323 - DNA, 1023 bp, Homo sapiens
ggagacagtatggctgctgcatttctggccctcgaatcgagttctcctgcaggcgctgcatgatttttggttgtatcctggggtgggatgtgctccggctctgtcagctgccgctgccctctcggagctaaaagatacctacttacagataatgtggtgaaattaaaagaatttcaacaaaagaaagtgagctgtatgcatgtaatctattctggcactaaatgaaacgtattttacgaaaacttgaaaaatgaaacttgagaccagaacaagctcatacttgaatgggggagttgataaccttactacatatgtagtgagtctacggtgaccatgtggaacttggctaaaaatgtcatttacagtgtaccatgcagagaacaaaaattatcactttgggggagtataaatttggaccgctatactgagaggttgtgtaacgagttggatctcgaggaatcttgagtgtagctcatgaaagaccagcattaacgaggtttcttctcaagactccacatcattcaatataacgatggatatgatataatcacaggcaaatataaaagtgcttagcaagtatagatagagcatgacaaaacaaggatgtgaagtacacaaaatgaatactatgtaccatgattctgaaatttgatacaagatgtatagccatgaagtatatcgaaaagcctgacgcaccttcagcagacgcaagaccacgcacagggacacaaccatccaaggcaacaatcatgtccgcatggggcatacgacagaccagaacggaacgcagacctggccagcgacccaagcagtagtcgaaagagaaaaaagaagaagaaaaaaagaacaagacagaaaaattagaagacagaacgtatacagtgtgtcggagaaaaaaagggagaaatggccaagagcgaaaaaaagaagtactatgagtaggataaagagaagagaaaagagagtattacagaaagcaaaaagacacagaggggaataggaactcctcgcttagaagtagaa

SEQ ID NO: 510324 - DNA, 419 bp, Homo sapiens
ggtaacaaatcagtgattctcaacttctaaagtgcatatgcatgtgtatgctatttccaactagatgtctaggctgggcacagtgactcacacctataatcccagtacttttgggaggccgaggcgggtggatcacttgaggtcaggagctggagaccagcctgaccaacatagtgaaatcctgtgtctgctaaaaatacaaaaattagccgggcctgttggtgtgtgcctgtagtcccagctactggggaggctgaggcaggaaactcgctgaaacctgggaggcagagggctgcagtgagctgagatcctgctactgcactgcagccttggcgacagtgtctcaattgaaagaaagagagagagagaagagagagagaaagaagaaagaaaagaaaagaaaaagaaaggaaggaagg

SEQ ID NO: 510325 - DNA, 654 bp, Homo sapiens
gcatgagacattgcaggaggtggcaagagcaggaggtttagggttctggcaccacagggaacttgcgaggagagtatcttgttcctccccagccctgacatctggaaaacggccttgtttctttccttccttcccattcccagtagttggagtggcctcaggtcaccaggccccactgtgtttctttctctggtttgctccccgcttgccagggcagcctccagtgggctgctttcacctcggtccagctgccccaggctcagaggagtcacggtccagcagagccgggcagtaaggagtgtgggagcagagggacaagctttgttgttcacagggtctgtgtcccacctcgaggcaggtgcctggatatccgctgttcctcttcctcctgcagcaactcagccaagtaggcaggcccaccacataaggctgggcatctgtgcactactcaaaggctcctggctgtggtggcagaggttaggtcccacgtcctagaggtggtaggtgtgaaggtggggcctatggctgtctggtcccacagtcagcatggtcatgtagtgaccgatgtagatttccagggccggtggctcccggggcgcaagaccttagcttggtgcactggcttaatctcgcccgaccttggttttctctgac

SEQ ID NO: 510326 - DNA, 359 bp, Homo sapiens
tgactcagcctctggagcagctggactacaggcgccgccaccacgcccggagaatttttggtatttttagtggagacgaggtttcaccgtgttagccaggatggtctggatctcctgacctcacgtgatctgcctccctcacgggtatgagccatcacacgtggccttccttagttttttttttttggagggggagtctgggctcggtcacccagggctgggaatggcgggggcataatctcgggctcactggcaaccttcctcctgggtttcaaacatattctcctggcctacagctcttccagggtacgctggagactatagggcctctggccaccaaggcccgggctaattttttg

SEQ ID NO: 510327 - DNA, 171 bp, Homo sapiens
accggatcttatgaggaacgtcactgggatgcggaacgttatgggatgaggaacgtcactgggatgaggaacgtcactgggatgaggaacgtcactgggatgaggaacgtcactatgagagggagcaggctgccctcacgtggaaccattctactcctctgcactgttccc

SEQ ID NO: 510328 - DNA, 182 bp, Homo sapiens
acggcccagctgtggagaccatccagacccaaggcactttcagcgtccagttccgcggcaagatgtgcagtgttgactacgcggatttgctgcagactttccaggttttcatattggatgagctgacagcccgcgttttttcgcagatccaggtgaagccttttggcaccctggttcccatt

SEQ ID NO: 510329 - DNA, 174 bp, Homo sapiens
tgttagcggcgcctttttttggtagagatagtgtgcactgtgttgctcaatgttggtctcaaactcctgggctcaagcaatcttcctgcctcagcctctcaaagtgctgggattacaagagtgagccaccgcctgcagcctcagagtctgattttctttctttctttttttttt

SEQ ID NO: 510330 - DNA, 1878 bp, Homo sapiens
  misc_feature (883)..(883): n is a, c, g, or t
tataacattattagtataaaatggggaaataggtagaagttagcggtggaaagggcgaatgcaggtggtggggaggaaagtgggggtgggtttgggtagtgttctccaacacgtggtctattttcattttccacgtgtgtgagaataagtggggacagatcagtggtgacatgtggagggtggaagatcagacattacggcggtgtcaggtatagacaagttagacagggttcacagagagagggtctgccagtggcgtggccctatcgaagtggcgcgggcgcattgaagtgacaggtctctcatgtgggttctcttgcggtgcaaactctttctctccgccaaatcaaagtggggcgcccccatctgtgtgggcccaacacacagccgcggtgtcacaaggaggcggggacgcagggccgctctcctcaaagagggacagcaaagagagagaggcgtggcgcagtgcggcactctcaccagaggcgtgtgtcttcacagccccccaggtgtgtcacagccccctgcagcgtcatcccagagcggcgtggcgcacaccaacaacaccagccatcagactagaggaggcgaccccccgcgggggccgccgcccgtgcagagcacgtctcaccacacagacgaagtcgggagacgtctcccacgccgtccaggcgaaacaagtagaccgcgcggccaccacgcccccccgcactcctccgacggcgcctactacaccactccactccaccaccacacgacggctcatcccaccaatacctctcaacgagcgccacacagtgcgcgcctccacccactcacgcctcccacagagcgcgcgtgctccttgaccccagccgcgggacccaccgacacacacactcgncgctgcctaacacctatactacgtactgcaccaccaacccctcaacagtcggtcgtcaggcagccgactcacaccacttgccccgacacagccacagaaagcttactactgtgagcccccaacacaccagacacactacatcctagccggcgccgcgctcaccacacctcatcacgggcagcacagtcagcagccggcttactctcacacttcacgtcacccccccaatcgccctccccaacactcggtcgcgcacccccgcgccacctaacatagaaacacggagccacacaacacaccaccctgcggccacgccaacccaaaacgtgccccggcgccacgcacaacagcggcccctccacaccgagcacaacccacgccatggacgcagggccaacacacacccacactagggcgagagacgcaccaaacgcaagcaccacgagagcaacacaacactggccgagagccgccaccagcagcccacgcgaggcgcaacacacagcgagacgcgacatccaaacacgagcgcccacccccagtggccccccgagacaaagctcgatcctcacacgcagagacacgggatctgtcaccccactacgtgaggagcacctaccccccacccacccagtgagcaccaccgccaacctcaacaccggtagcacacacaaggcgggcggcgcgcacaacgactcactcgatagagaagcgtacacagcgacggaggtgaacagacgccagcccgcacttactagctgcgacgacagtaagacacacacgagaccacgacagacaacaacatgagagcaaagcagcaccctccacagcccagcgccaagcaccacgtccgccaaccccgacggctcacgcccgtccacacgaagcaactacccactcgcctacgcagcgatcaggcgcccaccgcacgcgcactgtcacgcgcgtccacgccacggcgctcacctaccgactgccacaacaaggggccccac

SEQ ID NO: 510331 - DNA, 387 bp, Homo sapiens
aatgattcgccaagggacacttctgttcctcaattttatgctccaaggtgaatgtttcttggtaataactcattctttaagccattgcacaacagttctgtcatattttctccattcattccaccaaagcctttaaatttctccaaattgcaacacatgagttttctcatattttccaaatgtgatattgtgacctatagcagccctttcagagctttagaaccaagtctctgggaagaatagttgctctctgaagcccttcttgaagattggccatttggtttgtcctctaaaatgttctcggaaaggtaggtggaggaaaaggagctccacgtgtatagcgcgtaggggaaaaggccgctctcgggcgccacagccacagctgcg

SEQ ID NO: 510332 - DNA, 662 bp, Homo sapiens
cagagcaacagcgggctatggcgccccggcgcttgcaccaaacatcaccatgggtgtcgtctgcaagcttcctcgtgctgagcagagcagttctccccatcagcgcttccagagaacccagcggccctgggtggtggtgctgatggcggtgctgctgctcctggccttgcttgaccgcaagcctcatcctttaccggaggctgccagaagcaatcgaggcgcggggcttttgagggtgccccgtaaagcggcaggaagtttccagccccaacgaggccactgagaagaacatcctggtgtcagaccatggcacactgattgagcagcaagaatagagcccaggcgcgtgggcaagtggccatggcgggaaaggaagcttgggaagcttgggggcccttggggtcagtctggcccccaaccaagtgtgctgtccagttggcctatgggaggggtgccttggggagtccgctgttgggagccggaagctggggcaggagccttgggtggtgtgggggttgcaacctttcccactagggtctgggtgtggagacccagtttgagttgcagcgttggtgtgtcccctttttctggggggggcctgaggtctggtccacctggttccttgttgcccccacgagggaacccagaggtcggttggcagc

SEQ ID NO: 510333 - DNA, 121 bp, Homo sapiens
attgtgtgatgcaacgatggaagatgtgaatgactggctgactgacctgtgagtactgtgtacgtgactcggtcattaaaacactgccctcttgtctgtgtgctagcagttcctcatcctt

SEQ ID NO: 510334 - DNA, 560 bp, Homo sapiens
ggtgtctagaggtctggatgaggagtcactcaggagtggggaacagagagagcagaggatagagttttctgcccatcccaaacagaagtggagagggttggtttgctgccctctccctactggccattcactgagtcttctcagcagacatttcaaattattaataaatgggccactccctcttcttcaaggagcatccgtgatgctcagtgttcaaaaccacaggcacttagtgatcagctccctaaaaccatgcctaagtacaggcggattagctatcttccaacaatgctgaccaccagacaattactgcatttttccagaagcccactataggctttgtagtgctttcggcccagttctgggctcagcctcaaagtgcaccgactagttgcttgcctatacctggcacctcattaagatgctgggcagcagtataacaggaggaagagatccctctcctttgggcagattattatgtgctcagttctctctccctggtaaccctttctctgcagatagatagacactggcattatccctttaggaagagggggggg

SEQ ID NO: 510335 - DNA, 1410 bp, Homo sapiens
atctgtggggcgccttttttgtgctatacctgcttctcttgtgtctccctatttgggggccctttggggggttctcccccgccttattaataggggggccccatgccgcctgtttgtatatctggcgcgtccccgtttttttccatcttgccttggtggcgccacccacagggtggtgccccacattggacggcgggtctcttgcgccccccggggtgctcctccccccgcctcccgaccttttcgtgggcagagcccacatgggggggtctcacactgtgcaagccctttgtcccccgagattgtgcccctaggtgccgctgatcttagagtttgggatcccaacccccccctttggtttatcccgggaaagccccgggaagagggttgatattcccgccctagctcccccgtggtgtcagctgttggggcccacagaggcccccccttgggcccctcccgccccctgggggaatttctggaggtgtaccagaatatggttgggtttgattgggtagaatagccccctgcacacctttagtttttggtgcacacacggttggaaaggccccccacaagagggcccccctgtggggcccccccccaaacacctgaagagtgttgtggcattttggggcatggcgtttctcccccgttgaccccctctaacgtttttgccgtttctcgcgcccaccgtcaaagcgccatggtttgccccccccctcctgtcacagagatgggggccacccccagtgtacacacaagggaggcgtctacaccccactgcgccccgcgtttctcacatactcccgcctttccgtggcgttctccttcccctggcgccccccccccacaggtttctctgggtgtcccccacggtgtgttcccccctctgggttgcacccacagactagacgctttctggagccacgcttgtgtggttgtgttttttttgggtgtccaagggtgtcccactcttcttttgagacactccgcgttcacttgtgctcgcctgggctaacccggcgcgcccacaatgttcactcctccacttgcctccccgtgttctggcccccgcgttccccttcccccccgatatattctcttttggggaaagaaggggtcttgggcctggccgcgcctgggtgaccccagcttacccccgcttccccgcggaagattggggccctgccccttggatagctgccagcccgagtgagccccgggggcccgaatcgacccttaaagaggttttagagggccccctctcccccctcgtttcttttgggggaggggttagaccctcgaaattgtccccccccggggctccctctctggtttcctatttcccgattaccttgtaattaaaacaaatatcccttttttggtaaaaaaaaagaaaaaataaac

SEQ ID NO: 510336 - DNA, 726 bp, Homo sapiens
ggttcagagcagcagaagccggcgtcgtcggatgctgtgttgcccgccaccatgagctatcacaggcttggtccaggtatctgagaaccactttgcagtcgacgaggtactcggtataccagacgctcaggccacgcatgtgattatggatatggaacttggaactctggttgacaaatagaggctacgaggggctatggctatggctatggctatggccaggatagcaccagcaaatatgggtatgggtatggccagttcacactcttgcggaaatgcctagacatctgactacaagaatgcaagacacatagtgcctcgggtagcgccgtgccgattaccgttttatccagaaattaaccagcgcttagatatggtgccgcatttggagacagagcatgatgcacaaggaggcgtgtacggctcaggtggcagaagaggtatgactgcttatgagtacctaggactcgagggccgtgctgagtgagcgcgagctgtaccggtcaggctatgactaccatgcgagcttgaggcctgaagatggaaatgcgcctatgagggacaatacgatgaactaccgggagcagttctcgcaatgcgtggtagacaggagcagccttcggtcccaggggacagggcatgggcccgggatgcccggagcggccggcacaaggcctcaggctatgggcgcaatgtgggaagaccccatgggggcccggggcccga

SEQ ID NO: 510337 - DNA, 165 bp, Homo sapiens
tcgcgcacacgtctcgcgcacacatcctatgtaaacgtatgtatgtgaatctctgttgtgagagcctataaatgtcaaaaggttggtatccaggtttatatgcgatgatccaggtgcacgtgtgtgtgtgtgtgtgtgtgtgtgtgtgtatgtaaaggatgtgtg

SEQ ID NO: 510338 - DNA, 515 bp, Homo sapiens
  misc_feature (60)..(60): n is a, c, g, or t
  misc_feature (83)..(83): n is a, c, g, or t
  misc_feature (352)..(352): n is a, c, g, or t
  misc_feature (377)..(377): n is a, c, g, or t
gggtacaatatatattaaataagcacacatacaacaaaagtaggtgttggaagcttacanaaatgtgaccagtagcttgctgnaacctaactttttatttgttcatggaactttctagaccgtaactacactgaataatgagaatctgctgtaatctttttaggtgctgtagatgagccattggattaaattattacagtatgtttcagactgctctatgttgaaccctagtgaaatgcctctcaaaccctcctaaggatcacaatctcatgtccttttttttgttattaaatgcccagtatgtgttagtgatttaaacaaaattcaaattttttttttttttttttttttnggagacagggcgagatcctttctcnaaaaaaaaaaaaaaaaggcacaaggagccaaatggaggccctgggaaggtgccatagggggggacacccgtgtgtgtgtgacccccaagttagttgtcccccccaaaacccgtggttccttgtgccccaggaggggcg

SEQ ID NO: 510339 - DNA, 1089 bp, Homo sapiens
cactcttagaagtttccgaaacactttgatgggtggccaaaagatttttttaaaatttgcaacgcagaatctctaaacatgaagcggtccacattggtaagtattggtctaataatttcacaatcaaggtttttatgacctgatttcctatatccctgaattccaattcgaatccttggaatgcaaacttcgaggcctccataaaaagtgatggaataaggccaatagaggtcagaaagatgtgggctgatgaaaattaagaagttcggaagcattaaatatctcaaaggattctccaagcaataagaaagagcatccaaagacttctttagagtacagcaggccagactatccatcgatttggtaaatacttactcagatgatgagtacaattggcataatccagaagcgccttgaagaagatgtcttttgcacgagagcaaaagggagaaaagtcgccggaaaattgttaatggtaccagttaatgagcccacgtaagcacaagtaggaggcttcatcgggaggaacagctgattaaccggctgatgcggcagtcccagcaggagcgctaggattgccgtgcagctcatgcatgttcggcatgaaaaggaagtttgtatggcataaacagaattcttcagagaccaaacaacatgaggaaagacgacttacaagatttccaggatgctcttgatcgagaagcggctttggcaaaacaagccaagattgactcttgaagaacaattccttaaagaaaagagatttcatgatcagattgctgtggaaagagctcaagctcgttatgaaaagcatgattcagtatcgtgcagacaatctttggtatcacaatagttgactttgtccactaaagtggctagactatcgaatgttgacaaataatctgagttccgtactagagcttgatgacatgactgggtaaggtaactacttttttaatgctaaaagcccatatatgaacaagccctatgttaagacatctacctgcttacccctcaagagacaacttacagaaactggagaaaagggacttgctaaataccaatgattatacgtcataggggtaccta

SEQ ID NO: 510340 - DNA, 1457 bp, Homo sapiens
agcggctgcatctcaggctgaccacagggcaggtgccaagttacgtgttctcatgcactccctctctcaccacctgaggaggcaggtatgattaaccaccctagcagcaaaaactacacagctgggcgacagcggctgccaggacacaccaaagtccacggctaccaactaccctcggacggtgaccatagctcagcacagacccgagaggtacacgcactgacacaatagctaggccacgcaatacttcacttatgcatagccctacccaacacactacaaccgaaccttggaagacgactagcatacccacatgcagacaacacataaactacgagcctcacacagcccactcactgccctggatcggatatggcccaaaagcgctatccccggaaacggacataggacagacacagaccatgcacctgtcgcaacacagttggcaacacacgcaactcggcacagactacccaagcaatcttcacgtcaacaaataatgggctaacgtaggtacgacgccaccacactcggagccaccacacactaggccgcgttattacccccctaagagtgcaatcgcacgcgcttccgcaggcgaccaccgcgcaccccaaccgcgactggcagacgaagaacaagcaaataagcacgcgacgcacacgccacaacactggcccgcttcgggtctaacaaccacagagcgcagataccaaacaccgacaacaaacccgagaaaactcgaacatgtgcaacagccacacacagagaccagaacgaaacaacgagaggcacaaacaccggcagaacaacagacaaccacacaacgaatcaccgcaccaatatacagcacacacacaccaacacagatatcaccgaaccaaccaaccatgtgcaccgacataaaaagccaagagaactacacggatccgcaacaaaaagaagcaacaacatacacaccgcacgagagcacaagacacgaaatcagtcacagcaacccaaagcaaataatagcgaaacacccacaccgacagggaggactcaccggaaagaccaaacaaacacaccacgaccgacacgaccaccagccacgaaagcagaacgaagcgagacaccaaaacacaacgcgcgaaaacacaagaactattacagaccaagacacaagtcaaatcacacaaacaaactcacaaacaaatcaatatctaacaccacacgaaataaagtaacccaactaaatacacccatcgaaaacaaacactaaaagacatcactacaactacacaatcgacactagaatcaaacactactacaaacacacaataagcaactattacaactatatagtaccacaacggaacacaactatcatataagacaaacaacacttagacacgacaaaaactaacacaatcaacataaccataaacaacattacagaacgataaaaatctaaaaca

SEQ ID NO: 510341 - DNA, 374 bp, Homo sapiens
aggattcataaccagtctcgtcagatctcgtaaatcaggtgtctcatgaccattgtacatgaagctagattgaaaacatgcttagaataatgcgcacagaacttatcttagtgtcgagttgcaaaagcctcctacacaagttaacctctagcttcagaagtgaactgtacatcactgtgcgtcaatcaagatgaaaaattcattcaagtaaagttgacaccactcagaagcattttcaagtatggctatatagtcaacctgatattcctatattagcaaattgtagatctgctttccattcattctaactgaggcaggttttatatttacaattatagatctgatatttacaatatgccactcaatttcttctc

SEQ ID NO: 510342 - DNA, 719 bp, Homo sapiens
tgtcggtccgcagttatggatttgtgaccagcgtcggtgtagctctggcgtttctagttctttaatcgtgatgttagggtgtcaaacatagatctttcctgcttgctcttgtgggcatgtagtgctataaaatttccctctacacactgctttgaatgcatcccagagattctggtatgttgtgtcttgttcttatcggtttcaaagaacatctttatttctgccttcatttcgtatgtacccagtagtcattcaggagcaggttgttcagtttccatgtagttgagcggtttgagtgagtttcttaatcctgagttctagtttgattgcactgtggtctgagagacagttctgttcttttacatttgctgtggagtggtttacttccaactatgtggtcaatttgggataggtgtggtgtggtgctgaaaaagctgtatattctgttgatttggggtggagagttctgtagatgtctattaggtccgcttgatgccgagctgagttcaatttctgggtatccttgttaactttctgtctcgttgatcctgtctaatgttgacagtggggtgtcaaagtctcccattatattgtgtggggagtctaagtctctttcaaggtcactgaggacttgcttttatgaatctgggtgctcctgtattggatgcatattatatctaggaacgaaggtctctctttgttagcattgatcccttaac

SEQ ID NO: 510343 - DNA, 104 bp, Homo sapiens
ctcaggattctgcgaaccttaggacagtcatgctggctcctttgcacaatgggccagctgacttgtgattgagtaggtgcttaaggtgtcgcaaaactaccttg

SEQ ID NO: 510344 - DNA, 120 bp, Homo sapiens
gtcgactcgcgcacaaatgcactgaactagaagaacacccgctaaacccacaaactaagccaataaacgaactaaacagacccgtacgaagcaaacagggacaagttatcccactcagaa

SEQ ID NO: 510345 - DNA, 183 bp, Homo sapiens
acacacgtcgagtactctcatatctgcgcttccacgtgtgcgtcattcacacttatagctatctgcttgaccgatctctgatagtgctgagcactgctgcgtacacgtacgcacattatgcgatgagttcatgacggacgtcaacgtgcggcgagtccgatttgcggaccgtttgggctttag

SEQ ID NO: 510346 - DNA, 195 bp, Homo sapiens
cacaggatattgagctgaagctgggcaccaaagggaatcagctagatcgccctctgctgcaagcatgagatacgctgcataggctgaatcgaagaagggaaagataccagaaacaaagagacagaaggatgaaaatgaagaagagggaggtggggttgacggcgtcatcccgctggaggatctcagctctgggat

SEQ ID NO: 510347 - DNA, 323 bp, Homo sapiens
atcccccgcacgacacatactcgaagatactgagtaaaagatatacctaccatcttaccaggcaatgtgctcttggaggaaagtcattattcatacccagccaaatctagcatcagattgtggaaccaacatctcacaaaacaccatatgcatcaatgcacaaagttcagatcatgttccatgatcaggcagagttacataacatgcttcgaggaacacaccatgtctgctagatcatgccagttctgctattgcttcaagctccatctctcacagcatcagctcttgacgtcacaggggagaggggcattactcctcctcat

SEQ ID NO: 510348 - DNA, 919 bp, Homo sapiens
  misc_feature (1)..(1): n is a, c, g, or t
  misc_feature (3)..(3): n is a, c, g, or t
  misc_feature (8)..(8): n is a, c, g, or t
ntnctccncccagaagaaatacagagcttgaagcaggaggcgacaaggagaaggtcagtagtcacttgtgacgagcgcccgctagggagggtaaacacctgtggagggtcgggtagacaccgccggggccggccgccccaagggggttacctgtccgggaagaaaatgttggtgccggaaacaaggttgcgggccgaccgggggggggcacagcacccagcacaaaccggggcgcacgtgggacccccccaagccgggtcgattcgggacgcccgccaggtggtgagtgccgccgcgcgcgcgagggggccgctttgtcccggcccacaaaaaggacgtcccgaagagagcagccccggggtggggaaaaaaagctggttcaagcagggggggtgcacacgcgccgccgcgcaggcatgtgcccggccgaaaaaaaagcactggccgaagatatttcccaacagggacacaaaaaaggagtcttgtcagcgcacctctgaggggacaacacttgtgggggagaaagcaactaattcctgggggaaccgcaggaggatacgacaactcaattagagcggtttgtttttattgaccgcccccgcgtttccccagtggggttcgatgaccaagacacaatgctctttgtgggtctttatagtacgaggcgaatgaacgcccacgacacatccgtgagtgagcgatcttatggtgctgaccaataagcacccgctttgtagacacaagaaagaaacaagagaggacgaaaaatatacctggtggggatagaattgattcccgattgaccacccaggtcaatactattttactgcagtgccgggtgcccctgactcctagtgttttggaaacgaacccacttgatgaacttaaaaaatcaaaaaaaaaaccgcccacaaaaaca

SEQ ID NO: 510349 - DNA, 486 bp, Homo sapiens
tctcccctccccccctttcaccatttcccctcggaggcgcttccccgggcaggggcaagagccgggtctcacccccggtccatctcccaggagaccccaggaaggacactataggcgaaagggacgccgcctacccaaacaggggctcagagtcaggtgagaggccatccaggcacaggggggatcatacacggagaaacaaaaagaatcggcatagactcggtaccccaagtgaggacaaggaaaagcacggtatgagtgttcaccacggctctcagaaagcaggctaagagaacacgggaggcacaaacgagcgtacacacacaacgaaggaaacacagacaggcgccgcgaaaaaagagcgcgacacaaaaaagaggaggaaccagatgctcagaccaccgtggagaatgagagacagaaacaccacgagagtccgccaaaaatacagaaaactgaaaagaaaggaaaaccggggaaacccat

SEQ ID NO: 510350 - DNA, 542 bp, Homo sapiens
aaaagggaaggaaaaaaaaagaaaaaaatcagagacctgtaaacatttaagagtgaattggacatccccacaggctaaacctagagttgtcagctttcattccattctgctgtgatagagtgttctgcccagtatgtatccacatggagcctggaaagtaacaagtctggtcatgtgacaactggctttggtgctttgctttcagcccctcagaattagttcctaatggctcacatagctccctgccagcatcccgtcactggcacgttaaaccttttcaaataattcctcagaatagagattcttaggagagcactaaatttctccattctttgtgtttaattaaactgttcttgcattttaatatttgccagataagcgcttaagacattacgatacaggttgagtatccttaatctgaaaatctgaaatccgaaactttttgagccctgacatgacgctcaaaggaaatgctcattttcgattttggattttcagatttgggatgctcaaccagtaagtataatgcaaacttagtccaa

SEQ ID NO: 510351 - DNA, 944 bp, Homo sapiens
  misc_feature (130)..(130): n is a, c, g, or t
  misc_feature (161)..(161): n is a, c, g, or t
  misc_feature (186)..(186): n is a, c, g, or t
gtccatataaaccataattgtgatttaccttaagtaggtataactcttatgggatatacagtatagtttttgtgaatctttacatgatagcattatctttttataattttttttcctaagataaacaaangcatagttttcttctatgggtgatagaaacngctttttgaagtaatgaaaacctcnaaagatcatgttgattcttaatttttgccttttgcataagcctctttataacatgtatctttaaaacaattaagtctttaggaatgtgtaaccagaactatgttagtattgcttataaaactttagttaggttcaatatatacatatatacatctctatataggtatatagatttgcattttgtcttgtaaaattttatttgaataaattcttcctgtaggtaatgggaaacaaaattaatagttcatatgtcactcatagcatttctatatttgaaagtagcccaatataaaacttttgattctaaaattaaaccagcagcctattacaagcacattctttgattgagtcattggttataaacttactaaatgcagagaaagcagccaatttaggaaactctgagttggtgggacactgttgattaataatgtactgtatgaattaagtgatgctttaatttgactttaccattttacacgtctacacatgtgggcattatgtcagcaaactttaaggcatatgtcaggcagctaacacattttttcctgtgctttaatgtatttctttacatgatcgagaagatccgttgctagaaatagcgcgggcaccggggacccctggaggagtggcccatgggatggaatagcttaaactaaggatccggtaatgtagcttaattaattagaaccgtctgtcacgaatatttttacattgacaggtgactcatatgggaagaacatcatctttcaaaggaa

SEQ ID NO: 510352 - DNA, 699 bp, Homo sapiens
tctcaatgacaaatgtctttttaatgaatctatttatcttgtgttatttctgtctattaaccaaacttgatgtatgtctctttctaaaggggtcagaacactgtcacccccagatttatgtgttcttgcgtattgattattttgagctggtagacacttgagaatcacggtcagatacagaaatatacgctttgaacaccttttatctaaaagcagggcataaacatttccagtgaaaaagatgcccttcttgtaccaggactgagaagagcatctttatcactggagacttggacgttgacacgcaagaatcaatgcggtacaaacaaatcgattataatagtccttgatcttccagtgagtctctcccatatatttcgctagtcactgtcccagatttactggcctttggcccaaggcctctttgttgtcacatcctcacaatgtatggtggttgtttaacccagactatactagactattgaggcctaattaacttcttcagggtcttaaatttgccttcatgaagacgtcccgtgtcacattattgtaaacaaacgcttaacactttgtatgtctttctcttgacaactgaaacacgggcagatcatgtactattatgtttctgggggcgagttcgggcccaaaaatggactgatgccactttttttgggcaggggccccaattttggcaacgtg

SEQ ID NO: 510353 - DNA, 108 bp, Homo sapiens
gatgatggaattggacgactatagaaaacaaacatcaaaacaagtgtagaatgtgagtatttttagtttaataatgtgtattttataaactatttattttgtatttga

SEQ ID NO: 510354 - DNA, 785 bp, Homo sapiens
agcggggtagagaactgctccggcaggggcacgggctccgtatgcaccatctgctaggacccctccccctgcgggcgctcccgatggcacagtacgtgatcgagagtgacctgcactcgctagttcagctggtattgcaccctatcccctagagtgcgtcctccgcctgctgctgctgggcatggtctcatagctttgagtgaagccgcgaggctcgggccccttcatctgtgcgggccgcgccgactcgatcgctctgcgccgggaacggcactcctgtggcctgaagtcttgtgctgatcctgttcccatgttttcatgaccacgtaccttacgcaacacgcgtggtcggtgacccgctatatcccgaccatcgcagtgctgcccatatgtaaggtgggcagcgttccttcctgatgcaatggaggaaccgagcctgaagacgagccaggacggctcactcaggaaggaactatcataccaggcttgtggggctttttgaaaccccgttgaagctcagagttctcgagtgtcagcaagggacaatgccgaccagaatcccttgccggccttccacgtggggagaaaaagcaagctaacataggtgcgccaggaagggggttaacgcaagaacccaggtagcttgcatacacggtaaacgtccttaagtcaagggcccaaaaaacaaagggggcccaaaatttctccaccttttgggcaccttctcccaggagcccccgttcaaaaaggaaacccttggcccgaggctcaaacaattttcccat

SEQ ID NO: 510355 - DNA, 128 bp, Homo sapiens
agagggggtggccgccggccccccgtttcccaagaaggggggcggttttttttttagggggggggggcggttttttaaccccccccccccccccttttaaaacccaaaaaaattttttttccccccca

SEQ ID NO: 510356 - DNA, 140 bp, Homo sapiens
tgtataggaagatgacgaaaaagagtcatgagatccatgctatatcccgagcatctacgtcactgagataagaaagggcagccgccatatcttccctcccacccctcatagtgtctcttgcccatcttgcatttatagag

SEQ ID NO: 510357 - DNA, 339 bp, Homo sapiens
  misc_feature (52)..(52): n is a, c, g, or t
  misc_feature (76)..(76): n is a, c, g, or t
  misc_feature (152)..(152): n is a, c, g, or t
  misc_feature (163)..(163): n is a, c, g, or t
caagcagttatacagactcaccttaattttacagtccatggacaagacagcnataaatggccagagagaggaaacnatctgactgcactgacgccctataaaaaggtattacagttatcaaccagaagcattcaaaagatcagctcaaatgnagcatcaaganaagacagttattaagcagctattgctatttttcttcattcccaaaatctcaccccagataactttcattagcattccaagagcaggccttattgacactaagcttttgaagattttttttttaacctttaatattgagttcctcacccaatgggatcctgagtctgataactgctt

SEQ ID NO: 510358 - DNA, 499 bp, Homo sapiens
agcgggaacaatcacttataataaactttaatttttttttttccctcggaacaggggtctgggcctggcagggactccaaatcccataatccttccagtggtcccctccactaagtaaatttcaaaaaaaaaaggacagtttaataataaggtgatggacggaatccagacaaatatggcagcggagtaaagacttcatctaagtagggacacactggggtcggacaaagaggagtccggggggtggcggtaggggaggtagtagacctcttaggaggttctccctttagggtagtcccagcaatagaggagggggggacataaactctcatgggggtggtcttttaaggtctaaagtggtccatttcatctaaggacctcagggggccaagcgtctcagcccaggcccaacttttttcattttcctttttcctttttttggagatggacttcactcttttcggcccgggtggaggtccaagggccagggtctcagctc

SEQ ID NO: 510359 - DNA, 594 bp, Homo sapiens
aaacctgttgctgctgcttgctcaggtggcctgcttttattcccttatctggccccacccacatcctactgattggtccattttgacagggtgctgattggtgcatttatgaaccttgagctagatacaaaagttctccaagtccctactagattacctagacacagagcactgattggtgcatttacaaaccttgagctagacacagagtgctgattggtgcatttacaaacttcgagctagacacacagtgctgattggtgtatttacaaacctttagctagacagagagtgctgtttggtgcctttacaatccttcagcttacaatccttcagctagacacaaaagttctccaagtccccaccggattagctagacacagagcactgattggtgcatttacaaacctttagttagacacagagtgctgattggcacgtttacaaacctctagctagacacaaaagtgctgattggtgcggttacaatcctttagctagacacaaaagttttcaagtccccaccccacccaaaagcagctcttaatggcacttggcttgccggactttggtcactaacccgggccttggcag

SEQ ID NO: 510360 - DNA, 230 bp, Homo sapiens
tgaaagctggtcatacactacatttgtgtcatctgtgtgggtgatgctgttgggggcagtgccctcctaattggggtggtaggggctaggctggagtggtccaaggctcagcaggaatcctgcgaagaacaaaaacttctgcaggtaatcaactaggattatccctgtatcgacaggccgttttttggacagtgtggggtgatccatctagcatgtcgaccgtgtcaggc

SEQ ID NO: 510361 - DNA, 384 bp, Homo sapiens
  misc_feature (169)..(169): n is a, c, g, or t
  misc_feature (228)..(228): n is a, c, g, or t
  misc_feature (239)..(239): n is a, c, g, or t
  misc_feature (287)..(287): n is a, c, g, or t
  misc_feature (306)..(306): n is a, c, g, or t
  misc_feature (335)..(335): n is a, c, g, or t
  misc_feature (357)..(357): n is a, c, g, or t
  misc_feature (363)..(363): n is a, c, g, or t
catgctttcaaaagattgaattggagtagtcgccctcctcctctctacgtggtgaatttttattggtttttcaagacccacttcattgatcccattcttaacttcccggagcttccagttcatgagtctactatagcacttgttgcactgaactgcattctaaagctgnactatccaatatgatagccactggccacctgcgactatttgaacacttaaaatggtggncagtgcagctnaaggacagaaattttcttcattattggcattacttacattttaagtgntactcagtatcaggaaccntttcaggatatttggagaacttggtatgngaatttactttttcaacccagnattttnttaaagctaacccggggacga

SEQ ID NO: 510362 - DNA, 296 bp, Homo sapiens
acaccagctatgcccccgtgggcaccgcctccagcttgccaccaaagacctgtgactttgttcaggactcctcctattttgaggacttttccaacatatccatattttcctcttccgcggactccctgtgggacatatgggacacacccgactttttgccgggtgacagcctcaaccaggggtgcaccatctgggacaataaccctgccccctccacccacaataagctgttccagctcaacaggccgtttgcaggctcttaggactttctgtcctcccggcactgttggactttg

SEQ ID NO: 510363 - DNA, 274 bp, Homo sapiens
atatatagtttgtcccgattagctttcctttggggaatgaagttttgaaatatttaaacccgtttcctcctccattgaaaagtcccccaaaaaaagaactattgggaaaccctggtgtggtggtggaaaaaaaaagccccccccgttttttggagggaataacttaaaaaaatacttaaatggctaagttttcttggggcagttaaaaattaaccttgtccattttacccttgctgttccctctgaaataaacttatgtgatgttttggtagta

SEQ ID NO: 510364 - DNA, 304 bp, Homo sapiens
acggggtggcagggaattttgtatgatagcatttgaattaagttttctttcctcaaaattccgtctttattctgatgtttaatacaatttaaaatgtaatgttcaagagcccctgtcattcctgtaaacatttttattaatatagaatgtttaaagatcttgtgttctaagtccattatactttaatctttttaaagcattttaattcattgttctttgtgtcatttatagggaatcacagggcctcagattcgccctggtatgaccgtgattagaacaccactcccgtaccagtagtaccgag

SEQ ID NO: 510365 - DNA, 327 bp, Homo sapiens
  misc_feature (14)..(14): n is a, c, g, or t
taaatttgcaagtnctatataaaagtaaatcttttttggaagaaacaacattttcaagttactatttttgttgtttagaagacttgaattggcaagaattcatttttttaaaaaaaatattatgagtacatagtaggtattaatggggtagatgagatattttgatacaggcatacagtgtgtaataatcacatcgtggtaaatgcagcatccaccacaagcttttatcatttctttgtgttacaaacattctatttttagctatttttaaatgtacagtaaatttttgttcactctagtcactgtgttatgctatcaaatactagg

SEQ ID NO: 510366 - DNA, 313 bp, Homo sapiens
  misc_feature (25)..(25): n is a, c, g, or t
cacaataaggaagggtccccagggntggggagagccccaagttgagaacaataatgaacaattatagtatgaacaattgttagagacagctaatcacaaacaacctgcgggcacaatgacctcattccacacgtagcacccttcagcaggaccctataaaactttcctccagcccttgcctctttgcaggtagccccttctctgctgagctgcccactgcaacatattttcacaatttctctaataaatctgtccttctttacctacaactatcttggtaaatggcgttaccacctgcaaaactgaccctagg

SEQ ID NO: 510367 - DNA, 241 bp, Homo sapiens
aatgaattctagcgacactatgtactgaggcggtgcggaacgtctgcacgggaaccagcgcaagcccccggggttcctggagacggtgagagtagcagatcagcttgaagaactatgatccccagaatgacaagcgcttctcgggcaccgtcaggataaagtaccactccgcgcccataaagttctctgtgtgtgtacctggggcaccacaacagcactgtgacgagactacagggcgtga

SEQ ID NO: 510368 - DNA, 695 bp, Homo sapiens
ggcacatcctgcaactataccaaaaaatagaggaggagggcaatacttctaacatacattatatgaatgtattaccctgagtactcaaagcagacaaagacacgttccaaaaagaaaactacaggccaatatctctgatgactgttgaaacaaaaaccctcaacaaaatacaagcaaacaaaattcaagaatacattaaaaaaaaaaattcatcatggccaattaggacttatccctgggatgaaaggctggttcaacatatgcaaatcaatgcgatacatcatatcaacagaatgaaggcacaaaaactatgatcatttcaattggggcagaaaaagccctggcaaagttggacatcccttcatgattaaaaaaaaaaattcttaactaattaaatacggaaggcatgtacctcaacaccctcaaaagaataaagcgcatatacaacaagcccacagttgacatcatactcgagggtgaaaagttgaatgtttttcccctaagatcggaaaaaagagaaggatccccaaatcaattccattcaacccagtaatagaagtcctagacacagcagatagtccagagacagaattatatagctctcaattggcgaggaacatttaatcctcgcattggggatgactgtctataatagaaacttagatctccaaaatttgataacattgttagtaatg

SEQ ID NO: 510369 - DNA, 110 bp, Homo sapiens
aggattcgtgccgaaccacactcaaacgcttaagtatgcatataaatatgtcatatggaaggtaaactgttattctactttattgaatctagctaaactaaacaattcca

SEQ ID NO: 510370 - DNA, 848 bp, Homo sapiens
gtgagtgtctcctccagtacagcaacggccagagctgacctgccagctccgggcgtggggtgaaatctcttgattcctaatctctcgatatggcacctcgcggtacagctctttgccgaggttccgcaggcccagcctgtcctggtcttcaagctcacatgccgacttcagggaggatccggacccccgcaaggtcaacctgggagtgggagcatatcgcacggatgactgccatcccttgggtttagccagctagtgaagaaagtggagcagaagattgctaatgacaatagacctaaagtcacgagtatctgaccaatcctgggccctggctagagtggcctggatgctgatgcttctcgtcttgcccttgggagatgactagcgccagcactcacggagaagcgggtaggaggtgtgcaaacttaggggggaacaggtgcacttcgaataggagctgatttcttagcgcgttggtacactggaacaagacgatcaagaacgcacctgtctatgtgtcctcagccaagctgggacaatcacaaggctgtgtttaccggctgggtcggtttgaagacagttcggtcctattcgcttactgggaatgcaccaggaagcagaacgaatgtgcgacctcccagggggctttcctagaaattgagtcttggacgaacatggtcccttgaagttcctaccagttgttcgttcctcccaagcgctggtgctacgacaacctcaaaattggggaatttgaccgcaacatccgggagccacgggcaatgccccattggcttcctggcccttgaaagcccccggttattgatccccttctttgacttaggcatata

SEQ ID NO: 510371 - DNA, 167 bp, Homo sapiens
gttgcccgtaggaatgatgtagtggtgagggtgtcagcagcgtggctacgctggctcccacttagtctccagtcttgatcagcttcaggccgtttgtcacatagcattaacacatattagaaaacttgtgtacgtgtcaacagggataggtaaccaccacgcattca

SEQ ID NO: 510372 - DNA, 339 bp, Homo sapiens
gtcgacatggcatggaaaatcaggatttgttgcagtaggctttgcagtgggcaggccagggtgctgcttacagcccatctgtgcacttgctgggttcccagggcccagctccactcactggtccagggtacccagcatttctcatgctacacatttttttttaaacaatttgtttgtgtgaatgttttctgcatggatacatgtttgcctctagaagtgagaagaggatgttggatgccgtaaactgaagttagggatgattcctctgcaagagcagcaagtgttcgaaccctgaagtgtctccccggcctcaccttacttttcagacagagtcgacgc

SEQ ID NO: 510373 - DNA, 231 bp, Homo sapiens
cccgatagcccgacaggcggggtgagggtcacagtgaagggccaggcggggtgagggtcagaggaagggacaggcggggtgagggtcagaggaagggccagtacgggctgagtggtcagagaaaagggacaggcggggtgagtggtcagaggcagggtcatgcggggtgataggacacatcgaagtgcactaggtcggtggtcagtgtctgtgtcgtggcgtagatcgggg

SEQ ID NO: 510374 - DNA, 406 bp, Homo sapiens
cactctgccccaggagtattcctagactccattctctccaaacctgagtatagtgcacacatctatgactcctaaggtaccctatgccagctctaccatatcaatataccactgtgctgtcatctattaactcactgtcatcaccaccaaaccattgtctcttatttccacagcaaaagtccaaggcagtttccaccacgtagtacatacttaaaaatagagttgctggattgtggagggcaggtcagggtctctggaggtggtcattgcagctgtggatcctgttcagtactgtagattggcttctgccctggacccggtcaggctgaaggaggcctatctctggctgtgcttctccctgggaatgcttctgactatggacacaaggagagtgctaaattttcta

SEQ ID NO: 510375 - DNA, 928 bp, Homo sapiens
gtaggttgggagtggaaggtggtggctgctgctccgcagtgtggggaagatggcgccgccggtggcagagagggggctaaagagcgtcgtgtggcagagtgagtgcggtggggtaggggttgagagagggaaggccgggaggctgccgtgccgggcctcgttttgcagccccaacctagcggtctgttgaggagccgccgcgagcacttgttgctttgggacctgtgtgaggacttcttcctgctttcctgccctgccttattccttgccagcaccagggatgggcggggtgcgacgggacgcgtgcttctcgttggcgtcgggcaccccctcgcctcggccgcgctctggccgcgaagctccgccccgggtgagccgcccggcccggctttccctcccgcggagcccgtgcgtgccctcggccggctccccagtcttctccgctcccgtccgcgctccccacatcttctccgctcccgtccgcgctccaccagttggggatgtctctccatccgagacaatccgggcgctgtttattccggccccatctccagcccacactggagtttgcaaggactgtttattctgcttattcgtgttagtatcaacccgtgcttttcaaaaaacctcactgtttaacagactcatcttcccctattccgagaggagcctactttctgaaaagttcttgagaagagaccattgggaatgacccggtgtccagccgtgaccatcttcctgcataggcctgggcaagagcctgtccttccggttttacctactctcgggggcccattcctgcttgtagcgaccggactccttatggattactgatgttcttgaggaatcatccaacaaatttcataaacattggctcccaaactaggtctgacaggtagagaaagtattgaacccaccaacaggaata

SEQ ID NO: 510376 - DNA, 580 bp, Homo sapiens
  misc_feature (547)..(547): n is a, c, g, or t
aaggacaagcccacctatgatgagatcttctacacactgtctcctgtcaacggcaagatcacaggtgctaatgccaagaaggagatggtgaagtccaagctgcccaacacagtgctggggaagatctggaagttggcagatgtggacaaggatggcctgctggatgacgaggagtttgccctggccaaccaccttatcaaggtgaagctagagggccacgagctgcccgctgaccttcctccacatctcattccaccctccaaacggaggcacgagtgacttccatgcctgagataccctacaacccccagggctgctgccactttctacccaccagctccttgtctgcccaggtgggctggggcctggaggggcagaaattgggggagggaaagggtcaccatttttcaaggtccataaagactgagcggtgtttcctcagctcttgaataggaaaaccaccatctttcttttaaagctgttctggggttcagcgggaggcatgggtgatgcttggatatgaacagtgggattttgtgcacagganaccatgatatttttaatatataacattagaggc

SEQ ID NO: 510377 - DNA, 593 bp, Homo sapiens
cgccattctacaccttgcggtttgaaacagctgttttttccacatttgctgcaggcatggctgtcttctgcccctgcctgtccatctggcctataccccagccgtggggcccgcggtccctgtcgcagccccctacccttctgatgcctctgcttgactatggaccaaacagctctggcctcgggattgggccaccctacccaggatcttcaccctggggacacggcgaaggggaaagccttcatcttggcgaaccgtgcccaccaaccccttctacccggggcttcgtgcacagatgggctatctgtgtcagacccctgctgtctgtctgtgggagaaggacattgtgcccatctcccgggcctctgctgtcactctgcttgttgcagctgaattcttgcattctggctgtccacccccggacagaaccctggagctgtgcttgtttcagaccagtgccagaaaccagcacttcatgaagatctctgggtccggccaccagcaggacctgtcgacctgaggtgaccctgggtctgcccccagacctggggccccagctttcctccttgactttgggggtcacattccttcct

SEQ ID NO: 510378 - DNA, 248 bp, Homo sapiens
tagtggggtgcaggccatagtgtctttgtagctggccaagctatggaatgtggtagtattctccctgtacgggttgtagtagccggcaggggtacagtgttgtgtgtggcgatctgcggctgctgtggtacgggcgtagatgcttcaaggagtcctgaggctgtggtgttgtcaggtaagagtgttgtttcagtggagcctgggctgctgtggaaggtagtatattctggaccaaggcctggcatggg

SEQ ID NO: 510379 - DNA, 350 bp, Homo sapiens
gtataggcagtatagaatgatgtcagctcctttgattcaaatctaacacctgcgaccaatctatagaagcatggtcttatcaagatcaaagtcgagatgaccatagtaatgacctcgaacaaattcttgaatcatagcacacaagccgtttggagtaagtacatcagcctttctattcagcatatgttcagcttctatagcagttatgtcatagtccatggtcaacacgtgagtccaatgaataaaagctcgctccatgcagtaacggtggtaaatctgcctttcaacagtctctctgtcattgttaaactgatcaagatggttgtagaactcaatactctctgcacagt

SEQ ID NO: 510380 - DNA, 1354 bp, Homo sapiens
  misc_feature (509)..(509): n is a, c, g, or t
tggtattctggccagaacagtatatggtttttctaccccaattacatacggggtttggtaccacatcactaaaggcccaaatcattggaagatacaaaaccggtacatcgcaggctgggttggtctgggtatagtacaatgggctggatttggcttcaactggtctagtatggtatggtgcacgcctgaaatctgggctccttaaaaggaaacgccggtgtcagtcatcttgaaacatatgacatgtgataacaaggtaaactcgaataagtggtttggaagaagacgggatcacattgtttaaacagggtgggcctaaaggcttccagataacattggctcatttgggtgcacctttgggtggctcaacacctgtgtagtaccctataacctgtgacagggaattttaccataccgggttaatcaatgggtgggcgcaaaagagcaaaaacctggggtgtctgggtgcacattataactccatagagtggtccataagcgcacagggntataggtgcagacaagaaacccacgaacacccaaaagttgcatgtcgcaatggggtgcaaatacatgtgtgtggtaagaccaaacgccataacttataatacacaatctactgtgctccccgatgtagtaacaacacatctttggggcagggacaaagtaatacacccttcccctatgtggggggggctcatagacaggtgtggacagcagccactaaactaaggggggggaggacacacacttggaagacatgggcgcagaacacgaaacaggcgagtagactccacagggggaggtgggaggacaaccaacagtgaagcaccacccggtgggcaaaactaccaaacttatctccccaaggaggaggccatacaccaaacctagggtaggcacaaaggcatacaccaaaaactacccccgggaggggagcgtggctgtgatgaccccaataggccgcagcacgcgagagtagcgacaaacaacattgagagcaaacgagcattaaaagaattcacccatcaagaagaaacgaaaagatagggccaaggtgaagacaatccaagcccgtccagacaaaaaatatcccgtggatagaacgaggaaccgcccaaacaccgaggaggggaacaatatgcgaacaagacgcttgattgatcaacgacagcaccgaaaagagtggatcaacacacgtactcacagagacggggggacggacacaacccagagcagacgaccaaattctggatcgagacgcacaacggagtgaacacgggggcggagactctccgaacgcgaaaacaccacaaaaagatgggggagacaactcgcacacgaatcatagaac

SEQ ID NO: 510381 - DNA, 179 bp, Homo sapiens
tacaggatcttccggtagactaacctatatcagaaaggtgttgtaagagcttctctgtgtgtacgcatgaactttggtctgtaggtgttaaatggaacctctccatgtgtatatagtatttccttgtataaagcactttactacctaccacttgtgttgtgaacgttaggtctacctgg

SEQ ID NO: 510382 - DNA, 890 bp, Homo sapiens
aaaggagtgctgctggcgatcggatcttttctccagcaattgggggaaagaaggctttttctctgaattcgcttagtgtaaccagcggcgtatattttttacggcgccttttcgaaaacctagtagttgactagttcactttggtcttaacatcttagttctcagttgtctaaggcttcaagacttgccttaagaattagccttaattctccattacatgtgatgactacatgtgttgcaccagggggctttccttcgtatttggacgctgtgtcttatgttcttatccaccgatcatgttctaacatcctgtaaaatcgcaactcagtctccgatcatggatgagtgttccaagaaggatcaagctcgttttgatggtggtctttaacgtaccctgaacaaggtgtactggctagtggccgagaacggtggctggccgggtgatagtggaggtgtgtgcaagtaactcgtgtcaaagccgcttaggactcctggcttgcggagctggcgtaaagtgctgttggatgcagggatcccgagcgagatggcgaatacaggactatcggcagtacctggcgctatgcaagacacggcttcttctggtaagagccatgccacatgaggttgcagaagtgaggactggtgtatcatgagatcctggacaatcaaattatgagtacaacgtttcggcttttgagcttcctcaggggtcctcttgggaaccaatcctttcacatgcgcaaaatatgcgcgtggtgatagcacttaacgtggtgttgaccgggcttcgtacttgtaaccagaccgaatccaagaccaacgtcccagcaagactacaggaacaacccttttgaaggtcccgtggatcttggtgacactggtccctcacc

SEQ ID NO: 510383 - DNA, 1129 bp, Homo sapiens
  misc_feature (299)..(299): n is a, c, g, or t
ggaagaggacactaggaaaaaagatgcttccaaacccagccttcagaaacaaaagaagtggagccagagccaacctgacggaccaaggactttggaacgctgatgaacgaggacacctacggaaaaacagactgcttctgactgactctagactgaccttgacacttctttaatcaaacagaaaaacgacagacaacaacaacctaacacaacgatactttgactacttcgactgacacgctgaacgaacggtgtacaacggactcttaacgacttgacacagtgactgttccaagaancccaactgacaccacgacggactgacccattgacacttactgctatggcaactaacaacagacacgacaacaacgacacgaactgttaacgttacccaagactgacggactgacaactacctacgacgaacacgactgacacgctctacgacacgactgaacgaccaaccaacaaaacgactgactgagtatctcaatatcagctaattcagaccaggcccttgcttggcgcaggcttcagacacgagactatcacatacgacggacgctgctgaatcgagtgttcaaccatcactgagggaacacagactccagcatatggattgctgggcgagacaacggaacatctgtccatgaaaccctccacaagtcgtccgagtaggaaccaaagaaaacttctttagtcaactttacagatatctgtcaactatcacatcgtcagccaaacatctccttgcatttcagtggctgactctgggtacaagtggttctatagactggtaataaccaactagtacatcacggaagactccacagacacgcatagaacagcttgagaggatatatcaggcattatgttactggtcacacattgcggatcaccgaacaccatctgcgacaggacccagacttatttcttaacaggcgaacatagtaaccacaagtccggagcgaaataaaagggtcacagcagtaccgggcacgagcacgacctgccaagcacaataggacaagaatctgaacggaggaatgccagaacgccacaagcgcccggacaccagaccacccatcgagcggagcaccaatacaacacccccaccaacgacacg

SEQ ID NO: 510384 - DNA, 390 bp, Homo sapiens
tttagttcaggccttattaataggaatacaaaaataattattttaagccttactgaagagaaatatactgacttatctagttagctgcattgtattttagagagtgaagatcttgatagccatatattttaggacagccatcacctaatgaagtagaaagtataaaagatactctcactgggaaaccagcatcagtttacaagatttctatttactgtgagaagctcagtcctagagtgtacaaagcttgaaccagaactgttgaggtagaaatggacagaatacttgaggaattattcactcactctttaaacttttgtctttaattggagattaaataaagaatgaataaaaacaggaaataagctactcagattttcttttttattg

SEQ ID NO: 510385 - DNA, 121 bp, Homo sapiens
gttcaggatcttgtcgggcgacggaaacttacgcagcggaggatatgatgctaaagtcccgagttagagagtgagatcttgaacgaggacacattgtttagccagccgatccccgggtacc

SEQ ID NO: 510386 - DNA, 304 bp, Homo sapiens
gtagcgactctccctacgtatctaaatttctactcctggattttaaccaagagaaatgaaaatatatgtccacacaaagatctatgttgcaaatattcagaggagatttattcgtaatagccaaaaactgggccgggcgtggtggctcatgcctgtaatcccagcactttgggaggttgaggtgggcggatcacgagctcaagagatcagaccaacccggctaacaaggtgaaactccgtctctactaaaaatacaaaaaattagccgagtgcggtggcatgcgcctaggatacagtagggaga

SEQ ID NO: 510387 - DNA, 216 bp, Homo sapiens
gacctacgatgtccgtgcatgtgttaagagagatattaaagcaccatattttaagggttattgaaagataaacggtgaaatgaacatattgatgatctggaacttccattggtaagaatcccaatagtttcatcttctaagtattagaggaagacacttagatctgatgtcttattacaaactggatcttcaaaatggtccgtttttaagatggtc

SEQ ID NO: 510388 - DNA, 220 bp, Homo sapiens
  misc_feature (26)..(26): n is a, c, g, or t
  misc_feature (92)..(92): n is a, c, g, or t
  misc_feature (161)..(161): n is a, c, g, or t
  misc_feature (205)..(205): n is a, c, g, or t
  misc_feature (212)..(213): n is a, c, g, or t
ctcctaagcagttagttctatcttcncttacagctgatgcttcttgaggggaaaggccaccttgtgtcttttgttagagataggatgttgcnaagggtagggcaaccaggagggtatcccttagcatgtaactttgaagaatcaagattggtgctccacanaaagttcggttcaaaaatgtttctcttaagaaacttaaaaaccntactccnntgatgga

SEQ ID NO: 510389 - DNA, 348 bp, Homo sapiens
aagcgcaaaatgtggttttggaatcataaacattgggcttgtcgggagctggtcctggaagcctcacgtgagtccctgttccaaaggaccggacgctgaatccccgttatgctagaggatgttagaatttaagttgacactattttatttacacataccgaatatgaattcctacgattttcttagcaaaaaactgatagactttctaacattgagcctgcattccaacactgcaacaatcaagtgtaactgacataagtacaaggggcttacagtcaccatatcactactacatgcatttaggttactattctagcctttaaacacatcagaatttgtagttcttgg

SEQ ID NO: 510390 - DNA, 295 bp, Homo sapiens
ccccaggaagccctcggcccccaagaagggagacagtttttctgaagaactgaaactggccccccagctgaccgggccggtcattcccgtccgggacgtttttaagaaggggaaagctcgggtcctccctgggggagggaagaatttcaaagccttcgcttgtttccgtttggcccgttccaacgcccggcttttcggcatacgggcaaaaagggccaaggaagcccccgaaccgggttttgaaaagaaaaaataaagccctcctgggggcttggaatccgtcggccgtcttgga

SEQ ID NO: 510391 - DNA, 189 bp, Homo sapiens
acacgtagtttagtagaatgcgggcgcttgggttagccatgggtgctaaagaggaaaccctctatgaattagcgggtatcgggacttaatcgtcaccggtatgtcacccatttcgcgcaactatcgcggggatatgggtactttggcaaggcaaaacacttgccccagtcacccaggacatggcatggt

SEQ ID NO: 510392 - DNA, 220 bp, Homo sapiens
  misc_feature (8)..(8): n is a, c, g, or t
  misc_feature (44)..(44): n is a, c, g, or t
  misc_feature (52)..(52): n is a, c, g, or t
  misc_feature (58)..(58): n is a, c, g, or t
  misc_feature (77)..(77): n is a, c, g, or t
  misc_feature (81)..(81): n is a, c, g, or t
  misc_feature (87)..(87): n is a, c, g, or t
  misc_feature (89)..(90): n is a, c, g, or t
  misc_feature (93)..(93): n is a, c, g, or t
  misc_feature (107)..(107): n is a, c, g, or t
  misc_feature (122)..(122): n is a, c, g, or t
  misc_feature (146)..(146): n is a, c, g, or t
  misc_feature (157)..(157): n is a, c, g, or t
  misc_feature (166)..(166): n is a, c, g, or t
  misc_feature (183)..(183): n is a, c, g, or t
  misc_feature (192)..(192): n is a, c, g, or t
  misc_feature (194)..(194): n is a, c, g, or t
gagaaagntgagaagccagatactaaagagaagaaacccgaagncaagaagnttgatnctggtggcaaggtgaaaangggnaccctnannggnaaaaagcccaaganggggaagccccattngcagccgtaaccctcgtccttcgncagaggcattngcgaggtgnttcccggtctgccatgnaattccagnanggccatgtgacaagagggaagtaact

SEQ ID NO: 510393 - DNA, 583 bp, Homo sapiens
agagagagatgggtaatgtgagatgtgatcacagatataaagttcagtagggcaggaggaataagttttaatgatctatagttccacttggtgactacagttaatgtattgcatatttcgaaatgctaagagatttttagcattctcaccacaaaaaatgctaagttggtgagggaatagatatgttaacttgcttgattgactctttctacaatgtatacataaatcaaaacatcacactgtaccccactaatatctacaattattatttgtaagttaaaacaaataccctgaagattgttggacctgcaagcattgttggtggggcccttcaggggagagatgggtaatgtgcagatgttgatccacagatataaagtttcagttgggcaggaggaataagttttaatgatctattgttccacttggtgactacagttaatgtatagcatatttcgacatcgctaagagattattcgacatactcaccacaaaaaatgctaagatggtgcgggaatagatatgtaaacttgcttgatagactctttctacactgtatacataaatcaaaacatcacacagt

SEQ ID NO: 510394 - DNA, 1184 bp, Homo sapiens
ggtcagacgcatcttcttttgcgtcgccagccgagccacatcgctcagacaccatggcgcaaggtgaagtgtcggagtcaacggattaaggtacgtatagggcgcctggtcaccagggactgctataaaactctggtaaagtggatattgttgccatacaatgaccaccttcattgacctcaactacatggttatacatgtaccaatatgattccagcccatggcaaattccatgagcaccgtcaaggctgagaacagggacagcttgtcaatcaatggaaatccacatacacatacttccaggacgcgagatcaccataccaaaatcaagtagagggcgatgctaggaaggctgagatacagtcgaggaagataccaataggcgatactatcaccaaccagtgggagaagggcatggaggctcaattatgcaagtggagggagaccaaaaagaggatcactccatcatcatgaccccatacatgactgatgaaacaccatgtacagtacattggagtgtagaaccattgagaagtatgacaacagacctcaagatcatcagcaatgcctaccttgcaccaccaaatggttaggaaccacctggaacaaggtacatacacatgaacaagcttatggatactcagtgggaacaggactacatgagcacaaggatccaatgccaatcacatgacacaccaaaaagactgtaggaatggacccatcagggcaaccttgtgaacgataatggccagcgaggatcatcccagaaaaataatcccatgacacaaacaggcagacatgccaaggacctgagggccaagggcaaaccatgagcaagaacgagaagaacaaagggaatggacatacacgagaacccaagtgccaacgatgaagggaagaacctagacaggacgacaaaaaaacagaacaaaatgagaaccacaaaggtggtgacacagagtatagagggcacaacaagaaaccgggaaacaggaaaacaagaggacacacgagcaaaagaagacaaagagacaactagacaagaggacatcaaaaaaacatgaagaagccgagaacaagtaacacagaggacaaacaagcaaagacaggaccaaaagaaagaaaaaggagacaaaacacgacagcagagagcgcaaaaaaagaattcagagagcaaagaaaaa

SEQ ID NO: 510395 - DNA, 219 bp, Homo sapiens
  misc_feature (176)..(176): n is a, c, g, or t
agatgtcaagcaatagattgtgggccctgaaggaaataaaagtattttagccccaaaatctattcttgacatattttgaaatggccctgcaaaaccatattttgtggaggaaaattgcatctgtggagaatctccttctgtttccaggtctttttctgatccagaagagatttaanctaagagtctggacatcttaatctgggggcccaatgcctggct

SEQ ID NO: 510396 - DNA, 902 bp, Homo sapiens
  misc_feature (495)..(495): n is a, c, g, or t
  misc_feature (670)..(671): n is a, c, g, or t
  misc_feature (681)..(682): n is a, c, g, or t
  misc_feature (689)..(690): n is a, c, g, or t
  misc_feature (692)..(692): n is a, c, g, or t
  misc_feature (694)..(694): n is a, c, g, or t
  misc_feature (705)..(705): n is a, c, g, or t
  misc_feature (713)..(713): n is a, c, g, or t
  misc_feature (719)..(719): n is a, c, g, or t
  misc_feature (740)..(740): n is a, c, g, or t
  misc_feature (792)..(792): n is a, c, g, or t
  misc_feature (810)..(810): n is a, c, g, or t
  misc_feature (825)..(825): n is a, c, g, or t
  misc_feature (854)..(855): n is a, c, g, or t
  misc_feature (857)..(857): n is a, c, g, or t
  misc_feature (859)..(859): n is a, c, g, or t
  misc_feature (861)..(861): n is a, c, g, or t
  misc_feature (865)..(867): n is a, c, g, or t
  misc_feature (869)..(869): n is a, c, g, or t
ggggcgcccgagcacctcctcgccagcagccgtccggagccagccaacgagcggaaaatggcagacaatttttcgctccatgatgcgttatctgggtctggaaacccaaaccctcaaggatggcctggcgcatgggggaaccagcctgctggggcagggggctacccaggggcttcctatcctggggcctaccccgggcaggcacccccagggcttatcctggacaggcacctccaggcgcctaccctggagcacctggagcttatcccggagcacctgcacctggagtctacccagggccacccagcggccctggggggcctacccaatcttcttgggacagccaaagtgccaccggagcctaccttgccaattggcccctatggcggccctgttgggccactgatttgtgccttatataacctgcctttggctggggagagtggtggcctcgaatgcgtgataaccaattcttgggcagcggtgaagccccangtgcaacagaattgctttagatttcccaaagagggaattgatgttggccttccactttaaacccacggcttcaatgagaacaaccaggagagtcattgtttgcaatacaaagctggataataactggggaaggggaagaacagacagtcggttttcccattttgaaagtgggaanncattcaaaannacaagtnntngnttgaacctgancacttcanggttgnagtgaatgatgctcacttgtngcagtacatcatcgggttaaagaaatcaatgaaatcagcaaactgggaattnctggtgacatagactcancagtgctccatatancatgatataatctgaaaggggcagattannanananagannncnattacgtgtgtaaaggtcaaggtagggaaggaa

SEQ ID NO: 510397 - DNA, 174 bp, Homo sapiens
ggcaggaaggggagcactgcagaggaagtatgggagcaaggtgggacacaaggagcaagaggcatacggtgccctattcatagacttcccaaagggcatggaaggatggaccaaagagggcatctcctgtgtaaatgcctggagaacgatgtcccagttgcagtcctagactcc

SEQ ID NO: 510398 - DNA, 961 bp, Homo sapiens
gactctttcatggtgttcagcatcgagcaaccctctcaacacagccagtttagcagtggtcaacacacacacacacacaaacacacacaccaccacccaacacgctcgccaccccacaaaacagggtatgcaacatttcttcttgtggaacaattccttccgtgtcatttcctccgcgatttcactgtgaatctagatcgtgcgacccaatagagagattccttcgaggaatcagcctttataattctcctttaagacaggagaaaaaaattcagactacaccggtcgaaaccatctcgaggccgtgacatctacccaggcacgcgtggagcaatgtggacacttgtggggaacacccgtggcacgtggccttatattacacttgtgggcatcaaacctttcaacaacgccaacgcgggggatctccctatgtggagacaatatttcctctataaaccaaattgcgaccactgcgggcacgcgggccaccacaccagaagcgagccacaaacagagcggacaaacaggagaacacggtgagagagtggccccaaacgggatgtccacaaaaaccaccctgagaggatgcgacaagaaaatgtgtcgagcaaacaacacgcgagacagacaaagaacactaactataaccacgaggcacacagcgtgccgcaaaccagccaaaccgtgtttagaaaacgccgccctagcacccaacgttgtggagcgacaaacctagtctaaaagacatattatttagagataaagagataacaacagtacatacactcgcacagctgctgagttgaatagacgactcacttataatatccacacaatcccccagcaacatgctaggggtctaggacggcaatacacaacgcaaaaaacgacagctcccacattcaacacgtaaatagtcggaaacaacagagacaaccatagtatctggaaaaacgctaac

SEQ ID NO: 510399 - DNA, 329 bp, Homo sapiens
agggagcgatctccaggggggcaggtctggtaatgaatgaaggagctgaggccgggcatggtggcgcacacctgtaatcccagcactttgggaggccgaggctggcggatcacatgaagtcaggagttcgagaccagcctgaccaatatgatgaaaccccatctctactaaaaatacaaaaattagctggtcgtggtggcaggcacctgtaatcccaggtacttgggaggctgagacaggagattcacttgaaccctggaggcggaggttgcagggagccgagattgcaccattgcactccggcctgggcaagaatgaaacgctgtctc

SEQ ID NO: 510400 - DNA, 761 bp, Homo sapiens
  misc_feature (4)..(4): n is a, c, g, or t
  misc_feature (68)..(68): n is a, c, g, or t
  misc_feature (165)..(165): n is a, c, g, or t
  misc_feature (186)..(186): n is a, c, g, or t
  misc_feature (246)..(246): n is a, c, g, or t
  misc_feature (250)..(250): n is a, c, g, or t
  misc_feature (259)..(259): n is a, c, g, or t
  misc_feature (268)..(268): n is a, c, g, or t
  misc_feature (291)..(291): n is a, c, g, or t
  misc_feature (314)..(314): n is a, c, g, or t
  misc_feature (318)..(318): n is a, c, g, or t
  misc_feature (320)..(320): n is a, c, g, or t
  misc_feature (379)..(379): n is a, c, g, or t
  misc_feature (415)..(415): n is a, c, g, or t
  misc_feature (418)..(418): n is a, c, g, or t
  misc_feature (524)..(524): n is a, c, g, or t
  misc_feature (526)..(527): n is a, c, g, or t
  misc_feature (538)..(538): n is a, c, g, or t
  misc_feature (549)..(549): n is a, c, g, or t
  misc_feature (582)..(582): n is a, c, g, or t
  misc_feature (603)..(603): n is a, c, g, or t
  misc_feature (608)..(608): n is a, c, g, or t
  misc_feature (639)..(639): n is a, c, g, or t
  misc_feature (641)..(641): n is a, c, g, or t
  misc_feature (643)..(643): n is a, c, g, or t
  misc_feature (690)..(690): n is a, c, g, or t
  misc_feature (726)..(726): n is a, c, g, or t
gganaagcccgcagcgcagggagctgtctgcagaggccagggtgcgcctgcaacgaatccccaggcancggtggccgccgcggcccgagtagctcggcgggtaaacatggccgcactgacgacggttgtggtagcggctgcggccaccgcggtagccggggctgnggaaggggcgggcgcggccancgggaccggcgtgggagcgaagccagcgcctcaacagagtgatggctgttttagtacttnaggnggaattcgnccttttcancttcagaactggaagcagaaagnaaatcagactaagaaagcagaantggnangcacagcagaaaaatttaaaaatcaagtaataaaaatggaaaaagaaaaaaaaagacanatcaacaaccaaaaaagtgacttcagaattgagcanagnatgctagaagaattggaaaataaattgatacaaagcaggaaaaaagaaagagcaaaaatccagcaacaattggccaaaatacataataatgtaaagaaacttcagnannaattaaaagangtgaagcctanaactgattttgttgagaagctaagagaaatganggaagaaattgaaatgcaatnaacanttttaaagaagagcagaggttgatatatgtngngntaattatagaagagaagacaactaataatgagttgagtgccatatcnagaaaaattgacacatgggctttgggtaattcaganacagagaaagctttcagagcattctcaagcacagt

SEQ ID NO: 510401 - DNA, 513 bp, Homo sapiens
  misc_feature (188)..(188): n is a, c, g, or t
gcatttaacaggacttcgcactgtgcttcctgatttcctcttgttacaacaggaccctgccaaccactgggaccgccgttccgcaccaataaccgtgaagtaaggacggaccacgggtacatcatacgaaaagtactacacgcgcctgggcaacgacttccaccacgaagcagagcgcgtgtagcganggagatccgccactatccgccatgcgaaaaagctccgcaagcaagatacgcaggttgacgtccacgcagtctgatgaagcgaattcagagaggcccagctaagaggaatctccatcaagctgctgcgagtgaggagagatgaaaggacgagacaacttatgttctctgaggtcgtcaggcattggactccaggagacttatatgaagtagatcctgacactaacggttaatgctgatagcttttggaattcggcagtatgtccaaccttcaggttattcagcctacatttgggatgaatatccacaccgcctgcgggaccctcga

SEQ ID NO: 510402 - DNA, 183 bp, Homo sapiens
acttcatataggcagagtcccaaattccctcacaaacaacacattgcaccatgcagggtcaacatcatacaacatcaagcaggtctcatcatgctcaaaatcccaattgcattcttgcatcatattttttgcacgtgtgtgtgtgtgtgtgtgacggagcaacatctcggggatcctctcaga

SEQ ID NO: 510403 - DNA, 446 bp, Homo sapiens
tacatcttgtgctaggagagagtcatattctgtatcggcaccctaaatcccatttacaccatggtcctcaatctgttccccagtgaaccagagggctctgccaaatcatttcagagttccacaaagaacagaatatttctgccaagcagagaagattggaacatcgtaaggaattcatccttctatgtcggtgttttatttatgggcattctgaagattatttcatttgggaaaagaatattgttactaaaaattattgaaaaatcactggtggtttggccttgagagaaaagtcaaagagttacaaaacgttcagtgataatttcagaaccaggcatggtgctcatgcctataatcccagcactattttgggaggctgatgtgggaggacagatcaagcccaggagttcaagatcagcctgggcaacatagcaagaacgcatctc

SEQ ID NO: 510404 - DNA, 401 bp, Homo sapiens
  misc_feature (52)..(52): n is a, c, g, or t
  misc_feature (56)..(56): n is a, c, g, or t
  misc_feature (120)..(120): n is a, c, g, or t
  misc_feature (125)..(125): n is a, c, g, or t
  misc_feature (177)..(177): n is a, c, g, or t
aaacaagtcgcccacatggtgaaaaaaacaccgcgtaattttggcccacagngcantcctaacatcacattacacgtactacccagagacgtttatgtgagcattacctttcaaaaatcnttacnttctatttcctggtggagcagccacttgtggagtgtgattcctaattcttcntgagtttggcaataggacttgatgctggataggttgtcttttgtttttatgtctcagaccatcttgtgagattgtttgcctatctcataatacagttttatgcagaaaggttgaaactatgtaaatggtttttatggaaattatcagttacaatattttaaaggtgtagaatggcatctttgtttataggagaacatttgtaaataaagttaaatttctaagcc

SEQ ID NO: 510405 - DNA, 935 bp, Homo sapiens
gacagtgctgacactacaaggctcggagctccgggcactcagacatcgtgagtggtccttgcgggcccccgtgaatccaatcactgctagttctatgtctaacttattattgtctcatcttcgaaccatgtgtagcatatgttggcctacacagagaccaactcgcgtggcttcttagcatgaaagattcggtagttattgtccaacgtaccatgtaggcagttgctacatttacctgtctaacattatctaaaccgaggtatgacacaggatctactagtcttgggacagacatcgttacttcaagttgtaaaccataacgatcacaaagtcgtaacaggctggtaaaagcaatccatactcatctgtatcaagtccctgtatgaatcatcaaaatccaagatatgatagaacgctgctactttgaattgtccgaagagaggtgttagaacgaacttctgactgtatgacgcgatcgattatagcacatgaatcaagtattcgatatttgcacggaaatatataatccatatgatcagcagatgttgaactgtaccagatgaaggtagacccagtcttgaagcacagagccaggagtctttgcaaagagactgtgcacatccatgatctcacgtgggaaaagatgtcacgacattgtccacataaggggagctaaaacagaggccgggctttgactttatgtacacctctgatggctaaaccagcaatgacttgagtctacctgtgaaactccgatggggtctgggaacttggatggctctgcgtttcaagaccgagcacttgataggcagtgtcagactcccagataaattggcctcgattatagccgaaggttttggcctctgcctcctactggcacaaccgaatttgggttgcgactgagaagattctttccgctatgcccacagtctcca

SEQ ID NO: 510406 - DNA, 324 bp, Homo sapiens
  misc_feature (4)..(4): n is a, c, g, or t
  misc_feature (12)..(12): n is a, c, g, or t
  misc_feature (95)..(95): n is a, c, g, or t
  misc_feature (107)..(107): n is a, c, g, or t
  misc_feature (242)..(242): n is a, c, g, or t
cagnaaaataantcccacgcacaaagagtcagtgtaaagaaggccttggctgggccacagtggctcatgctgtaatcccagcagggaggctgagnccgggtggatcntgaggtcaggagaccgagcccatcctggctaacacgctgaaaccccgtctctactaaaagtacaaaaattcagccaggcatggtaacacatgccctgtaatcccagctactcaagaggctgaggcaggagaactncttgaacccaggaggtggaagttgcagtgagctgagatcgcaccactgcactccagcctaggcgacagagtgagactccgct

SEQ ID NO: 510407 - DNA, 530 bp, Homo sapiens
  misc_feature (343)..(343): n is a, c, g, or t
  misc_feature (352)..(352): n is a, c, g, or t
  misc_feature (359)..(359): n is a, c, g, or t
  misc_feature (514)..(514): n is a, c, g, or t
catgaagccggccactgctctgctctgctcctgctcctgctgggcctggctggacccaggggagccacggctggggtgcggaccgtcatcactgcagaaacgtgcaggcagagcgattcagaactacaattacaaccagcatgcgtatcccactgcctatggtgggaagtactcagtcaagacccctgcaaaggggggagtctcaccttcttcctcggcttcccgggtgcaacctggcctgctgcagtgggtgaagttttggtaggcaatttcttgcaaccaccacccgaggcccccgaaaaagcactggtcgtcagggaagctcctccccttggcccccaanctgtgccanccctggncccggctgccacacctctgtttcctaaggctggggaccaagtttgtctctccttgtttcttcccacttgcactgtggtgcttcagttggcaacagcttcgtcacatacaccagattttctgtaactcctccctttgtgacctgaagtaatgtganagttttcaagaaagaa

SEQ ID NO: 510408 - DNA, 376 bp, Homo sapiens
  misc_feature (138)..(138): n is a, c, g, or t
  misc_feature (182)..(182): n is a, c, g, or t
  misc_feature (214)..(214): n is a, c, g, or t
  misc_feature (282)..(282): n is a, c, g, or t
gcagacgcgcaccctgtcgccgcgaagcggtcgcgcgcagtcgtcccggccctggccgccgcaaacgaggatccgctgcgctcggggaacgcgacagcgctcgtggccccggacctgaagaccttcagcatgccagangaaagttccccaggcggaccccgagagcattccctaccaggacntcctcacctggtcaatgcagacggacagtacntcttctgcaggtactggaaacccacaaggcacacccaaggccctcatctttgtgtcccatggaagccngaagagaacagtggccgctatgaagaacttggctcggaatgctgattgggggctggaccttgctgggttgtttggcccaacgaacaatgtttgg

SEQ ID NO: 510409 - DNA, 182 bp, Homo sapiens
ctagagtgatcccccgcgccgaggcgaacaactgtcaccgaactcaggctggcccgccggagtacggctggccctgatgggtatcgaggagtcaagcgccccgccgtcgaccacgccaacaaccgccgggtggcggagtatctgctggaggaaatactcgaacgcctggaaccgagagaccg

SEQ ID NO: 510410 - DNA, 569 bp, Homo sapiens
  misc_feature (273)..(273): n is a, c, g, or t
  misc_feature (281)..(281): n is a, c, g, or t
  misc_feature (382)..(382): n is a, c, g, or t
  misc_feature (391)..(391): n is a, c, g, or t
  misc_feature (398)..(398): n is a, c, g, or t
  misc_feature (553)..(553): n is a, c, g, or t
catgaagccggccactgctctgctctgctcctgctcctgctgggcctggctggacccaggggagccacggctggggtgcggaccgtcatcactgcagaaacgtgcaggcagagcgattcagaactacaattacaaccagcatgcgtatcccactgcctatggtgggaagtactcagtcaagacccctgcaaaggggggagtctcaccttcttcctcggcttcccgggtgcaacctggcctgctgcagtgggtgaagttttggtaggcggcaanaaagtganggggcaccacaaggccgaacaaggcaatttcttgcaaccaccacccgaggcccccgaaaaagcactggtcgtcagggaagctcctccccttggcccccaanctgtgccanccctggncccggctgccacacctctgtttcctaaggctggggaccaagtttgtctctccttgtttcttcccacttgcactgtggtgcttcagttggcaacagcttcgtcacatacaccagattttctgtaactcctccctttgtgacctgaagtaatgtganagttttcaagaaagaa

SEQ ID NO: 510411 - DNA, 378 bp, Homo sapiens
tcctgatgctttgtgctgttgcgtgtgttctcatatacctgttggccaattttatttttttagaaatctctactcaggtactttgcccattttttaattaggttatttgcttacttgctattggaagttgtctgagttccttatatatatgggatattaaccccttattgtacatatggttggcatatattttctcccattctacaggtagtctcctcattctgttgattgtttcctttgctgtgtagaagctgtatagcgtgatataattccattggtttgtaaatggggttgttgcctgtgcttttgaggtcacattcaaaaaattattgtccaaactaatgccacagagcttttcctctgtggcatcgatacaca

SEQ ID NO: 510412 - DNA, 900 bp, Homo sapiens
ggacgcgtgggtcgacccacgcgtccggtaattctggaatcaaagactatggatacattgtggcatgggctgagtgtggtggctcatgcctgtaatcccagcacttggggaggctgagacaggcggatcatctgaagtcaggagttaaagaccagcctgggcaacatggcaaaaccccatctctaccaaaaatacaaaaattaaccatgcgtggtggtacacgtctgtcatcccagcagctcttaaggctgaggcacaagaattgcttgaacccgggaggcggaggctgtagtgagccaagatagcaccactgcactccagcctgggagacagagtgagactccgtctcaaaaaaaaaaaattgggaggccgagggaattcctgacctcaggtgatccacccacctcggcctctcaaagtgctgggatacacaggttggaaccactgcacccggccagtaaaaagaaatttgacggccattgcagatattggacggctggtatatcaaggtgttccttagttaaagaggaaaccataacacggaaaaaagctggaaatcacgcgatgtgacacgtcaatggacaagttcatcatactcagcacgcagccaggctcagacactacaagtggattagttgatcagaactaaaatcgtagaggggactaaaattctgagagtcgtggtatcggagcatactatgggacatttttcggctgtgtgcacactctaccattgtcatttcgtagcatcaaaacggcctcgccgtcgattagacaagaacccaacagtcatgggtgtccccacacagtacactcttccggatgaaaatacaacttatattatacacgtactcaatatgaagacgtaacggcagaaatgtaccaaatggacatcacaaa

SEQ ID NO: 510413 - DNA, 322 bp, Homo sapiens
  misc_feature (70)..(70): n is a, c, g, or t
tttcccccagtttttaaaaatcctcattcctaaaagggcccccctggggttaaagttgggcctcccctangccccctttccccagtgggggcaggggtttttttgggtgaacaacttgcctgtggaattggggcggtaactgtttccccccccagcctaaatttttcttgtgtcccaaaccccagggggccccaccagttttgaacctacccttggggggtccccccggggggggttttggttttgccctgcaaaaattgggggcccccccccttttcccccaaataaagcccattaaagccttggaagtgggggaacccca

SEQ ID NO: 510414 - DNA, 483 bp, Homo sapiens
ggctgctgtaggcgccgacggagcgagcgggcgtgcggagcgggcgacagtggcgtgggatctgcctctctgcaagcagctgggagcggcggcggcggcaccatgagcgggggcaccccttacatcagcaacaagatcaacctcatctccaaagcggagatccgctacaagggcatcctctacaccatcaacaccaaaaactccaccgtagcccttgccaaagttcaatcctttggtacaaaaaacaaaccgacaaatcatccaataccacctcaaaataaagtctttaaatacattatattccatgggagtaacattaaagaccttactgtttgtaaaccaccaaaaccacaatattctttacctcaaaacccagctattgttcaatcctcactaagctcatcaacttcttcattccaatccatggattcttatagacctttccacaagatacccacatacaatcaattcagtccgagttcc

SEQ ID NO: 510415 - DNA, 126 bp, Homo sapiens
ggtcgtgaagttacgtatggcatgggaaagaagtcacattagcacaacgaaaaatagcatttcagctggcaaagcaggagcttcctgcttctgcctgcttctgcaaaatggctgcttcctgcttct

SEQ ID NO: 510416 - DNA, 352 bp, Homo sapiens
cacacttcgatcgcggagaatggcactcgattggggaggaggtcccgtatcagagaaccgcgaggatgagtgtgcatcagcacggagtgccctggttcacagtgcatgcttgtggatcgtgtacatcttgacacgtggatcttcctcgacatcacgactggggtctcgaagaggacgggggtaggaaatcctccaggatcttaggaaatttcactccgcttctcctgctcaatggtctctttggtcggcagggtgttcttctcctgcgtctccgtgtgcttcagcttggccttgcggagaatcgggcagtccgatcgggggggggtcccttcagagacccacaggccgtttg

SEQ ID NO: 510417 - DNA, 843 bp, Homo sapiens
gctagaatggtgggctgctctgtccatagagggcttgccttcgttcagtcatgttaatgagaggaaatgcccgggttgctgtcagcaggagcagacatggcggaagtgatgctggccaaggattttatagatattaacgctggcttgcggtagtgctgaaagctgaaccgaggaaaaagcaggagttgtgaaacgagctgccagaggaacatgttgcgggtcctctttgactgggccttaatgactttctaacgggactagttatgataggaatgtacggttacccagacagcggtgtaccgtccgtcctcctcctatagcgcggtgcgtgtacgtgcccatccgaaagacgtcaggcgtgtattcacggaagatcagatctcatcgaagcggggcacaatacgtggctgtcagatgctaagagtgtgcagcggcggggatctgccaagtctggagaggttgaaagggggatgagcttctagggcttgacgaaggagctgacccagtgtattagataaagaaggggattctctcctggaaaatctggatagaaattgatcggaacggaggatacgaaggatgtatgttgatgacgaggtgctaagttcgaagaggagcagagatgcgagttccgtgaggaaagatgagactattgtgacgatggggtctgagggggggtgcaggttgactctgatgaggagggggcctactgggatgtggtgatatgacgatccggggggtgacccgctgggttgtcccaggttttgaaaagaggtcggaaggaaagttccgggacagggcatgggggaaatcttggcatggggttgaatttcaccgttctgc

SEQ ID NO: 510418 - DNA, 165 bp, Homo sapiens
gatgcatttgggtttgaatttttggtcacatactggaatgttaggcagcccttaattattaaaacaccttaatttaatttttctttttttaattaggaactttctgaagaaaaagtggtgtgtaaaacatctgatatttaagacaataaagtttttatcataaga

SEQ ID NO: 510419 - DNA, 124 bp, Homo sapiens
atatattaaaatatataaaagggtagggatacattgtatcatagttgataatgttgagattgttattatacagcagggtacaatggtagtgctaatgcaacagggaccatggaagttagtctaa

SEQ ID NO: 510420 - DNA, 138 bp, Homo sapiens
actcaggatcagctgctggctgctggccatgattctgtgttttttctcagccctcacaaatcacctctattcctagttacctatgaccaacagattcctggactaccatgaacttcatctattttccaatctaatctg

SEQ ID NO: 510421 - DNA, 1141 bp, Homo sapiens
gccagcgtcgatcctcccctcatccccaatttctcacatatccaaacccacacccttggtgttcttacattagaaaaaaaaacggcatatgaacaattcaatgggatggaagagggacgggcgagagcgcatagatactaatacgactcactatagggaacacttggacaagaaggggggtacacgcctagagggccctcgggggagccctagtcgccgcgccagaggatgaacagcgagcgggaccaaaaacagacatagtgagtaagacccacgctcgcgcagcacaaacaggagatgaagacaacacaagagacaacagacagagtcaacaacaaacggcaccgaggaacagaggaagaactggctagcagaaagatgaaggcgacacaacagcagacacccaactgtaaatgctggggactcaccgcagcgaaaaaacatggagccagaacaagagcagcagaaagcgacgcacgcacgccacagcagcgaggacacaataacggaagaagagagagcccaaagtgcccgcaccaaccacataaccaaaaggacaaacatgcacgcggcaaagaaatgccgataacataagaagttcacgaccaagacaggcagcaccgcagggaatgacaacgagacgcccacacccaacgagagggacgaagaaccaaccacacaatggacaaacaactgccatgcagacaacccaccgcagcaagagccacacaccgcatagcagagcacaccaagacagcaagcacacagcacagagcaagagatagccgcacagcacgaaaaacagagcaccagagaacagaagaagcacaccgaaaagcgggatgcaccacgatgagccgagcaaccaacaatacaccagccagaacggacagtcaaccagacacagagcacgcagacggacccgacgacaacaggcagacgcacgcgcaccaagcaacagaccaccacacgcgacaaaaacaatcttgttactatccactatacctcgagccaacgaaaaggagaagagaacaccataaagacagcgcgaacagagaagccagcagaagacagcgaagaacacagaacaaagaccacgagagaaacacggaagcgacacgacgaaactaagcgcgacaca

SEQ ID NO: 510422 - DNA, 409 bp, Homo sapiens
ggatggctaaaatcaaaaggtctgaaaataagtgttaacaagatgtggagaaattggaaccctcttctgctcttgggaatgtaaaatggtacagccactttggaaaacattctggcagtttctcaaatagttaagcatagagttgacatgtgacctagcagttctatccctaagtatgtatacctaagagaaataaaaacataaatccacatgaaaccttgtacatgaatgtttatagcaacattattcttaattgctataaggtggaaacaaaccaactgtacatcaattgctgaaaacaaattttattatatccatatgatggaatattattctgccataaaaaggaatacggtactgatacatgctacaacatagatgaaccttgtatgctaagtgagtcggtcac

SEQ ID NO: 510423 - DNA, 264 bp, Homo sapiens
  misc_feature (20)..(20): n is a, c, g, or t
  misc_feature (111)..(111): n is a, c, g, or t
  misc_feature (118)..(118): n is a, c, g, or t
  misc_feature (244)..(244): n is a, c, g, or t
aggatcccctgtctgtcggnagccacatggccgtctcatgctgctcgcttcgccgagcgcggcttcgtcgacacgcctatcagctgacgacgaaggggctacgagtacttnaagctgntccgcaggggcttcgagatgttctctgtactgccaggatcgaggacttgctgcaggagcgtggcagcgaagtttcacacatagtcaaccatgccatgcaggttgccctggagggcgatgccgagcnggctgctcagctgatcagcc

SEQ ID NO: 510424 - DNA, 258 bp, Homo sapiens
tgggcaacctccctttggccccggggccctttgtggaccttggctccctccgtggacctgggctttgtggtgaacactgcagcctccctgggcattccctccagggccagcacccctgcaacatataaacctgagggctattgtattttggcttgggggggaagcttttcaatggggaaaaatgctgtttttttgacaatttaagggattgttttgtttactgtaagtttgaaaataaaaattaagaaaaaaattccc

SEQ ID NO: 510425 - DNA, 144 bp, Homo sapiens
ttgcctccgttgtgatcctcccacctacagctcccaaagtgctgggattataggcgtgagccaccgtgaccatcctaaactatagctcagttttaatgctactctaccatttctattatgtatatgtttagcatgtaagaataa

SEQ ID NO: 510426 - DNA, 1680 bp, Homo sapiens
  misc_feature (391)..(391): n is a, c, g, or t
  misc_feature (457)..(457): n is a, c, g, or t
  misc_feature (634)..(634): n is a, c, g, or t
tggaaatggagtcttgatctgtcgcccaggctggagtgcagtgacgggatctcggctcactgtgcaaccttctgtgcctctcccgggtttcaagtgtgatttctccgtgcccagccctccgtgagttagcgtgggaattataggcgtgcgccaccacaccgtggctaattttggatatctcttagtagagctcagggttttcaccgggtgttgggctcaagcgcgtggctctctcgaaacctcctgtgaacctctcgtgtgaattgtgccctctcctgtgggggcctctccccaagagtgtgctgtggggatatatacgagcgcgtgtgaagccaagcaagtgcctgtggccccgaggggggactcctatataatgtgtgagtacgccctntgaggaagaggatgtgcccgcgtggtgtgtacagatctcatctccattctcagtgtggccacacanaactttgtgacaaagcgtcttctcacacgcgtcgttataaacgtgtgtatatctccctctctgtgtggcaatatatatttaaacttaagagggccaaatttattctttctctgagggccccaaaggggtctctctccacctgtggagggggggaacgccagtgctccgtgtgtctcnactcctctttataagagtttacacactataaaatttacctctttatataagccgattttgttgcgaagaacgaggcgcctttaaaaaatatttatcgtggaaagggggggtgggggttgtggcccctttcccaaaaaacctgtgtgggggggggtggttcccctgcgataacaggggtggcgggacccagagagaggaaccttgggggggacaacgcaaaacaagcaccaccaaggcggttattacgacgcaaagacggaccactaccaggcggggcaccccccggtgggaaaaaacgcaaaggggggttccaacgccattattggtggaggggaaatcccctgtggcacagaggcccctccattgaaagggtttccccccctataatggtatatttatcatacttcaacagcaccacattttggggggggggagggtgggtttctcctccgaaaaaacagggcgggggaacattcgtcggtctcacgggggcgtccgccacagcggaaacacacctgtcgttggggggcgcgacagcggggtgtgtcatgctgagaagaacaaaaccctctcttgcacacacaacggcggctctgtggggtcgttcaacatataaaccacagctgggtcaaccgcggagaataacagcgcggcggggcgcctcgtcaaacatatgtgtcctttctcacgcatataaacagcctctcctagttggtgtggttctaaaaagcacaggtattgtgtgtgccgccggaggtgatccacccctagccgcataagggaggggcgtccccacccacccaggaagaagggggagcaaccaacgcgggcggcttcacaacaagacacacctgtcgccgggagcagaggggggaaagaagaactcctcctgcttacagaaggaacggacagccgctctctaacaacacccaacaccaacggctggcggggggggggggcgagtcccacgccacacacatagtgatggacatggcaaggtagacgttactagtgagggacagagagggaccacaccagccacatca

SEQ ID NO: 510427 - DNA, 1422 bp, Homo sapiens
  misc_feature (324)..(324): n is a, c, g, or t
ggttcatatgctgtcgttgcgaagctcgctcccgagcatcaatcaaaggtagaggttcatgactgcttggcatgtcatgtggatcccagaactaacatgctagacttgaatgcgtgcaggtgggttggagatgtatcagactatggaacctgtattcctatggatgcatgtgtctcctgtgcaattccatcggttctgcaagatttgcgcacacgtcggaacaagcgtagagccatcgtaatatcccggtcgtatcgtacaaacacgttcgattctccgtctgtacactcgggggcgagagggctcaaattgaaactccctttnctatttctgggttgaacagacgggttgctcgaggtcaaacccgcagggactggccttttcccggagaagcgaacttacagattaggtataaatacagaaaaaaggttcccgatgctcgaaaggtcgtagtcgtcgaaatctacggaacagacctacaatgtgcccacgtgaagtggcgagataaaccgtgttaagagctttgtcacgcgaagagaaggcacttacgggcgcaactacagcgcactttcttactaacacaatggtttccgcaatggccttgattagcgctttttatccctacagaagttgccttgcctacctgcgcaaattccgaacttttttacgcccattgtcctagcgtgcaaagccgccttaaccgcacaggaaacccggacaagatatagcctcactgcggtgaggtctgccgcgacggctcactgtggtttacccttcggacaatcgaatattaacgcccaatttaattcctattagcctaaggtttcgcttcggatttccaccattctttcctttgaaagacaaacacggtaagggtttccgaaccaccaaattaccagtgtttttgccgccgttggaaaactactccccacccgaatttcaccacaacgtcttttgtggtggccctttcctaggggccccggggggcaaacatttaccttgcgggaacggcgaaacacgaagggccaaaagttaagggctcttttttgaattagggcttccgggtaacaccggaggtcccacagagttcccctataatggacaattgggtgtaacggtgctcgatcgtttgggtagagcttcatttgaaagcctacacacccaaccctcaatgagcggtagggtgtctagacagttagggcccctttggaaccggctccccaatgaggaggagtgatttttatgagaaaggcccaagattttggggccatgtaacattgctctaatatctttacaaaaggcccccccatagggttgggcgtattgggacaaaaacaggtgcgcaataacgcgccattacccaccgattttcccatttaccctccaaaaagtagtgttggtgtaagtgacgcgcgtttatac

SEQ ID NO: 510428 - DNA, 375 bp, Homo sapiens
  misc_feature (85)..(85): n is a, c, g, or t
  misc_feature (327)..(327): n is a, c, g, or t
  misc_feature (362)..(362): n is a, c, g, or t
acggggtttcaccatgctggccaggcgggtctcaaactcctggactcaagtgatctgtgcaactcggcctcccagtgtgctgganttacaggcctgagcaccacacctggccaaggtttccttttttcttcctacatagaagtgaggacatgaaatatttgtcattctgtgcctggcttatttcatttaatatacagacctgcaatctcatccattttgtctgcagtggagaggagtttcttcctttttaggctgaataatacttcactgggtgtttataccacagtttcttcattgaaacaaatttcttgaagagcaaatattttnaaagatgtcttgggaatgtggaaactttcacgggntacttgtgcccat

SEQ ID NO: 510429 - DNA, 104 bp, Homo sapiens
atataaagcatactagatactactatcgcactaagttttacggtactatagcatataggtccaatatacaaagggaatgatagcatagaaggcactcggggata

SEQ ID NO: 510430 - DNA, 574 bp, Homo sapiens
cactggtcgtggttgattcagctgaggtgctgtcgtgtttagccagcccatgctcgctctgatccagcagggagaaggtgacacggccgggcaaagggccactcaatggagattgtcaaagtgcaccagtgcagcacacgagatgtacatgtgagagtgtgtgtgccctacaccacgtgccatatgccatatgagtgaatgcatgacaccttgcagcgttgtaaaccataactatatagtgtagtatgaattgcttgggcttgaatgcacgtcaatggtttggtgcttgtgcctatgtgcctccctagtaggcctgcctgtaccagtagcttgccaaatctatacatgatagaaagcactgccatacacttggcccactatgatatgctcctcccatgctctctgcctgaatgctacctgcaagcttcctgcctgttgcctggctcaccagtggcacacatacatggccatgatgtggcttcacactctcctccacatgcctgtgccatttgccagcttagggcacctgtgcttgctgccggagtctttgaatgggcagagcaccagggcggtg

SEQ ID NO: 510431 - DNA, 202 bp, Homo sapiens
ctcatcgcgtggctctttgtgtggctcgttgtggggctccttgtgtggcacgtcgcgtggctcatggtgtggctcctggtgtggctcttcggggggctcttagtggggctcatcgcgtggccctttgtgtgctcttcgtgtggctcgtagggtggcgcattgggtggctcttggtgggtggcgcattgggtggctctaggtg

SEQ ID NO: 510432 - DNA, 706 bp, Homo sapiens
  misc_feature (385)..(385): n is a, c, g, or t
  misc_feature (689)..(689): n is a, c, g, or t
ggtgtttggtgctggctcctggggacgtacaaatcccacgagtgcggtgtgcccggcctcagtttctcgatagatcccgcttgcggggatggtgcgtgtatggttacagagtctgtgcatcttgggacactgtagtagcccaggtcggcttgtcactcgctgtgagactggggagattttcgtcttctagatgtatccctgtaggcgctggcagggttgtagatgaaggtgggaatgatctgagccttggttccgcctgacacgtcttggctagctcccagggttagacgtgggtcaggtgcagagcccgcgcagcaccttgggagcggtacctttgcccttgggacagacctggggtctccaggtatcaatgccagcggcgagntggcactgtctgcctgagcatgggtgtggccaccagaagagctgaggacgtgtggagctgtgcagtagagcttcgacgggcaacggccaccacgcgggggcgctgtgtgtggtggggcttggcaatgtgatgtgcatgctccaggcatgccgctgctctgtatggctttcttcggcctctgaccctgctgcccattctttccaacatcacagatgaactgcctctcctcctcctcgcctggggagcccagtggccagggaggggagtggtggagccagtcgctgtaacactgagcctcagagantacccagagcgctgggc

SEQ ID NO: 510433 - DNA, 340 bp, Homo sapiens
acgcgggcccattcggtgagtgagcatggtcatctctgttatcctctcgaggatccgtggataattgagatcctgtttgggtgcatcaaccaataatcccaaggcccggtcgggagaacccgaaacgatgtctgagaccacacatccagggatgggccagttctcgagagatcatttactgggattctaagcgaccaggagtcccaagcagagttactcatcattagatgacgctcatgatgtgttcaagcaacgaatccttagttgtccaatagggtgactggaactttcaagcatgcatctcctaattctgcctcccgggttcaagccattttcctgc

SEQ ID NO: 510434 - DNA, 499 bp, Homo sapiens
ttcagaggatctccatcaaccctaaatttattatggagccaaactaagcttcacaagtgaaggagaaataaaatcctttacagacaagcaatgctgagagattttgtcaccacaggcctgccttataagagctcctgaaggaagcactaaacatggaaaggaaaaactggtaccagccactgtaaaaacatgccaaattgtaaagaccatcggcactatgaagaaactgcatcgactaacaggcaaaatgaccagctagcatcataatgatgggatcaaattcacacatgacaatattaaccttaaatgtaaatgggctaaatgcaccaattaaaagacacagactggcaaattggataaagagtcaaggcccatcagtgtgctgtattcaggaaccccatctcacaggcaaagacacatgtaggctcaaagtacagggatggaggaatatttaccaagcaaatgacaaacataatacatttagggttgatggggtacc

SEQ ID NO: 510435 - DNA, 100 bp, Homo sapiens
gcagaggaaaaatcaggaatttcttgagggaacacatctgtggggaaaaagctggaagccttttacctttctggtgctcctggaactggaaaaactgcct

SEQ ID NO: 510436 - DNA, 117 bp, Homo sapiens
gcttttattgagacagggtctcaatctgtcactcaggccagagtgcagtggtgtgatcacagctcctcttatttctcaacctcccaagctcaaacaatcctcccacctcagtctcca

SEQ ID NO: 510437 - DNA, 224 bp, Homo sapiens
  misc_feature (1)..(1): n is a, c, g, or t
ntccggcagatctgcgtttattgtcaatctgtgatcacccgtgtagaggcccatataccgagtcattacgggagaggagagaggcgtggactccaggcctgacccacactggagctgagtcctcacacctcgcgtgaaggcagagtatctttgagcacatcagcttcattctgcagaccagctttggctacctggaacactgttcaggattccaagacctcggg

SEQ ID NO: 510438 - DNA, 201 bp, Homo sapiens
gctatgaagtcagtaatactgaatttgagaggtttgtgaactcaactggctatttgacagaggctgagaaggtttgcgacttctttgtctttgaaggcatgttgagttagcaagttaaggcccatattcaacaggcagttgcagctgctccctgtgtggggtacctgtgaaaggcgcctaactggagacacccagaagggg

SEQ ID NO: 510439 - DNA, 344 bp, Homo sapiens
gtcattcctgccaaaacctataaaaagtcaaaagcatcagctgggtttggtcgcccacgcctctaatcttagcactttgggaggctgcagggggtggatcccttgagcccaggaattcaagaccagcctggggcccctggtgaaaccttatctccacaaaaaaatcaccacattagccaggcatggtgacacacacctgtattctcagcttcttgggaggctgaagtgggaggatcacctgagcctgggaggccaaggtgcagtgagccgtgattgtgccactgcactccagcctgggcatcagggtgagaccctgtctaaagaaaaaaaaaatcaaaaatatc

SEQ ID NO: 510440 - DNA, 474 bp, Homo sapiens
cccgggacatcactgcagtgtagatgcatgtggtgaagattctctcatttgtaggtctctgtttaatcccgttagtttgttttgctgtgaagaagttctttatttaattatgtcccatttgtcaactttttcttttgtggcagtcgctttgggcatcttcatcatgaaatacttgccaggtcctatgtccagaatggtatttcctaggttatcttccagggtttttttatctttaaatttttacatttaagtctttaatgcatctaaagtttatatttgtatatggtgtaaggaaggggtccagtttcaatcttctgcatgtggctagccagtaatcctagcaccatttatcgaataggaagtcctttcctcattatttgttttggttgattttgtcaaaaatcagatggttggccaggcgcagtggctcacgcctgtggtcccagcactttgggaggcttgcaggtggatagt

SEQ ID NO: 510441 - DNA, 361 bp, Homo sapiens
ggcagagtcaaatcctcacatatcagtgttaaccttgaatgtgaataggaaaaatgtcccacctaaaaggcacacagtgcaagttgaataaagaagcaagacccaactttctgctgtcttcaagagatccacctcccatgaaatgacatgcataggatcaaagtaaagggacacagaagatcttacagcaaatggaccaccaaaagagcagcattgctattctatttagacagatagactttaaccacattatcaataggacaagagggcattacatatgataaagatcacatagaggcccactatctcatatatatacaccccactgtggaccagttcatacgaggtctcggccttgagg

SEQ ID NO: 510442 - DNA, 1193 bp, Homo sapiens
gttcaatgactggttgatgagtcaggagtgagattctttaccaggggtgcagtgccattcgctgtcctgaattctcggatcgctatactgcgctaccgttttgccaatgtccacactgtgaagggcatcggtagtattcgggccctcatatatgacattctgaagtatgaagaaaatcaaagggtctcctttctaggctgaggagaggtgaatgaatttagcacgtgtaccgcggaaggtcgcgcgtaatcagttgtccagggagccctctaaggactccgatacggtagcgtcgactggggtcgcgtgcccgtaagataatagctttgtcacgcacagataacgctatcgttcaggtgctagcgaccaggtcatgtcaacgtggaactcgataggtggagttccagactgcgtcaatccaccacccggccgggatacgtacgataggaggcacaagtgccgcgaatcggagcgcaccatagcctagtccttctgaccgttctgtggcacgtctagaagttcctaccaacgcataaggttgaggccttgatcattgggacgtgcacatgtttgcttcaactgtaggggactttgtggtgcgacaagggttatacgctacgagacacgtttggatccaggacctatctccctgaggaaggggtacgaatagatccggccacacggacggacagagggactccaacgagacttctctaagttaaagcgggggaaacgcaaggacacgcggcagtatacatctagaagagcgttaacgagttcaagcccggcgggcgtaatcaaagacaacctttgggggcatacctgaagaggggctctggacttgaaaattaatccaacgaaggaaatggcttgccatttctatagagaaccaccggctaatgtaggaggtcgttcccaattgttgttgctttgggaagcgccgcctatattttagaaatggcaactcttgttatagcaggattaccccttacagattataggcggtataagccccttttggagtccgaattaaacccgtacacccacttcggatttgcccccccttttggagataaggttggttagaccgaagggaaacccaccacgagtgcggacgaaagactacgacgagactcgcaacgtggatgggcgccacacgcggcgaggacacatcttgtggggagcgcattaag

SEQ ID NO: 510443 - DNA, 741 bp, Homo sapiens
  misc_feature (4)..(4): n is a, c, g, or t
  misc_feature (24)..(24): n is a, c, g, or t
  misc_feature (247)..(247): n is a, c, g, or t
  misc_feature (442)..(442): n is a, c, g, or t
  misc_feature (446)..(446): n is a, c, g, or t
  misc_feature (462)..(462): n is a, c, g, or t
  misc_feature (473)..(473): n is a, c, g, or t
  misc_feature (477)..(477): n is a, c, g, or t
ccgnttttccgaaacaccttatgnggcctgtacctaatgaaccaatttttgagaactatatctagatttaaaattccatgtttcatatacatttggcagaatagtttctttcctttaaccaaaacttgatcttagaaatgaaatagtttagccttcagtatttgtaattggatcctcaagggtttctaggaatatctggacaatttctcatactctcatattctacttttttttaaaccatcagccnagagcataagtaaaatttttcatagtatgttttttacctatttatttattaagctatagtgaagtaaagttaatttggggggtccatttttcagaactccaaaattagaacctgatgaagtataataaattgaaaacaacattttttatctgaatgtttgatgcaactgtgtttcttgtttctcagttgaacctnaaangtatatttctttcatnctagactgagntganacaatgcgggttctcaagagccctgggacacagtgacccttgtgtcccagcatccaaccccacgggccggcaccccactcccccctacagacattcattcctgccttcatctttgccattttacttctcttttggaatgccattccttcccacctgtccaaattccaagttcgtgtctataaagaataactattccagaccacagtgatctctttctctgtgtcccagttacataatccttataattttacacatgagaaaact

SEQ ID NO: 510444 - DNA, 1212 bp, Homo sapiens
  misc_feature (477)..(477): n is a, c, g, or t
tctgtacccctatgatggcatccacccggacgacttgtctttcaagtaaaggtagagaagatgaaagtcctggaggagcatggagaatggtggaaagcaaagtcccttttaaggaagagagaaagagaggcttcattccccagacaaactagtgtggaccaatactcaaggacctgtagaaatgcagaagagctggcttggtcaaggtatataaactcgaggcaaggacgcagacaaggctggcttgtggggcgccaggaatatagcagcatggatgctttccttaataagaggaaacgtgagaagctacttaagagaggataggcgttctcatcgtgtactgtcatgagacgttttgaaccctggtgcagtggtgatggtgtattaaaggcatcatgagcaacatagttagaaggtctggaatagaatcggtgggcatattacatctgcatccacgtaatcacttgttgcacctgntatcagacgacgatgagttaagatcattgaccgaataagcatggctagatggctttgtgcacgatagattggacgaaggctatgtattgagtcccgaagcctacgagaagaccatggcgataaacgagtgccatgggaggatcccccgtgagtccatccatgtcggtgaaaaggctttggtgcgggtgcagtgtggggaacggtctggatgggttactatatagcaatagtaccatagggtgggtgtggaaaaacctgagagccaggaactatgtctgtgcatagccttgctggaggaaggccaatactcatgaaggaccctggcagcgtgacaagctcgtgaggctctaaggtgtgagtcccaggggaggagcccgtttacgtcattaccgggtacggtggcaggcagttgctggtttcctgaagacgatgcagtggccgatggggccgttccaaaaggcatatggattccggagccaagatgcgggggaaatgtgtctattcggcgcgggaaaaagtcaattcccgggggccggacacaggcaaaggatgggtgccagaccctggcgcgaagcggagagagcggcgaaaaaagaacaagagagcacacaagagaggggaacgccaaacagaggcgaacacaacatctgtgtcagcaaagaggaggagcgtcctaggagagtaaaccacaaagcaacgaacacacacagacgagtacacaaagagagatcagga

SEQ ID NO: 510445 - DNA, 104 bp, Homo sapiens
  misc_feature (46)..(46): n is a, c, g, or t
ctagagtaccctttctctgatcgctcccccgttatgaggccattgncctcgtacgggggggggggagcgatcagagaaacgcgatcagtgagcgatcagagaaa

SEQ ID NO: 510446 - DNA, 139 bp, Homo sapiens
tgtagctgaccttgatttcacgcggttctcgtataatcgacaatgtcagtcaggtaatcacagtcctatagtggtactgagaatcaaaagcagagctcatatagccagcaaccatataataaccaggaacagcagcaaa

SEQ ID NO: 510447 - DNA, 347 bp, Homo sapiens
accaggacggggctcacacggatatcctcaggctgagaagcagcgtgtagagcgagccagctccactccctgggaggaggaagagagtcatagaccatactcgcgcgggaaaacaaagcgtggaggtgtctgctgtccgtcgtgaaggcgaacaaacccttcaaaagtgtcccgtacctgtgcctctccttattggtagacaagcttgacctgtttctgcagtcaagtctgttatatgttgtgttgttcacagtatatgaggaaaatccagtctcacacagacatacagctcctatgacagatcatcttcccaaggttaggttccaggtaatccagctcatttcttt

SEQ ID NO: 510448 - DNA, 551 bp, Homo sapiens
  misc_feature (162)..(163): n is a, c, g, or t
  misc_feature (197)..(197): n is a, c, g, or t
  misc_feature (429)..(429): n is a, c, g, or t
tctttgtggggagagagggcaccaccccccctcccacaaaaatatttccccgggcgcgtcccttaaattttttgcgcgcccggggtgttctctcctccaccctttttttttctttcctccttctttttatataagagaaaagaaaaactccccccctcctcnncaagagggcgccgcgcggcggagagagagaaaanaaatataatttttggttgtttttcttattccacccggcgggggggggcggggagggaggttttcttctttcttgcgggtgggagaaaataatttttttataaaaaaaaagaagagaggaggggcgggggggggccggcgccccccactttataaaaaataaagaaaagaaggggggtgtgttttttttatataaagaggggggcccccccccccccccccccgttttgcttnttaaggaggggggcgggggggaaataaaataaaagggcggcgcgctttctataaaaaaaaaagaaaccgggggggggagagaggaaaaaaacccccccactccccgctcgcgcgggcggggg

SEQ ID NO: 510449 - DNA, 424 bp, Homo sapiens
ccttttggaggttgtaatgactcatggattggccttagataccatcctgagggtctaaaatatgggcatctgtcaagcaaggttcatggatggtgaactcagaatgaagatactatcacctaggggacaaaacactgatcatcatagcaatatccaggtgtgtatgaaataaatcatgcagattgaccccagcccctgttggttagtggctgccagtgtggcacatttatgtcaaaatttaccagaagccaagatgatgtaggaccccaaaggtgggttgttaagagatgctcctccaagggtctcttctgatcccacggatcctgcagagcgtgtcaggaatgaaaccatccataactgccagtgccctttcacagctgattatttctgtgtccccttgtaaaatctaagaagtgtgacagca

SEQ ID NO: 510450 - DNA, 586 bp, Homo sapiens
cctcctactcctcattgtacccacttcgtaatcgcaatggcattcctaattgcttaccgaatcgaaagattctaggctatatacaacatacgcataaggccccaacgtagtatcgcccctacgggactactacaatcccttcgcatgacgcctataaaactcttcacctaaagagtcccctaaaacccgctcgacatctaccagtcaccctctacatcactcgaccaccataccttagctctcaccatcgtcgtcttctactatgaatccctgaatcccacatacgccaatcccgttgtgttcgacctgaatccggaagggtccgtcgcgtatattggagttcttagacgctactccaacgttaagcgcatgatggcttcgcttttgaacgttcatagtacctcatgcattcgagcggatgtaggccatgctgacacgtgcgacaccccgtgaccggcccctgtcatcagcgtggcgacctggcggtagacatggtgaggccggccagagactagatggtccatcatgaagagtcttacaccgtttagcccatcgattctttaattatgggaaagattacgtaacg

SEQ ID NO: 510451 - DNA, 210 bp, Homo sapiens
agctcggtcgtgcacacatactagctaatttttgtctttttaggtagagacgggttcaccattttgcccaggctgatctcgaactcctggcctcaagtgatccacccgcctcagccacccaaagttcaggaattacaggcgtgagccaccgctcccggcaaggtttttaaaaaaattataagatgattatttttaggaatttggacaata

SEQ ID NO: 510452 - DNA, 1070 bp, Homo sapiens
  misc_feature (139)..(139): n is a, c, g, or t
cataaaaataagataattataactaaaccctgagtaaccaaaatgaacgataatctgttctgcttcaattcattgccccactactaatcctagagcgcgtacccagcgctgcagtacatgatcgattcatatttccccnctctattgatcccctagctccaaatagtctcatcatacaagccgtactaatcatccactctcaaacctacaatgacgttaattcaatacttaagccatcgaatatacaacattgagtcacatccataacaacaaccaacgtacataggcaccgataacctgcactcatacttagtaactgagtattcgcgttcacactccatttgtgtcattcgaccacagactaaactctcctcaggacgtcctgaccttcatcatcactttatcacgctaatccactccgaactatcgtagtaatacactagccattggcctatcccctttattgagctgggcgcagtgacttatagcgctttcgtctctacgcattcataattgccctagtcccaggttcttaccacaaggcactaccttacagccctttatccccattactagtttattatcgaaatcattcagcctactcattcagatcaatagccctggccgtacgcctaaccgctaacattactgcaggccaccgtactcatgctacctcattggaagcgccacctagcaatatcaatcattaaccttccctctacacttatcagtcttcacaattctaattctactgatgatcctaggaatcggtggcgcgttaatccaggctacgttttcacacttctagtaagcctctacggccgagaaccattaaaacaaacacacagagaaatccagcaacacacaagagcgacacacaaagaaggcgcgcgcgccaaaaactccgggaggcgcccactttggacccccgtttttgtaaaggggcccaaagagcgccttaaagcagaaacccgggttaaacactcggagaaacgtgcccgcactggaggacacatgggggaccacggcgcccgcgagacccgcggaaaaatgggtggacccacgcgaga

SEQ ID NO: 510453 - DNA, 222 bp, Homo sapiens
  misc_feature (119)..(119): n is a, c, g, or t
  misc_feature (129)..(129): n is a, c, g, or t
  misc_feature (131)..(131): n is a, c, g, or t
  misc_feature (169)..(169): n is a, c, g, or t
gtggcacatgcctgtgggggcaacaactcagaaggctgagatgtgaggttcacctgagcccaggaggtcgaggctgcatgagcggtgattataccactgcactccagcctgggcgacanaatgagactntntcaaaaaaataaaaataaaataattattaaaaagacgnactgcaaaggtcatctgagcagtaaaatattgagatggctttatttataattt

SEQ ID NO: 510454 - DNA, 162 bp, Homo sapiens
gtgttaccaagtttatatgtgacagttgaaaagaaattcccttgaatgatcatgaggttaaaatttcttcattaggggacttggagaccagtagtcgtaagattagttgatagtttcactccaagaatgaattcctctgtgtgtttccttaggactcaatag

SEQ ID NO: 510455 - DNA, 353 bp, Homo sapiens
acgtacagtgtagcttctcggattatcatcactgagggtggaagagggagtgagcagacacacgctggaggtgtcttgagattatcatccgctgagggtggagctgagggtggaaggggagtgagcagacactcggaggtgtcttgagattatcatccgctgagggtggaaggggatagagcagacactccgcaggtgtcttgaggctcagggagttatcagttatagaatgttgttgagttggaggaggtggctggtggcccatcctgtcttttacagtttcagctgtgaggtagggccagcagggcaatcctgaagaatgacgatgctctgctgacgccaattctgacccg

SEQ ID NO: 510456 - DNA, 491 bp, Homo sapiens
aactttcttcgcatctgtgcacggggcccccaggcagataggaggtcctcccctctcctctccacaccccgtgctgccccctcccggggtggggttgggggggtggatgtggactaactgggagccggcccgggtaaatgcatcccctgcccatccctgcagatgggatgaagtgtcagacagccatagaggagtcgggggtgacacggcccctgcactctccccaacgcccgacgcccaacctcgacgccgaaaggccactgggagcaagtacacgggcaactgggcggttgcagcccccagcccaaaccaccccaagtcgcggatacatcacaacttcaagggcgactccacaaacgattcatgacccaacggaaagggtccacatgccatgtgcccccccagcagccatcgagtcgcgaccaaacgccagggcagactgccgcggcacgccgccagcaaatgccccgtaaggcgcccacccccgcccg

SEQ ID NO: 510457 - DNA, 217 bp, Homo sapiens
  misc_feature (168)..(168): n is a, c, g, or t
  misc_feature (171)..(171): n is a, c, g, or t
  misc_feature (196)..(196): n is a, c, g, or t
ctgaaaaccatttgtatgtgtattctctttgcccagtttacttgtatttacctttcagaactcttctcaatgcctcatcctcacaaaatctttactaggctcctcactcctcaccacaactcaggtaagatagtccctgttaaattttcttggcacgctgtatttctnctnataaatatttatatttatagcacanattaaaatgttttataaaggg

SEQ ID NO: 510458 - DNA, 358 bp, Homo sapiens
  misc_feature (37)..(38): n is a, c, g, or t
  misc_feature (42)..(42): n is a, c, g, or t
  misc_feature (51)..(51): n is a, c, g, or t
  misc_feature (108)..(108): n is a, c, g, or t
  misc_feature (240)..(240): n is a, c, g, or t
cgcgtacgctcgaaaatgtgttccagccgcctttccnncaanccatgctgntccctgtgagccagtctgtgcaaggaggcctcccagagagccaggacaggacatctnccatagaccttcagcaacagttgcatcatggatttgtttccactggcctaagaaaggcaggggtaaagatcccagtagttccctaaagcaggtagaatatgagggagttcattctccttttcacttattganttgacatgtgcctaagagggtatcagcagaacaaaattcctgcttcagagacttataatttatgagttcctccatttttatttctcaaaagaatgcgactcagaactagaggatagag

SEQ ID NO: 510459 - DNA, 408 bp, Homo sapiens
  misc_feature (400)..(400): n is a, c, g, or t
aggcgaacacaggaggattacttatggccaggcgttcaagaccagcctgggcaacgtagtgagaccctgtctctacaaaacagtttaaaaattagccaggtgtggtggtgcacctgtagtcccaatggctcaggaggctgaggtgggaagattgcttgagcccaggaggttgaggctgtagtgaaccatgattgtgccagtgcgttctagcctggatgagagagtgagaccctgtcttaaaaataaagaatattttttcttggctgggagcagtggctcatgcctataatccaaggactttgggaggctaaggcaggaggaatacttgaggccaggagttcaagccagcctgggcaacatagcaagaacccatctctacccaaaaaaaagaagaaaaatnttaaacaa

SEQ ID NO: 510460 - DNA, 361 bp, Homo sapiens
ccaatttttttttccaaaaagaaaaggcaggggggtgtgagtgggtgcattttttaaagctgtcttgaacacctatttaaatgtgtgttttggggtgttttttttagggttttttttttaagctgcctgtgatatgtccactgggctgagattggaggcctcaggcaggagcccacccatagttctcttccctatgacgacttccccagatagcattagccaccctggggggcagggggggaagaatccggctgtggggtatccacctcgcccaagtctccttttactgaaataaaatttgaggggaagagaaaaaacttacacgagcaccgaatttcaaataaacgaaaatgagacatga

SEQ ID NO: 510461 - DNA, 374 bp, Homo sapiens
  misc_feature (139)..(139): n is a, c, g, or t
  misc_feature (224)..(224): n is a, c, g, or t
caggccggggcctgtgcttcctcctgcgcctgacatactcccaggctgtctcccggcaagaggctctccttagcaggcatgcggtaaagcatggtgctttaggtcagctggccgggtccatgtgtgcgggcacctatgngccttgtgagcgtgcaggtgtatccacgtgtgagccatgcgcttgcactgtgtatatgtgcacatgtatgtacacacgtgtgcanacatgtgtactgtgctcttgcacagctgtgtgctgtgggcatgctcacgtgtgtgtgtgtgtgtgtgtgtgtgtacgtgtgtgtttgtatgctgtggcaggtgctttctgggcgtttacccgcccgcgaatttagtagtagtagtcgccc

SEQ ID NO: 510462 - DNA, 247 bp, Homo sapiens
ggtgcgaaggacttatcattccgccgcaacatctgagctggctctctgttctccccgctggggcatcaccatggtcagggggctgagagtgacccccacgtcaccgagcctctcatgggaggagttcccgagacccggctggaggaggagcgagagcgtgagctgccgcctccagcaccaccagctggcatcacccgctccaagtgcaagcacgagctgaaactgctggagaagattcctgagaatg

SEQ ID NO: 510463 - DNA, 380 bp, Homo sapiens
agtttagaaactggcccaacttcacattcgggtaggcccaggggcatcggcgttctcttacataccccttttccgaacaggcatttctgctctcagtgtggtatcctccctcccacaaatatttgcacctggcatagggcgtgtgcacgggcgctatgcagcctgagtgttccagaagtcctcgtacaccttgtgcacagttgatgatcttcctccgtggcaaactttgcagctttaggtttttggttcccgtaagccttcatcagctcgcgagcctctcagcccaagagccagagggataagtatccgtatcatagtttcgtgtgtccacagctgtccaagtgtgtatctgcacctctgcgcagaacgttacaccgcct

SEQ ID NO: 510464 - DNA, 124 bp, Homo sapiens
taatatcttacgaaagtccagaaagacatggaacagaaggtgactggtgtttctctgagagagaggcggaggtgacagaagagttgaggtttccatatgtcaatacagtatcaatgtttaatta

SEQ ID NO: 510465 - DNA, 170 bp, Homo sapiens
tcatccaagcgtaacatacacaaacacaatatacaatccaaaatagatatacagcattctggaataaagcacagagtgtacacttcacacacacagacagctaacaaaactgtacgatctgtttgctccccatgtagttttctaaacgatggacaaaccgggcggacgct

SEQ ID NO: 510466 - DNA, 462 bp, Homo sapiens
  misc_feature (21)..(21): n is a, c, g, or t
  misc_feature (76)..(76): n is a, c, g, or t
  misc_feature (153)..(153): n is a, c, g, or t
  misc_feature (180)..(180): n is a, c, g, or t
  misc_feature (312)..(312): n is a, c, g, or t
  misc_feature (423)..(423): n is a, c, g, or t
  misc_feature (437)..(437): n is a, c, g, or t
ttactaatctaggcacagcgnagtgtggttactggactaggcacagcgaagttagttactaatctaggcacagcgnattggttactaatctaggcacagcggaattagttactggtctaggtacagccggattagttactaatctaggtacanccgggttggttactaatctaggtacanccgggttagttactaatctaggtacagctggattagtaactaatgtaggtacagctggattagtaactggttgattgaccacactattaggtacaaacaaatgggctcaatatcataatataggggattccngtggcatattgcaaggatattttcggccttatcttgggtcacaagtttttttcaattaactgggaattgaaaacatatttcattaggattttgcagatgacatgaggtccngattacctaggaanaagttgtttggaatggaagttattc

SEQ ID NO: 510467 - DNA, 111 bp, Homo sapiens
ctaggtcgatgcgcttgatgccgttgggccctgataaaaccgcaccatgctcgtttttgcgaatgatgcctgttgggccccatccagctgtgttgcgtcctgtagcggcct

SEQ ID NO: 510468 - DNA, 849 bp, Homo sapiens
aaggcgagagtggtcagtcacaggtgcggaagccgcctaccgccgtgagcccgcggccatgttcgcctgaccggtaacctagggccgaaacgttttgggaacgcgcctggcccccaagggtaatcccctccacacgtgtgtcccgtcggaacgcgtgtccccccaaaaaaaacggctggtcgtgaacaaccctcggaatggtccgaaggaaaacagtggccaggaggcccgccatccattgaccggcccacggcgccattcgtaacactgagccccgtggggcactctcccccaacccgggggtttgtggtaatccctcccgctcgcgttcgcgtaggtagcgctgggaccccccgttcatgttcgtctccgcgtggcgccccgctttttaacaggttctataggcggacactccctcggctggcaccgtgtggcgccaaggacacctggcggcccgttgtttaatgatgccccgcctctctgggctcatatttccgggtccccctgcaagtccccttgtggggacactgcaccgaagacccaacgtggcgctcacacactggcgggccccccgctgtgtgtgaattcacaggcgggctgtggacatcttcaacaatggtgccgccctcaggcaggaacaatcgtggaccaccgcgggcagacaagggggagcgagacacgcaggtcctccgaacaaaccttgaccccgcccgccctactcgggatggcacctgcaaggcactggcgcaaaaacagccggggagaacttcccccccccgacaccccgtgcccccccccctccccccccttcccaaaaaaaaaaatcttcccccccccgcacaataaaaa

SEQ ID NO: 510469 - DNA, 122 bp, Homo sapiens
tgcgatgtcgcgtgcatgttttggtcaatataacattacaccatctaatatgtgactgtgaggtgtgactgtgaggcgtggactgtgaggcgtgactgaggcgtgactgtgaggcgtgactg

SEQ ID NO: 510470 - DNA, 208 bp, Homo sapiens
attagaataagagcttatatgagtgaagactgggggagcttataaagacctcggccagtcatgatctcaaaccaattaggagcaccaagctcccttcccaggtaactgttgggagcaatggcatcactgtatgcccttgtaatggctggacagggacatgatcttgtacagtacggaccacgctgtaactaccaaacttgtacttgtt

SEQ ID NO: 510471 - DNA, 388 bp, Homo sapiens
agaaaaccttccccaaacaaggggcacagtgaataggtcatatgatattcctattattctctattatggaattggtacatcatcaagcagcccctgactgacagcattcgtctcttatccttgtgtgtcattcaaatattggaactatgttacaggctgcagcccgactgtcggaagctgttcatatagttcttggattatatgaagttgtccctatataagcctctacctcaggctaatagttggagtgaaatcatatttacagtcagatgtttgacaggctgtctagtctattcagttgattaatacccatttatttcaatgttaaacctcattatcagcaaagagctgagcttcattatcgaactgaatggcatataattagaac

SEQ ID NO: 510472 - DNA, 2288 bp, Homo sapiens
ggacgcgtgggtcgacccacgcgtccggaagttccctgtgggaggctgttttctgagggagctgagtgtttacagccactcagccctgctctgctcagctgaagcagaaaacagagaccttttgcattactttggttcaagagcaagacaggaggcgactgcatgagaccatggctgagacacctagtcctccaggcactgaggaactccagggcattctgtgggtctcatgggaagccagcacctctacctgttcctcagaagatcgtggccacctgggaagccatcagcctgggaaggcagctggtgcctgagtacttcaacttcgcccatgatgtgctggatgtgtggagtcggctggaagaggctggacaccgccccccaaatcctgccttctggtgggtcaatggcacaggagcagagatcaagtggagctttgaggagctggggaagcagtccaggaaggcagccaatgtgctggggggtgcatgcggcctgcagcctggggacagaatgatgctggtactcccacggctcccggagtggtggctggtcagtgtggcttgcatgcggacagggactgtgatgattccgggtgtgactcagctgacagagaaggacctcaagtaccggctgcaggcgtccagggccaagtccattatcaccagtgactccctagctccaagggtggatgccatcagtgccgaatgcccctccctccagaccaagctgctggtgtcagacagcagtcggccaggctggttgaacttcagggaactcctccgggaggcttctacagagcacaactgcatgaggacaaagagtcgagacccgctggccatctactttaccagcggaaccaccgggggcccccaagatggtcgagcactcccagagcagctacggactgggttttgtggccagcggaagacggtgggtggccttgaccgaatctgacatcttctggaacacgactgacactggctgggtgaaggcagcctggactctcttctctgcctggcctaatggatcttgcatttttgtgcatgagctgccccgagttgatgccaaagttatcctgaatactctctccaaattcccgataaccaccctctgctgtgtcccaaccatctttcggctgcttgtgcaggaggatctgaccaggtaccagtttcagagcctgaggcactgtctgaccggaggagaggccctcaaccgtgacgtgagggagaagtggaaacaccagaccggtgtggagctgtacgaaggctatggccagtctgaaacggttgtcatctgtgccaatccaaaaggcatggtggatgatgagggcaacgtcctgcctcctggagaagaggggaatgttgccgtccgtatcagacccactcggcccttctgtttcttcaattgctatttggacaatcctgagaagacagctgcatcagaacaaggggacttttacatcacaggggaccgagctcgcatggacaaggatggctacttttggttcatgggaagaaacgacgatgtgatcaattcttcaagctaccggatcgggcctgttgaagtggaaagtgccctggcagagcatcctgctgtcctggagtcggctgtggtcagcagcccagaccccatcaggggagaggtggtaaaggcatttatagtccttactccagcctactcctctcatgacccagaggcactaacgcgggaactccaggagcatgtgaaaagggtgactgctccatacaaataccccaggaaggtggcctttgtttcagaactgccaaagacggtttctggaaagatccaaaggagtaaattgcgaagtcaggagtgggggaaatgaggtgcaccccaggaaggccccgtagacctccgaagactccacaagaaactaatggatcactggtcagtccccatggggagcatcatctcttcgaccctaaagatgtcaaaggtgtgcagcttccaaacggcatccccaggatcactgggcaatgctggaaagagcaaaagaatatcattggccctgatcacatagatgctgcgccgcctagcaaatgcttggtggttcgacttctccctctgtctgggggcaggctcagcatctgcccactggtctcactaagagctttcagatttccctccataggacaggttaccatagacttggggcacttgtgggtactcattttctgccagtgggaatgtaaaggcttcatcctttgtatgtaaccatttggcaaaagtatgcaggaacataaaataaaatatcctttagctca

SEQ ID NO: 510473 - DNA, 1859 bp, Homo sapiens
  misc_feature (1146)..(1146): n is a, c, g, or t
  misc_feature (1156)..(1156): n is a, c, g, or t
  misc_feature (1697)..(1697): n is a, c, g, or t
ggaggatctgacaataaatgcgtggtatagtggaatgggcgtgtttatacaatcccgtacccaatcaaaagtaaaggtggtataggcattaaaatattccgagtcagagggtaattcttttcagagccaaaaggcactaacgcgggaactccaggagcatgtgaaaagggtgactgctccatacaaataccccaggaaggtggcctttgtttcagaactgccaaagacggtttctggaaagatccaaaggagtaaattgcgaagtcaggagtgggggaaatgaggtgcaccccaggaaggccccgtagacctccgaagactccacaagaaactaatggatcactggtcagtccccatggggagcatcatctcttcgaccctaaagatgtcaaaggtgtgcagcttccaaacggcatccccaggatcactgggcaatgctggaaagagcaaaagaatatcattggccctgatcacatagatgctgcgccgcctagcaaatgcttggtggttcgacttctccctctgtctgggggcaggctcagcatctgcccactggtctcactaagagctttcagatttccctccataggacaggttaccatagacttggggcacttgtgggtactcattttctgccagtgggaatgtaaaggcttcatcctttgtatgtaaccatttggcaaaagtatgcaggaacataaaataaaatatcctttagctcagaaattctatcttcgggagtcaccacaaaagaaaaaaatcaaaatgcagaaaatgtgtggtgcactaagatgatcacacagcattaaaactaaaaaaaaaaaagaaaaaattaacaattaacatccaaacaacaaggaaatgattaacaaaattgtagtagattaactcaattacatatgatgtagccactaaaatatttgagagcagtttagtatgtcttgggaaaagtgtaagctatattaattttaaaaatcagagcaaaaatattcatactggagaatcccaactctgaaaaataaagggaaaactgtggttaattgtaatcctcctggagattgaggagggagggagagaaaataatggatggtagtttttcttcttcctttttccattacatttctgtattttccaagtttttgtacnaagcacatanaactattttaatgaaaaagttatgttaaagaaagcatactctgcttcatgtctagttcttcctccacatactcatacatcaaccccaaagactgctgtattatgtctgtattagtcagcattctccagagaaggagaagcaataggacatatatagacataggagaggggatttatgatgggaattggctcactcgattttggaggctgagaagttccacaatctaccatctgcatgctggagatccaggaaaccccgtggtataattccatctgagtccaaaggccgttgtggaggctggaggtctaggatcaggggttggcaaggttggtttcattctgaggatgtttccttggtttgtagatcgccgtcttctccctctgtcttcacgtggtctttcttctgtgcatgtgtgtctggggcccaatctcctcttcttctaaggacacctggtatttgtcatatgcctcggctcctcaaactgcagcaaacaaactctatggaagagaaaaaaatgggactccagagacttgaaatcacngccacttgtcagatgcagcccccaactcagctgcaggagcttagccaaatttctagtcctctctgagcctcaatttccttatctataaaatggggctctggatacctctcttgtagagttcttgtttagattacatgtgagcacttctataaaacactgaac

SEQ ID NO: 510474 - DNA, 516 bp, Homo sapiens
  misc_feature (324)..(324): n is a, c, g, or t
  misc_feature (384)..(385): n is a, c, g, or t
  misc_feature (388)..(388): n is a, c, g, or t
  misc_feature (390)..(390): n is a, c, g, or t
  misc_feature (392)..(393): n is a, c, g, or t
  misc_feature (395)..(396): n is a, c, g, or t
  misc_feature (407)..(407): n is a, c, g, or t
  misc_feature (466)..(466): n is a, c, g, or t
tccaggagacagctttactgtgggtcagtgctactacctagcgaaacagttaggtcaccgtgagacatttattgctaggagaacatgtagaaccgtatcatggaacatagccgtctccttttaatgtccccccatgtcagataatgcattatcttctcgtacagtttctttacatcgaaagcatgcacagtggcagagcagacaatcacctgaagtcttgatccatcagaggtacccgtgaggaatctgattgtgcatcctagtttataaaatcagaataaccttaagaaagaagcccattcagcttcatccaggaccaggaanctaactgagataagttcagctttccagttgacaccaagtcatctagtcttcccggagtanntanantnnanntactccatttnccaaaacagagagctgatcccgggctgcaacacctccaatagtcgaagctcccttaatnaaggatatcaatgtatttcttaaacgcttgatgtcgttcaaagtctgttc

SEQ ID NO: 510475 - DNA, 170 bp, Homo sapiens
cctctgcatgcacagttcaaggtccctctttcctggacctccaaagcatttttttttgagacacggttcactcttcacccaggcatgagtgcatgtggtataatcacagctcactgcatgactttaccccccaggcgtctggttatcctcccagctcagcctcttgagta

SEQ ID NO: 510476 - DNA, 85 bp, Homo sapiens
gacagcagcttctacatctgcagtgctagaacaaggacagggggctacgagcagtacttcgggccgggcaccaggctcacggtca

SEQ ID NO: 510477 - DNA, 1741 bp, Homo sapiens
  misc_feature (1028)..(1028): n is a, c, g, or t
  misc_feature (1038)..(1038): n is a, c, g, or t
  misc_feature (1579)..(1579): n is a, c, g, or t
tttttttttctctttcaaaacaaaagtctttttgagaaatgatgatttccaagtgttttttgttttgtgtttggtcactaggtggcctttgtttcagaactgccaaagacggtttctggaaagatccaaaggagtaaattgcgaagtcaggagtgggggaaatgaggtgcaccccaggaaggccccgtagacctccgaagactccacaagaaactaatggatcactggtcagtccccatggggagcatcatctcttcgaccctaaagatgtcaaaggtgtgcagcttccaaacggcatccccaggatcactgggcaatgctggaaagagcaaaagaatatcattggccctgatcacatagatgctgcgccgcctagcaaatgcttggtggttcgacttctccctctgtctgggggcaggctcagcatctgcccactggtctcactaagagctttcagatttccctccataggacaggttaccatagacttggggcacttgtgggtactcattttctgccagtgggaatgtaaaggcttcatcctttgtatgtaaccatttggcaaaagtatgcaggaacataaaataaaatatcctttagctcagaaattctatcttcgggagtcaccacaaaagaaaaaaatcaaaatgcagaaaatgtgtggtgcactaagatgatcacacagcattaaaactaaaaaaaaaaaagaaaaaattaacaattaacatccaaacaacaaggaaatgattaacaaaattgtagtagattaactcaattacatatgatgtagccactaaaatatttgagagcagtttagtatgtcttgggaaaagtgtaagctatattaattttaaaaatcagagcaaaaatattcatactggagaatcccaactctgaaaaataaagggaaaactgtggttaattgtaatcctcctggagattgaggagggagggagagaaaataatggatggtagtttttcttcttcctttttccattacatttctgtattttccaagtttttgtacnaagcacatanaactattttaatgaaaaagttatgttaaagaaagcatactctgcttcatgtctagttcttcctccacatactcatacatcaaccccaaagactgctgtattatgtctgtattagtcagcattctccagagaaggagaagcaataggacatatatagacataggagaggggatttatgatgggaattggctcactcgattttggaggctgagaagttccacaatctaccatctgcatgctggagatccaggaaaccccgtggtataattccatctgagtccaaaggccgttgtggaggctggaggtctaggatcaggggttggcaaggttggtttcattctgaggatgtttccttggtttgtagatcgccgtcttctccctctgtcttcacgtggtctttcttctgtgcatgtgtgtctggggcccaatctcctcttcttctaaggacacctggtatttgtcatatgcctcggctcctcaaactgcagcaaacaaactctatggaagagaaaaaaatgggactccagagacttgaaatcacngccacttgtcagatgcagcccccaactcagctgcaggagcttagccaaatttctagtcctctctgagcctcaatttccttatctataaaatggggctctggatacctctcttgtagagttcttgtttagattacatgtgagcacttctataaaacactgaac

SEQ ID NO: 510478 - DNA, 130 bp, Homo sapiens
taggctccagcttctgtgtcaggtacaggtgcggatacacatgttttcaggctaatcgcccactccgtctctattagcggccttggatgtggctgtcacccctctcgggggcccacaggggtggtcggtg

SEQ ID NO: 510479 - DNA, 1309 bp, Homo sapiens
ggacgcgtgggtcgacccacgcgtccggaagttccctgtgggaggctgttttctgagggagctgagtgtttacagccactcagccctgctctgctcagctgaagcagaaaacagagaccttttgcattactttggttcaagagcaagacaggaggcgactgcatgagaccatggctgagacacctagtcctccaggcactgaggaactccagggcattctgtgggtctcatgggaagccagcacctctacctgttcctcagaagatcgtggccacctgggaagccatcagcctgggaaggcagctggtgcctgagtacttcaacttcgcccatgatgtgctggatgtgtggagtcggctggaagaggctggacaccgccccccaaatcctgccttctggtgggtcaatggcacaggagcagagatcaagtggagctttgaggagctggggaagcagtccaggaaggcagccaatgtgctggggggtgcatgcggcctgcagcctggggacagaatgatgctggtactcccacggctcccggagtggtggctggtcagtgtggcttgcatgcggacagggactgtgatgattccgggtgtgactcagctgacagagaaggacctcaagtaccggctgcaggcgtccagggccaagtccattatcaccagtgactccctagctccaagggtggatgccatcagtgccgaatgcccctccctccagaccaagctgctggtgtcagacagcagtcggccaggctggttgaacttcagggaactcctccgggaggcttctacagagcacaactgcatgaggacaaagagtcgagacccgctggccatctactttaccagcggaaccaccgggggcccccaagatggtcgagcactcccagagcagctacggactgggttttgtggccagcggaaggtaccagagcagcttgtctagaggatccaagaacagaaagtggggagtggtctggagggggtggtgtgaggggaaaggtgtcaggaacggaggtcagagagccaacagaattactgagaagccaataggagcagcttaggaaggatcttgatggttctggattttactctgagtgaggtgaaaagccatgggaggtttctttttaaatcgtggctatatatatatatatatatatatatatatatatacacacacacatatatatacatacatacacatataaacatatatatacatatatcataaatgtacccttttaaccattttaagtgtacagtttaatgtcattaaatacattcacattgttgtgcaaccacaa

SEQ ID NO: 510480 - DNA, 410 bp, Homo sapiens
  misc_feature (266)..(266): n is a, c, g, or t
  misc_feature (331)..(331): n is a, c, g, or t
tagcgtgtgaccctcacactacctgtcctgaatgcagcacgaactgtcatctttgtggcaactggagaagcgcattttggaggaccaggaggaaaacccgctgcccgccgccctggtccaagccccacaccgggaaactgtgctggttcttggaccgagggccgcccgcctcctgaccgtgcccttcgagaagcattccactttgtagctggccagagggacgccgcagctgggaccgaggctacgtggccaatggctggcccctntggccgccactctccgggctctcctttcaaaaagccacgtcgtgctgctgctggaagccgatacntccggccagcaagcctacccggggctcaacacacaggctgtggctctggacatccggatattaaaaggacgttgctgga

SEQ ID NO: 510481 - DNA, 750 bp, Homo sapiens
tgatttgatcataagtttgttgagttattaaccttcttctgtagtgccaaattatatgacgttatctcattaaaaccacacaaaaacttcaatatgaagcaatgatacaaataattacataacacaatagtgaaattcagctgagaaaatcttgccctcgaagttggaagatgttatctcgtgagtaccttgcaaaaagtgcatttgctttctgctgactgcaataacaggcgaataatcccagttaaataaagctactgtacacccctccgtgtgtgcaatttctggcctaacatacagaaaaaatagtaacaggaggcagatacgtaaacagagtaaatagccataggcctatataacacatccttcttgaaccaaacaactaaggtaacatgagctgcaacaaatggttaccacaaagatatcatgtgaagtctattccataggctatttatcttcccttctttcccctccccacagttttgtaaacaaaaacatcatgctgattgaataccttgtacgagcacttggcccaatctccaaacttgaatatcctttttatagaaatcctgtctcaagctcattagtccaggagagaccatccaagaggttcagttctctgagttgctcaacacatccagttatatcacgtcctgacaagatttgcgatttactaaaccttatatttgccgaccagaagtgcttgtgcccgtacattctgacttgtccacaactgtagcgccagttcca

SEQ ID NO: 510482 - DNA, 172 bp, Homo sapiens
ggcctacttggatgattgtcaccggggattagctgtcccactgccgcctcacctggccaaccacacgacctcttctccaagtcatccgggcagtcaggggctactccctcttcactcgtggtaaactggatgcgggccgcaaggggcgttcatctcacctaagcttctttaa

SEQ ID NO: 510483 - DNA, 218 bp, Homo sapiens
agctgttgccgaaggtgactctagaggacccggtcaatttctacacacacacacacacacacccatgtatgtatagttgattcattatttgtggtagttatattctataaagtcacctcaagcaatgaattaccaaataccaagccactgctcctagtggaaatacaggtttagattcctgggagcctctggttgcattccttagtgtagaaattgaa

SEQ ID NO: 510484 - DNA, 602 bp, Homo sapiens
  misc_feature (441)..(441): n is a, c, g, or t
  misc_feature (602)..(602): n is a, c, g, or t
accaccagatggcagttccggtttaggaggccacaaccaggccacccagggggaccaaaccacggccggcggggattttccaaatttccttggaaggtaggtttggttttggccaaagaaaggtctggttggaaaagtttttggagcccaggatgccagcttgtgccaatgactgtaaccttaatcttttcaaaggaaaggccttagccgaggactgtccggggaccccgggggactgcgtttaggccatgggatccggtttccattcctaatccaatccaattggccctttcctcctgccatttccttcctctgtggccctttcaaagtggtaataattggacctgaacttcaaatggtgtccggttttcccaagaccattttagccacagtatatggcattaaaataacttcttatattggcaaaaaaaaaaaaaaaanaaaaacctgtgtcgccgcttgggccaagtcgattctggactggaccaggctaatgcatgcggccgaatttggggcttcttggcccatttggccctatggggagccggattccattcttgcccgtggttttacaccgtcgtgactgggttgccggattaccn

SEQ ID NO: 510485 - DNA, 177 bp, Homo sapiens
tttaccgaactgggtgaatggtgaggtgggtccccttgcatgtgactgcacgacatgcctccccgatctgtatgtccagctggacttggccgaagtacacaggactggtcctccttccgcaggttcgagatcctgagtgaagccgcccttgatccttgctattccctcttgagtatc

SEQ ID NO: 510486 - DNA, 1627 bp, Homo sapiens
  misc_feature (13)..(13): n is a, c, g, or t
  misc_feature (226)..(226): n is a, c, g, or t
  misc_feature (279)..(279): n is a, c, g, or t
  misc_feature (406)..(406): n is a, c, g, or t
  misc_feature (465)..(465): n is a, c, g, or t
  misc_feature (1346)..(1346): n is a, c, g, or t
  misc_feature (1445)..(1445): n is a, c, g, or t
  misc_feature (1448)..(1448): n is a, c, g, or t
cctgcgtggtcantctctatgcattcaacagtgttttggactggaacagatccagtgggcactctcttccagcctcctgaccagccatcctgattatccatcatccggctatgcaacccgtcacgggagccactcattcatctggccactctccaagcatatctgtggacccttgaccagacaaccggtaattatagatggatatatgcatccatatcttatgacnaaaacacagaaccacttgagcatccacatgactatctgtacatgaaattactncacagcctgatcagatgagagtgcatgacacgtacaaaacaggaccatggatacaaagtaagataaccatgcatgtgcacttccataacaccactaaaccatactacatcttgcgtggtctatctanttttctgaacacctgcagattggactcgtagggcatcttggagaaacggcgatgaagcnaacatatcatatcacagcagaaaatatgagcctgacggggatgacatgcctgctgatgtgtgtcttacagatgcggatcatccccttgaacagcattgacaaaaaacccaagaccgttggtgcttgtatcgtccgacctacaatccttatcccatagtggaacaataccaaagaacatgccacaatggcttggacaatgccattgcatgtttggtgtgttacacatataaccaccactatggaacatggcccaacatggcacaccaaggtcatggcacaaattgaggcaccccctcgttgtcatcgtcacacacattggcctggcatcacaccaaaatggtgagcgcaccacgtattacagtggaagaaagtaccctatctgcaccaattggccacacttaggatgagataaagtaggacccacagacacaacgggaaaacccacacccaccaattaagttacctagattggacactctacacgctgtgaggaaggaccttacaacctctcttctttatcgcaattggtcagcggccatacggttggaccaatgcactattaattagcagagaaacagtcattgggggatgaacacaacgctgtggaaaccacaacatcagcttttccaatcatttgggtcggtaggtaggtgagtacattagagaaaggagtaattgagaggcattgagaggacaaaagataaatcaatagtatacgggagaagaggagtttaagtttcttttaattggtagtgatctatatggaagcgccttatatagtgggcacagcagagcagaaattagtagaagaaggagtgggacccctcttgtgaactatgttactacactttggttgtatctattgtatctataaaagacantataagcctaggcaacagagcaagaaggaagagtagacgaattgattcgaagtaatcatctttacaacaagtcattggagttgcatcattttgttgaanttntcattttttcttcttgtagcgcaagaagaacaaagaaaaaagaaagaagaaacagatagtacagaggacagatagcaacaaaaagtatgtatatttctagttgtgtttggtgccttatgttatttttaatatttttattatatataatagttgatctgtgtgtagatagagaagagaag

SEQ ID NO: 510487 - DNA, 984 bp, Homo sapiens
gatgctctagggtgagctctgcccggctgcaggatgttggcgcgggctaagctcatcgcagtgatcggagcacgaggtacacggtgactagtttcctgctgagcggcataggggagcttaacaatgaaccgccatcccaatttcctggtggtggcagaaggatacaccctatcaagtgaggatcgagagacactattccggacaatttctaaagccgggaatgaccattggcattcatcctcgatcaaccaagtactatctgcagacgatcggtgcggacgatgcccttggacgcccaaccaggagtcgcatcccgcgctgtccgtggtagagtcccgctccaaggtagcacaccagtatagacgcctgcaagggacctccaatcctgcgcagaggccgaggggcactgttcacatgaccgagagaccgctgctgcatagggagacatcactctattaagcctctgagtcctttcaccatcgatataaccaaggcatcattcgccaaaaggcttttgcgaattcagcccatatctagtaactgtttgtgacgccctcgtgatagtttcccagattacccctggtatacattgtccacacatccatttagagaggtaagagtgacgagcgcgtacatagagtagcctgggacatcctgcagaggtagaggacccagggcaatgcttggaccattcttctcccttccgaagtacccttctttccgttgtgtgcctgtttacaccaggtgctccttgctgctgttccacttcaaacgccatattccttgcgtcttagaaaaaacacgcgtagggaacgctacacacatcaaacatacacatatttgtaggcgcgcccccacaagaattacccccccgtgtgagcgccgccccaagaaaggagtgtccacgacgcccaacacacctggcgcagagcgggaccaaaaaaaggcggggcacgcgtgtaacaacacggctgggctggcccc

SEQ ID NO: 510488 - DNA, 167 bp, Homo sapiens
taacagacttcacagaaaatgcagttgtcttgacttcaggtctgtctgttctgtgggcaagtaaatgcagtactgttctgatcccgctgctataaaaatgcattgtgaaaggactggagtatgataaaaagttgtgtcccccaattgctgtggagtaggtgattgtg

SEQ ID NO: 510489 - DNA, 313 bp, Homo sapiens
ccgcggtataaactagtatcaacatacacacagataaagcactctggtatcacctgacccaatatctaccttagatgtcaccccaagacatttgactactgatagtggttaatatgataactttatacttgctccacttaacaatgtttaagtttcctacatcttattaccttgaggacacaaaagtggcagagttgttgagagctgatgacaatacaaaggagaacactagaggaaatgagatctaggaacagaacgccaaagactagatttatccaactctctgctgactccaacctacagtacccagccg

SEQ ID NO: 510490 - DNA, 241 bp, Homo sapiens
cacagctggaagagcggagaaatagaattgtcttcaaacaatataaaaattcataaagaatagaaagactactatgtgtgggtcgggaaattaactagaatttttttatatccacactctagtatgaaatgagtacttatagagtagagtgtaacatatttagacatagtatatatatatacaagtgtaacaaatatatatattaaatatatatatgttttatagaaacacagagcacaca

SEQ ID NO: 510491 - DNA, 295 bp, Homo sapiens
atatttttgtaataattagatctatgtcttatgagaacatgatagctcttattcattcattcattcagttagccaacgattatttactgagctccctctacatgccaggcactgtgctaagcagtgggtatatgatattcagcaaaactgacgtagtctttgccctccatggagcttattattaagcgagagaaaacaacaataaacaagttaatgtaaaaataaataccaattatggcaattgtttgtgttgtgtgagagaaaataacagtgaagggaaactgggtgttcagag

SEQ ID NO: 510492 - DNA, 1399 bp, Homo sapiens
  misc_feature (156)..(156): n is a, c, g, or t
cgtggtgtgcgaacccggttttgtactcgggatatcctatgtgcacacggaccttgccagtcaatggtgaccttctgcagtctcactgtccacgattccaggacgtgtagcgtacgttgacatgtgactcagctatgcatgcttagcgcgaattgnctgctggtgtagcatgtctgctaacttgtgctatatcatagtctttactgatatagactattctatgttacaatgactcactcatgagcattcaacacgcttctcgatcacaacgcattacgacgatcccacgcaaagatacaaacaccacagcagcatcagaaacattggcatgtgatgacgatggagaatggatatgcggggagtgattaagacgcggtgtggtaagcgtagccgtgctagttacgggatgtgctcccatcacatagagtgtaactcgcgatgctcttgatgacatgagagagcaatcaacgacacaacagacaatgagacagcaagacagagacttgggcagccatctgtgatggagtccacatcatgacatccgttcacaaagttaacaatagggcacaacttaaaggatgtgcactgcattatatccacttgctttgactcaatgtcaaagcttatgcctctgaggctaaggttttacccttgacaatcgtgtacatactcagcaatctgagctctatgcaaatcatacctgttccgtgcaatgtccatccctatcgaatgtgtgattaacttataaatgaatgcatagttagttggtcaacaacctggttaaagttgtgaccaatcattgattcattgggcatttaaggtctttctggtgtggaagacaccatttagggtggataggacaattaatgttataaaaacaaaaaaaaagacaaaacacaaaaagggaaaatagaaccaatgagatgtattagagcaaggaggagatagaaaaaggagggcccacatgacaccgagcaccccccaatggcggaccaaaaaacacagtgcacacccactcaagataggaaacaccagagccgaacactagcagggtgacacccctatagaaacagcaaaacaactacaaccatacaacgagccaaaaataacaaaaacaacaagaacgacaaaaaccaaaacaaaaaaaaagaaggaaaacaaaaaagaagacaaaagaagagaaagagagaagggcgggacacgcaaaagaaaagaaaaaaaaaaagaaaaaagacagacagcaaaaaaagaacgacaagagagagaagacagaagaaagaaaaaaaaggaagaacgaaagagaagaaagaggaaaaagaaaggagaaagaaaaaaaaagaaaaagacgaaaaccgaggaggagcgaccgacgaaaaaaagaagaagagaagaaataaaa

SEQ ID NO: 510493 - DNA, 209 bp, Homo sapiens
cacttccttcccagtggtcctccatttcgccttcggacaaagccccatcttccagtggctgatcccctgacagtgcggacaccacagtcacatcaacacactgtgcttatgacaggattgtggttggctgagctctgctccaggctgctgttgttcccaactcggctgttccttttgatttccaagcagaatacggactttccaaccat

SEQ ID NO: 510494 - DNA, 280 bp, Homo sapiens
caggtcacgtggatgggtgccccattctcagaggctatggacgagtaccatcgtgcagccagggttggggaccccgcaccatacatgctctgagaaataagtgtctattaagtagtgtttatatcgtgtgtgacatcagtctctgacactgtgaacagtgttcagttacgggcaagagtggtaagtcctgcgtgcagttccgtcggcccgtctggtattcgtatcccgtttaagaaactcagatatttaacacattttattcctaatgtgtttcatcagg

SEQ ID NO: 510495 - DNA, 739 bp, Homo sapiens
ggaatcacatatactccagtatcaagtacaacattgaaagttggatatgtacagacttcctagcaggacatggggctctcagaaggcattcaccaagtcaaagattcgtaaacccaagactgtgtccacagacgttcaacagtatgaatatgcatggaaccatgaaggtctacgtgtgggtattaatggacgtcagatgtaaggggaagaggccaatgcacgcctggtgcatgttgcaagagcctcgcagggagaccgtgcgacagtacttccctgagacatggatctgggatattggtcggtgtgataaactcagtccatggttgtggctgagcgtacggagtacacagtcacctggacaccatcatccgagtgaggaagtgcggaggggccttcttgactgtctgaagatgctgggactgtggctgtctgcttgccactgcctgctctccgagcctgtccaggccctgtctcttgtagtgagctcacagatgccgttgactctgtgagtcgtaggagaggccttgctagcactcgaatgtgcatcggtccgtaaaggtacctttcccaatattgcatccgggagtgcagtgtgcaggcttggaagcctctccgcgacttcctgagctggggccgacgtggagaagggaaacagagggctctcacggcagtctgtgccataccgggctggcaaaactggtgtcctgggcagtgaaccccgaaagtcatgaggaaatgg

SEQ ID NO: 510496 - DNA, 1393 bp, Homo sapiens
gctcggatcgaggtctgcagcgcagcttcgggagcatgagtagctgcagtgactgccgggcaagctggcacgggcaccggccgaccctgggaaacgccggggtccccggcagttgcagctcccggagactccggtcggcggcatccaccgtgcgaacagagatccctggcaggtcacgtagtaggacctcactgcatgcctgtgcggcgccttatgtgctggggccggctatattggaggcaaggaggtcggcctattagccaaatgctggcctgtccgaagtaattcttcgggatcagacgtggaccatcgcacagcgcatgcgatggtactcggcgtgcgaccaaatgcaatatggcttgtcgccttaaacggctaccttccttgccactggcctttcgacagtgtctcggcccaatcacaaggctacggcgccggaaagccaacacgtcactaggatacgccaagattgtggctatcaaaacgttaaacttttcccgatgttgttcccatgccacctgtcacctatggtccgcccgattccgagagccccgagcaaatacgactagaaggagcgcagcaccggggtgatacagcgcgcatcaaagcgtcggcaaagttattgccccctaagacactaggtgggacccacgattacactagagtaactgatctcccacggcacaaccgcacggacacactccgacatgagatgcagagaaaaacgccctctttagttacgagagcagaatgagacctatctatccaagcgcattatagacggagtgtggggccatatacaggagccggccaaacggcccccgttatccacctttaggcccgcccccccacggagaccccccactgggtagcgacaacatcggccgtaggagtatcctccgtatccccgctgtatcccaccggtattttgggcaggtgacaaatgtgccctcctgtctttatcgggccgtcatacccctacatcgagagcaggggcaaacaatcagggcagcgggacacccgtgctggggacaacaatcctacatgcgggcagcctccacccacatcgttaatgagagaagaaaccacgtctgttaggcggtcgtacgagacatccccccgacactgcttttgcccaacactggctcgggcgcctcccccctcgccgagttgacaaactctctattcgcagacccaccgcttgtacaaacacacccgcccctcgacttattttaaataatcaccaagtgctcagcgtgagccagtctcgtcaccgacgcacgcaacacgtgaatactagtgctggggccccattatgggccagccccaccaatatcgtacctgagcacagtcacccaccaactatttaggtcgacggccatccgcgcacaga

SEQ ID NO: 510497 - DNA, 271 bp, Homo sapiens
  misc_feature (15)..(15): n is a, c, g, or t
gatctacaactgccngtccgtgaccagaccctgttccagcgggccgacaacatcgaaaacggctggcgagcggcgcagccgttctcgatgcctgggcccagggcggcgatgtgcatggctacccggccggcgaagatgggcccgaagcgggcaatgaattgctggcgcgggacaagcgcgagtggcaccggttggggtaagacttttgtaaattctgtgccggccctttcgcggccaaagccgctcccacagggataccacttcctttagg

SEQ ID NO: 510498 - DNA, 143 bp, Homo sapiens
cagaacaggctttggtcgatggccttgcctcaagtgaggagacaggccctcgctttccagtgcatgccgctcactgatttcatcctcacgtttccgcaccgtgcaccagaagtatgtccgacaagcctggcagacggcagacc

SEQ ID NO: 510499 - DNA, 178 bp, Homo sapiens
cttgtacatttactactcaccattaggatctgtgtggagagggaatgtgaaatttacatcatttcttttggggagacgacttgtcttggatgccccctaatccccttctcccctgcactgtcacatgtgggattatgggtcacagagaaaaagtgggacggtctatgctggtgggaag

SEQ ID NO: 510500 - DNA, 294 bp, Homo sapiens
aacgggtgatgcggttgggcgcctgtagtcccagctactcgggaggctgaggcaggagaatggtgcaaacccgggcgggagagcttgcagtgagccgagattgcgccactgaactccagcctgggagacagcgagactctgtctcaaaaaaaaaaaaaaaaaaggaatttccgtggagccaactgatttttaaagggccataccaaattattcaaaaggctaaagttaaaccctaagattttctaaaacctaggcctgtttgcgctatttgaaacgtgggaagttggaaggggt

SEQ ID NO: 510501 - DNA, 719 bp, Homo sapiens
  misc_feature (247)..(247): n is a, c, g, or t
  misc_feature (284)..(284): n is a, c, g, or t
  misc_feature (558)..(558): n is a, c, g, or t
  misc_feature (567)..(567): n is a, c, g, or t
tgtactccagcctgggcgactagactccgtctcaaaaacaaacaaacaaacgaaagaaacaaaagaaatcaatacccccaaatatggctatgctaaccaaagaagcctcaaggtatctctgacacctcactccatccacacaaaccttctcttccaaagcatacagtaaagcttaaattcctttatgcgcctaaaatccagacccacctaaaggaacaactgttcttctgtatgttgtaacaccacnaatgtaaccacacctaaatggaccctttcacaagatnatgtgcaggttaatctctgttccctgatccattcattctccctagtaatcccctcagcggaattcctcttctccaggtttccataacctgttttgccagaatggtatataacctctgaaccacctggggggatgggcaatcactctgtgataaatttgtatgccttggccagcccagtgactcacgcctataatctcaatactttaggaggccgaggcaggaggatagcttgagctcaggagttcaagatcaggctgggtaacatttatctacnaaaatacanaaaactggctgggtgtgtgatgctcacctatagtcccagctactcaggaggctgatgtgggaagatcactcgaacccaggaggtatggctgcagtgagctgtgatcatgtcattgcactccagcctgggtgacaaagcaaaaccctgtatca

SEQ ID NO: 510502 - DNA, 122 bp, Homo sapiens
gcgggcgccctgcgagcaggaaacccaagactattctagtcatcaccagagatggtgcatgctgcaggggtccagccctttgtctgtcctgcgtgacctgggcacgtgacggagacgctgct

SEQ ID NO: 510503 - DNA, 526 bp, Homo sapiens
  misc_feature (316)..(316): n is a, c, g, or t
  misc_feature (333)..(333): n is a, c, g, or t
gtcagtgccgcgaaagaatacggggcagctggcatctttccagcccgggatacctaccatcctatgagagagtacccaccctaccacacccatgggcgttatgtgccccctagcagtaccgattgtagcccctatgagaaggtttttgcaggtaatggtggcagcagccttttttacacaaacccagcagtggcagccacttttgccaacttgtaggggcacgtcgcccgttaagttgagtggccagccagtgccattccactccactcaggtttttcagggccaaagcccctgccccctgtttgggttggtgagntgggagttcaggtgggntgctcacagcctccttcaaaggcccccccaatttttgggacacttttcagggtgtggaagttcatgtgggcccctaagggttcatgcctgggaagtgttgtggtgggggctcccaggaggactggcccaaaaagccctgaaaaagcggggatcctgaattggactgaataaaacgtggtttccccctgcgcca

SEQ ID NO: 510504 - DNA, 306 bp, Homo sapiens
ataccactctactaatttggaggctctcaggtgctgtgccgctctctgctgtctgcagcttcagtgtcgtagtgtctctggtacttggggcagctgtgcccgcttgcttctgcctttccccttcccagggttttgttctcagtgctgcccgagttcagtgtcccaaacctgcctctgatcatgtgccacccctgccttgcctccaggacatagcccatgctcagttgcattaccaaagaggttctttgcagcctgaccccatagttctcccacgtcacctcctgcttttccctccccaggatacag

SEQ ID NO: 510505 - DNA, 648 bp, Homo sapiens
ggtgtgcaccgccatgccaggctaatttttgtgtttttagtagagacagggtttcgccaagtagtccaggctggtctcgaactcctgggctccagtatccgcccgcctcggtctcccaaagtgcgaggatgacatgtgtgactaccaaccacatgtctatgcttctcgatcgctgtgaacatgacaaagacatctattgggagttcgaggcacaggtggattgcttgaggccgggagctttctagacccagcctgtccaacaaggcagaaaactcgtcttctacttcaacatatgaaaattcggctacgcttggcatggcgtcaatgacctcataaatcatatgtcgtaactctagacatggattgacatgtcacataagagctttagcattacatactccttacccacgacacttatcaatcgctccatagcgacacacattcacacaatatatttcaatctccaaactccaacctcaccaatacatgcacaacataattctcacaacccaactcatctcacaccacccatactacttacacattaccctccctatatatgtatttactctaacatatatcaaccacgctaatcatactaacaacactacccataaatcctctcaaacaatcaacccaaacacaaac

SEQ ID NO: 510506 - DNA, 504 bp, Homo sapiens
  misc_feature (20)..(20): n is a, c, g, or t
  misc_feature (112)..(112): n is a, c, g, or t
  misc_feature (170)..(170): n is a, c, g, or t
  misc_feature (184)..(184): n is a, c, g, or t
  misc_feature (196)..(196): n is a, c, g, or t
  misc_feature (209)..(210): n is a, c, g, or t
  misc_feature (222)..(222): n is a, c, g, or t
  misc_feature (237)..(237): n is a, c, g, or t
  misc_feature (245)..(245): n is a, c, g, or t
  misc_feature (336)..(336): n is a, c, g, or t
  misc_feature (371)..(371): n is a, c, g, or t
  misc_feature (409)..(410): n is a, c, g, or t
  misc_feature (418)..(418): n is a, c, g, or t
  misc_feature (440)..(440): n is a, c, g, or t
  misc_feature (493)..(493): n is a, c, g, or t
gtttttttaaaaggattttnatactatattaaaaaaccacaaaataaaaaagggatcaatcaacatatatcttagaagtccttccaagaatcttggaatgcaacaaccatgnaggctgtgacctttttccttcttttctcagcctgcagttcatttaaagatcaccgganatgactcgtgctcnaattcttaaaancaaacttatacanncaaatccaagancctgaatttatcccnattgtcgncccttgcttttcccccccgtccccccccctccctccctttccagtccccccccgctttccttgctgtttcccctctctccctttcttcccntctccgtcctgcttcctcctccggggcccccggcntttcccttttccccctttttccccctttgccttttttnnccctttcntccttggcttccccttccccgncttcctccccctctcccgccccccccctgttcctttgtcagccccctttggtnggccccttccg

SEQ ID NO: 510507 - DNA, 389 bp, Homo sapiens
aaaacagttctgactttcaacattatctttaggaatctgacttgggaagtgcaagatcagatgatcttggagatcttaactatgtcagtgtctagaaattccatgattctttatctttactgtgtacagtaagtggaggagtgtttgggaaagtgacctccttggagcattccttctagactgaagatgacgtgggaattggtttcttcagcttgcaccagagcttgccaaatcactctctgtaaagttagtttgttaagacctttacggccgggtgcagtggctcaggcctgtagtcccagcactttgggaggccaaggcaggtgcatcgcttgagctcaggagtttgagaccagccttagcaacatggcaaaaccttgtgtctgttt

SEQ ID NO: 510508 - DNA, 559 bp, Homo sapiens
  misc_feature (433)..(433): n is a, c, g, or t
ggaggtttcattgtaatattccatttagtagtagaaatgttgaaagggagtaggataggcgtatatgataatgagagctagttagatgttgtaaatgacggtcagtgaattgtatatggccaaaatagggagaattgggaactggaaccactgaaggtgtttggataagatatttattttggaagttaattttaatgataaagtacaatgaaggaagggcagagaggttaagcctagttgtctggggtgatgtggtggtggtagactggatacacaaactgttgctgatgtgaatgcttcttggtgaccgcattgctggggaggtcattggcattctctgtaggtgtcagtgccgtgtcagttgcacttgtccttggcttcattggctgtttcaacaagtgttttgaaaggggcatggcagtgcagcttagtnaaaccctgtctctactaaaaatacaaaaattaggcaggcgtggtggtgcacgcctataatcccagctatttgggaggctgaggcaggagaatcactagcagagattgtgtctcctcgccccctctc

SEQ ID NO: 510509 - DNA, 820 bp, Homo sapiens
  misc_feature (492)..(492): n is a, c, g, or t
agcggaacggtcgctgtaccctaaccgtgcaaaggtaggcataatcacttgcttccttaattagggacctgtatgaatggctccacgagggttcatgctgatctcttacgtttctaaccacgtgaaattgaccgtgcccgtgtgagcaggcgggcagtatacacagactagagactgaggaagacccgtatggatgctctaagtttattgaatgcgaagacagtacctagacatacccacagtgttcctaaagctacacaaagcctgcagttaaagaactttccggtatggggcagactctctggatgcgagaagcccagaccttccgatgcatgttacatgcttaatgatctgtcagccatgatcaatagtcgacactgactaaatactcacattcgagtccatataaactttggacgcagacaggaaagcaagtatacccgctagggaatagacagctgcaatgtcctagttactaaagagtccgatatncaagcgaatagggcgatttacggaccctctgattgttgggatccagtgacagtcccgagatgtgtggcagcccgcgtaattaagagggttgcagtaaggtacaaccgagttacaagtcgctacagtgagtctgaagtctcagacacggaagtaactccagagtcgccattctaatctaacttgcaagattccttccctggtacgacaagcgacacagagacaataagtgcctaacttcacaaaagcgcctttcccccgttaatgagtatcattctcaacttagtattaataccccacaccacccaagaacaggggtatgtaaagaaaa

SEQ ID NO: 510510 - DNA, 144 bp, Homo sapiens
cgcggcctccagattgtccccgtccggagtacatattgatgcgacttagtgatacccgatcggataggactaagccagaatctgggtcaaagatctccactcagctccgagtagtgggatacaggcacggggtacgagctcgaa

SEQ ID NO: 510511 - DNA, 1185 bp, Homo sapiens
ataacacggagaccgtcccccgtgtgctccgattcccctggagtgtgaagctgaccacggctcgcagccctcctgaggccctgatggcagctcggtgcgccaggccatagctgccgccctgctgcctggtgctctgccatgtcctcaccagccggttctctgtcgtggcctgtcctgtcgcgggtggttgctggtgcgggccccgagcccactgtcccgagagttcgcagatggagagtctgccagactgccccggcgcaggcttgcgcgggatgtcctcattccgaccgtatgtggctgggtatcgttgcctggatcttacctgggaccctccggtaactccgacatctcgccagggtacagcatcgaagctcatgagacgcaaacacgggtacctcaggggctgccttaacgtgctatccatctccccgttgttcgccctgtcaactttctaccagggaagggggcgaacagggggcgtggccatggctaggggggcactctcatcacacatttgttacttgccatcatacttccagataattgcacctctggtaggactgtactaagttgtgagagagcgtccaacaggcatttgcctacgcccgctttcgtgtccgtgcatcacttacgtgctgtagggaccctggcggttcaaggaactacaaggcaatagtgtaccagcggcaattgaacggagggagtgcggtacaatgccagttgagagcggtaagttccttgggagcaacccattttcaccttgagaaagtcccgtttcgcgaagggccctagggcatcccgttggttcacttactcccttacggacgcgcccataacccccgaaacgtcaactgcggcgccaccctccctttggccacgaggtaatgaaaaccatattgtgggggggaggaaccaaaaggtgtggaccacacagcggcgcggtaccaaggacgggcagcgcggggacacaacaacctttgcaacgtcggaaaacacgatacgttgttcccccaagttgtcgcccttccgcccgaagatcgatgtgcacttccgagagacaaaattatacagcgagcccccgtttgggggaaaccagcgtgtggctgaccaatgcggttgatggtaccgtgccttgcgcctgggtaacgcccctttacatgaggcaaacttgggtgaagtcacaat

SEQ ID NO: 510512 - DNA, 315 bp, Homo sapiens
taaaacgactgcctgccagattctggtacatgtgcatcgttgttctcatgagggtacaaagagcttcttgaattctgccttaattttattatttacccagaagtcactcaggagcacgttgttcaatatccatgtagttgtgtggttttgagtgagtttcttaatcttgagttctaatttgattgcactgtggtctgagagattgttatgatttcagttattttgcatttgctgaggagtgttttaattctaattttgtgatcaattttagagtgtcatatgccactaagaataatatatagtctgttgtttcgt

SEQ ID NO: 510513 - DNA, 1078 bp, Homo sapiens
tgactgagcaagagtctcaagcttcagtcgtgtacagtgacaagatgataaaaagatagacctgcagaacaaaacaaactcaaagaaatgtgttcagatgtacatgtacatgcggatgtgaccaaactggtgggaaccacgtgggacgtctctatacaaggctcttcctgtggacacgacaaccttcaatggcacggcacgaacgaaaatctcgtcgcaacgactcataacatcctaactattgcgagtaaaacacgtgtataagtgtactactggaccaaggagaacatactgtgttcggtggcattgatactctcagaaatcggacatttcaaaagcttgacagctgaaactcagttgtgtgagtgtggtaatgccgtggtactatgatgtcagcaaatcccaagatcctttttgactacttgtgccaggcatcttaaagcaacacttaattggacagcagcaataccttgcttaactcgtagctgcaaaggtcagaccttgcattgaacgttaaaaccaaggaatcaccagtatttcacctactggatttctggcaggaaaacacaaaatggcctccaccatcaagccttacacttgcacatacttgcttgaatgcaccccagtaaggggatcatcttggttacacattggaccaacaattggcccatgtattccggcacgttgacaacaaaggctgacctcaaagaagctccaacggtatggggttcgacgcaagtgttggggtgcacgtggatttatggcagagatgtgtgggcatatggcaaatgtaccaaaggcattttatttgaacacagcggcatgatattaaagaggaacttaagggtccgtaacgaaaataacacaataccttgttattgtaacttccgtacgtggcacaagcgacctgcgaggaaatattgggcgaattttaaaacctatggaggggtactaactaacaatgttgacccacccacaacccgagttaagaggagaaaaaccgcgacctggaccaaattagaacaaacgcggatatccccacaagaaggttgcccctggccacagcgcaatgtcgcat

SEQ ID NO: 510514 - DNA, 407 bp, Homo sapiens
gactctagaggctccccctgcgtcctcatatttgggcttaaaattacaagaagggcacttcaaatggctttgcattgtgattgtatcagtgctagagcgtaggaatcgaccctggcgtccactgtgagatgttcttcagctaccagagcatcatgtctctgcagcaggtcattcttgggtaaagaaatgacttccacaaactctccatcccctggctttggcttcggccttcaggttaaacggcatcatctccgtagaaggtgactgacacgatgtggtatagtacagttagacaagcctgggtccatacagaccgctggagaaccttcggcaatgtccccatttgtagccagtttcttcttcaagctcccggagagcagctgtaactggggtaacaccatcatcta

SEQ ID NO: 510515 - DNA, 161 bp, Homo sapiens
ggtaatatactggtccccatgatgagaaataataagccacagactgagcagcgcgtatagttaagccgtaatgaagtcataagagtaagaccctaaaggatcaggtttccaaagcaaagttaactacggttccaggaacaaagctgcatggttttatagta

SEQ ID NO: 510516 - DNA, 323 bp, Homo sapiens
attcggcacgaggcttctttctgccttaagcaatgtccttttaggctgggcaatggtgctcacgcctgtaaccccagcactttgggaggcggagacgggcagataacctgaggtcaggatttcgagaccaacctgacctacatggagaaactccgcctctagtaaaaatacaaaattagccgggcatggtggtgcacgcctctaatcccagctactcgggaggctgaggcaggagaatcacttgaacccgggaagtggaggttgcagtgagccaagagtacaccactgcactccagcctgggcaacagagcgagctccgtctt

SEQ ID NO: 510517 - DNA, 772 bp, Homo sapiens
  misc_feature (374)..(374): n is a, c, g, or t
  misc_feature (378)..(378): n is a, c, g, or t
  misc_feature (391)..(391): n is a, c, g, or t
ttagcccgcctcggaaaaaaacatggttgagacaccccaaggctacagtgtgctcccaatacaaagaacccatatatgtttaagctttccctgagactttatttaaacttattctcacggtcattcttgtcacaaggtaagtccatgagcccaatgggtttatatgacccaccaagtggagctaaaactgcacagtggcattctttgccctctcgtggcttatagccttaacccacctacaacttccaatagcttataacagtttcacaagcattccttgggaaaacgtgttcaaagtcaaccagtcactagaatatttctacccatgcaacggaagaaaaaccccattactccagaagagtatatctaagtanctanaatggaggcaganaatgtttaaggatttttcttcaaagaataagccacagcaatggttttgtagaaaactcctgtgcttttgagcaaggacttttgccctctagaaagcaactgaggccaggtgcggtggctcacgcctgtaatcccagcactttgggaggccgaggtgagcggatcacttgaggtcaggagttttgagaccagcttggccaacatggtaaaatcccgtctctactaaaattataaaaattagccgggcatgatggtgggcacctgtaatcccagctacttgggaggctgaggcaggagaatcacttgaacccaggaggcagaggttgcagtgagccaagattgcaccctgcactccagcctgggtgactagcaaaactccatc

SEQ ID NO: 510518 - DNA, 193 bp, Homo sapiens
tgcacttatacctttgtcacagtaacagtccagtccccaagcaccatcttgcaggtataataactcagattcaggctagcgggaactgtgggatgctcagtcagtacgggcatggctattaggaaattcctatacatacccaatccagctacaggtcaagaatttcgacgtcctccactccagtgcctggcct

SEQ ID NO: 510519 - DNA, 179 bp, Homo sapiens
  misc_feature (28)..(28): n is a, c, g, or t
cacaagaagcaaagagaaggacacaggnaccatagcacatcgagggacaccatgtgcagaacagagagaaacagcatctgcaagccatggacagaggcctcagaagaaaccagcccactgacaccttggtctccagcatccagcctccagaactgagagaaaatacatttctattgtct

SEQ ID NO: 510520 - DNA, 1149 bp, Homo sapiens
ctgtacattgatggctagaaaaagtgaaaagactgggactgtgtgtatgaactcagacgagatcatcccgtgctgtgggatcaggctaggcctcggatctcttactgccgcagagcttcgatatgtgatcgagcaaccctctggacgcatgagagttaccaaatgaagactggtgcttgatatgattcgggcatagctctatatcgcatggtgcactgcgtctcatgtcatgcgtataaatagcttggtacaaatatcgatgcaaagccatagtgaatagctttgtactagaattgtgttccttgttcttgttcaaaagattagtggtatatctgacgtgcccatatatgttctgtgatctgtatcgtcgtaatagggtttcttcctcatcactgtcgatcctgcatatggcaatgtggtaggtaccctctcaggacttctcataccctcctatgtttcttgtccgcttatcttgaactcgtacattgtcactatagagaattccttcatgttctcacgacacacacttggactacaacccttgacacctagtcgcttagcagtagatcgcctctaacttcttggaattaattattctataggcccctcttcggcatctatctaaatacctttactagtggtgatgctctggggtgccgttttgcaagtgtgaaactatgcttggagtttattgcactttctgttcaaaagctaaattagttcctttcaggaggagtccgtgtaccgccatttgaagaaagtccgagcccgcggaagatgtgactcctgacgttgccatctatggtgcaggtcagcagttctgtacctagtatgtgtgctgctatcgcacctgtggtgtcttcctccggttactcgtctctctagtggtctgggccaggggtcccttagcctgagcttgtactctcctgtccggtgccttctaagtttgcttccgcagttaaagggtggcttgggaccgtggggccccagcctccggtcgctttggtctcgcacaggatttcgcccaacattatcgggggcgcggctaacccctggccacatcccgcagggttaggcccccggtggttcccgcctcgctgtggggggcgcacctcctcgccccctttcgcgttccccacgccggactct

SEQ ID NO: 510521 - DNA, 358 bp, Homo sapiens
  misc_feature (98)..(98): n is a, c, g, or t
  misc_feature (105)..(105): n is a, c, g, or t
  misc_feature (118)..(118): n is a, c, g, or t
  misc_feature (135)..(135): n is a, c, g, or t
atcatacctacctctccttcatcatacctaccgtgcatggattctgcttggattctgggtgggtatgatgaaggacgggtaggtatgatgaaggacgngtaggtntgatgaaggacgngtaggtatgatgaaggncgggtaggtatgatgaaggacgggtaggtatgatgaaggacgagtaggtatgatgaaggacgggtaggtatgatgaaggacgggtaggtatgatgaaggacgagtaggtatgatgaaggacgggtaggtatgatgaaggacgggtaggtatgatgaagggacgagtaggtatgatgcagggacgggtaggtatgattgaaggacgggtaggtatgatgaagga

SEQ ID NO: 510522 - DNA, 629 bp, Homo sapiens
  misc_feature (23)..(23): n is a, c, g, or t
  misc_feature (34)..(34): n is a, c, g, or t
  misc_feature (50)..(50): n is a, c, g, or t
  misc_feature (54)..(54): n is a, c, g, or t
  misc_feature (60)..(60): n is a, c, g, or t
  misc_feature (73)..(73): n is a, c, g, or t
  misc_feature (102)..(102): n is a, c, g, or t
  misc_feature (108)..(109): n is a, c, g, or t
  misc_feature (118)..(118): n is a, c, g, or t
  misc_feature (619)..(620): n is a, c, g, or t
caaagggtcccccccccccaagnggccccccccnccctggggcaaaattncagnggcccnccgggggaccaanttcccccaaggaattccagggtcggagcntgtcannctgtccaanaaaagggttccccaggtaattatgaggaattagaaaactcaggagatacaactgtggaatctgaaagaccaaataaagtgactattccaagcacatttgctgcagtgaccatcaaagaaacattaaatgcaaatataaattctaccaactttgctccggatgaaaatcagttagagtttatactgatggtgttaatcccattgattttattggtcctcttacttttatccgtggtattccttgcaacatactataaaagaaaaagaactaaacaagaaccttctagccaaggatctcagagtgctttacagacatgtaaaatacaactatcatggaaggtcataccagcgttttgcttggaaagctcccacagaaatgctttataggagagcatggacacctgcacactatgtcccctgggaagttagaagcagacatactgtttcttactgcacttgggtagagcctggtctgttatactatactaggaaataaacaaannaaggccgtc

SEQ ID NO: 510523 - DNA, 452 bp, Homo sapiens
  misc_feature (152)..(152): n is a, c, g, or t
catacagtgattatgcctgtcatcgctggtggtatcctggcggccttgctcctgctgatagttgtcgtgctctgtctttacttcaaaatacgcaacgcgctaaaagctgcaaaggaacctgaagctgtggctgtaaaaaatcacaacctcanacaaggtgtggtggggccagagcagccaggccacacccattgcctcggagtcttgtcctgccctacagtactgttaaggatatagaatgtgtgccagttttgattccctgcctccttgctgttgtaacataaatgagggcctctcagttaggaaaggtgggcacaaagatcttcatgatcaatacttcttagtagatcggtttgttattcaaatcaagatagagtgtttgcatgtgaaattatataatggccagtgttgttttaaagtcttttgaataaatgttctctattcttaataaa

SEQ ID NO: 510524 - DNA, 901 bp, Homo sapiens
gaactcatgaccataggaagatcagctgttttcccactttacccaattctttcctaccgtgcaatctgatggaaatcattctgcagacacgttggaacctcaggcgaagccatcttattccactgtctatcctgagacatgcagattctagcttttggagcactggggtgctgcagggacagaataaccaagcagtgatgaattgtgtcctttccagtgtcagaggcatgttgaagttttgcatctgtgttattagtgctttttccatttcaagagccttgacatcattaatcttttcatcactatcactccttggtgaggccatttttgtgcaagtaaccacgcagatcagagaactatggtatttaactgtatcaggttcgtggatagaaaatacgatttcagtaactaacaatgagtttgcttttattctgtcctagccgactttgaatgtttacctaccttgaaggaagagaaggaatcaaatcacaacccaagtgacagtgaatcctaaacctgaatggcgctcatgttttccaagagaagcagcccctgagggagtctgctgaggctgccaacagaggatgaagaggatacaaatttaattaatttcaaatcaacatagacacaagaaccttttgctgtttcttccaacgcccactcttcctaatgatggcatcacttgcacttggaagaatgtgcaattgagaagtactaggaaaaggcctggctgccatccatcgctgcctctgaaggtggagaaggaggccggtgaagttcttacttttgatcaacatgggttggccttctttagccaattttaacttaatgcccttacttctggcaagaaaaagttcggaacctttttggttatttctttggggcctaattaggaactggt

SEQ ID NO: 510525 - DNA, 1212 bp, Homo sapiens
gtcgcgatgtattctcactctcactaggctgatcgccatcgtcccctcttgattctagggacgacatggtaatcgcacttacatacggaagagtacagctgatggatcgaggcagagagaccatattaaagcgtgacgacatacggcatgacggaaggatatgatgactgactgaatcagaataagactgctaggagttgaccatagtagtgtgcattcagtggttacgcgagtgactaatcccgcggatcagagacgaagcgtgaaatggatgtgatctctcgagagactcaggggacgccaggtatgagtagcatctgagcgagtatatcagcctgttaaagcacaatgatctagggtgcgattcgttggagtgacaccagcacaaaactgacatcggagtggaaccggattatcgtgcagaggtacgcgcaatctaattgagtacggacactctgcgtaaccatggtgatggcctgtgtcccttcgtatggccctgtgcatatcgagtgccgtcttgtctgcaggatccagagttgcagactgatgtagagtacgtgagtagaccgagtgcgacgcggcaggggccacctacctacttgtgccgactcatgtcgtaatttccaaagtgagcgctgtcccaccttgggggagggtcccccctcattttgaagatcctatactgcgcgagcgacaggcaaaccagaataattagacacccaggagacacccacaaaagggtccttcaaaattctctcgatggtggtttcccttgccccgtggttggtttgtttccgactaacaactgtgagtagccaatggcctctgtagcggaattagcatggtttgggaagttaaacgctatccaccttgtagttcgtgcggacactcttgtgaattgcgctggttgtggtccctttgttgatcttggcaacgtgccttagcaggggactgtcctcggcgcttccccgaaaaacccgtattttcggaccgtgttcggaaagtcggcttgcaccaagtgcctgaaagcgcccccattggccttgttggcattcaagtggggggccccaggacttggttgccccttaaggtgggctggcacgcgcttcccttatgccacgccgtgcctttggcttttgggagcgcccttgtgggcaggctggcattggcttggaagtaacgtggagggggggtatattcacttcctggatg

SEQ ID NO: 510526 - DNA, 117 bp, Homo sapiens
ttgcctttcatatcatttacattttatccaggtgcccttgtattccataggctctgaacagcctctaagaggggaaggatgtcagaaagaaagtttcacaaaaacaagggcggcctc

SEQ ID NO: 510527 - DNA, 662 bp, Homo sapiens
ataaggcactgaatcaagttcatcttcctcaggatcagcattctagtctctttccaaatgaaattaggcatctttcacatttctttctaacaagtcttttgctctctatttctagccctatttttgaggaagatacaccctctgttatggaaattgaaatggaagagcttgataaatggatgaacagcatgaatagaaatgccgactttgaatgtttacctaccttgaaggaagagaaggaatcaaatcacaacccaagtgacagtgaatcctaaacctgaatggcgctcatgttttccaagagaagcagcccctgagggagtctgctgaggctgccaacagaggatgaagaggatacaaatttaattaatttcaaatcaacatagacacaagaaccttttgctgtttcttccaacgcccactcttcctaatgatggcatcacttgcacttggaagaatgtgcaattgagaagtactaggaaaaggcctggctgccatccatcgctgcctctgaaggtggagaaggaggccggtgaagttcttacttttgatcaacatgggttggccttctttagccaattttaacttaatgcccttacttctggcaagaaaaagttcggaacctttttggttatttctttggggcctaattaggaactggt

SEQ ID NO: 510528 - DNA, 683 bp, Homo sapiens
  misc_feature (488)..(488): n is a, c, g, or t
agcggatcatgaggactcgacattgaggcccttctgcctaacacagtcaaacactgtcattactacccatacaagctattaggcggcactggtgttaagcactacttaggaggctgcggcctgagaacgatgctaactcgcaaggtggaactagcaatgcgctcacagcccactactgcactttagtctgggcctcagtgctagactccgactcatagctatatggggacgtctcacaagcatcgctgggttaagtttacaacgaaggtactggactcatgccagaactctctgtgctagcaaccacagactgcagaacaggatctactcatcatctagcagtactcaaccatctatgcacaaccgtatacctgctcaacatattgaccacagtcacatgtggctctatcagtcacgacatagacaattagagtccctcatgtatgcgataccaccacctcgtgatcatacgcctatactcgatactnctactattcctcaatcacgatgcattaccggcagtactcttcagcaagatagaccatatatatggtggaccataaaataagctgcgaaagaattgtcgtagacgtgtgtgcttggatcataatcgacttagaagtcattgccttctggtgagcgctctgatcacaactcagtacgggactatcgcggagtacccc

SEQ ID NO: 510529 - DNA, 1040 bp, Homo sapiens
  misc_feature (69)..(69): n is a, c, g, or t
  misc_feature (128)..(128): n is a, c, g, or t
  misc_feature (145)..(145): n is a, c, g, or t
tcagcaccgacccaaacaagcaggaaacaggaaatgttcacgtttcagagaggctgcagcccggcgcanatcctgagcgcgcctctgccgaggcgagcggacatgcaggctccccgcgcagcctagtnttcgccctggtgatcgngctcgttcccgtcggccggggtaattatgaggaattagaaaactcaggagatacaactgtggaatctgaaagaccaaataaagtgactattccaagcacatttgctgcagtgaccatcaaagaaacattaaatgcaaatataaattctaccaactttgctccggatgaaaatcagttagagtttatactgatggtgttaatcccattgattttattggtcctcttacttttatccgtggtattccttgcaacatactataaaagaaaaagaactaaacaagaaccttctagccaaggatctcagagtgctttacagacatatgaactgggaagtgaaaacgtgaaagtccctatttttgaggaagatacaccctctgttatggaaattgaaatggaagagcttgataaatggatgaacagcatgaatagaaatgccgactttgaatgtttacctaccttgaaggaagagaaggaatcaaatcacaacccaagtgacagtgaatcctaaacctgaatggcgctcatgttttccaagagaagcagcccctgagggagtctgctgaggctgccaacagaggatgaagaggatacaaatttaattaatttcaaatcaacatagacacaagaaccttttgctgtttcttccaacgcccactcttcctaatgatggcatcacttgcacttggaagaatgtgcaattgagaagtactaggaaaaggcctggctgccatccatcgctgcctctgaaggtggagaaggaggccggtgaagttcttacttttgatcaacatgggttggccttctttagccaattttaacttaatgcccttacttctggcaagaaaaagttcggaacctttttggttatttctttggggcctaattaggaactggt

SEQ ID NO: 510530 - DNA, 932 bp, Homo sapiens
tgctggtggggcaaggaggaggagacacggagttggagcagcctccgtgtggcttgactggtggctgaggcctcagcagcgcgagcttgagttgcggccgagcctgtggcgccttcccctgcgggtggggacgagctgggccccgcggcgtcatcggcggcgaggagccgctggcctcggcctagcatgtcggaagcgggcgaggagcacgccatggagacgactgggctggccacctgagaactggacatagaaggccgtcccctgaaggcgaggtcgcctggctggggccttggactgggcggcctgctgggggggggcctggatggcgcgactgtgggtggcccccggagcggggaatcatgaatgggcgccgaggggcgaccagattccaactgccatgcaagaacgagggagggaccgcggcgaacaacatgtccgtttggtggcctggagatggggatactaggcaaaaacagattttacagaggactattttacatagaagtttgagagacggtcgatgggagttgttacaaataaagattggattcgccacatttggactggtcaaagaagggttgcgggtaaatccttgtcagaggatgcaggccagtgtgaagaagggtcttaagagcagaaggtaaggcacacggctggaattgcccgctgtcatttgaagcctttagagaagtgtccattgcttattcaccgcactcgtacccgggtaaagaaaaatctaccggatggaggggtcatgaaatcctgaaggccacgtgacggaccacactcaggaggtacctctgtgcgaaagtatggggagacttacggccattgcacttgccattgtatcacagttgaccaaagaccaggtctgtgtcaaaactttaacgagagaacccgtaacaggttgcagaacgtcaatgtcttga

SEQ ID NO: 510531 - DNA, 606 bp, Homo sapiens
  misc_feature (69)..(69): n is a, c, g, or t
  misc_feature (128)..(128): n is a, c, g, or t
  misc_feature (145)..(145): n is a, c, g, or t
tcagcaccgacccaaacaagcaggaaacaggaaatgttcacgtttcagagaggctgcagcccggcgcanatcctgagcgcgcctctgccgaggcgagcggacatgcaggctccccgcgcagcctagtnttcgccctggtgatcgngctcgttcccgtcggccggggtaattatgaggaattagaaaactcaggagatacaactgtggaatctgaaagaccaaataaagtgactattccaagcacatttgctgcagtgaccatcaaagaaacattaaatgcaaatataaattctaccaactttgctccggatgaaaatcagttagagtttatactgatggtgttaatcccattgattttattggtcctcttacttttatccgtggtattccttgcaacatactataaaagaaaaagaactaaacaagaaccttctagccaaggatctcagagtgctttacagacatatgaactgggaagtgaaaacgtgaaagttaacagaaggctgcaacagctttataaatatctcaataaatcctggagtgagacagaagaacccaatcccacattagatctggtacatgcagataataaacctagatcggcaa

SEQ ID NO: 510532 - DNA, 721 bp, Homo sapiens
  misc_feature (288)..(288): n is a, c, g, or t
  misc_feature (483)..(483): n is a, c, g, or t
acgcacctggcgcatgaagtgggtaacctttattccccttatttctctctttagctcggcttataccacgggtgcgtttcgtccatatgcacacatgagtgaggttgctcatagacttaaagatctgggagaagaaaagtccatagccttgatgttgattgcctttgctcagtatctccagaagagtccattcgaagatcatgtgaatttagtgaatgaagtaactgaatttgcacatgtgttgctgatgagtcagctgacaattgtgacaaatcactttataccctntttggacacaaattatgcacagttgccactcttctggaaacctatggagaaatggatgactgctgtgcatatcaagaacctgacagaaatgaatgcttcttgcaacacaaagatgacaaccaatacctgccgcgattgatgagaccagaggttgatgtgatgtgcactgcttttcatgacaatgcagagacattnttgccataatacttatgtgaaattgtcagaagacatgcttactcttatgccccagaactacttttctttgctcagaggtgtaaagctgcttttacagaatgatgccaagctgctgataaagctatctgcctgttgccaaagctcaatgctcttctggatgaaaggaacgtcttggctgcccacagattatgggtgacagtcttctttttaaccatgtgaatgtaatgctccagtgctt

SEQ ID NO: 510533 - DNA, 293 bp, Homo sapiens
  misc_feature (12)..(12): n is a, c, g, or t
  misc_feature (20)..(20): n is a, c, g, or t
  misc_feature (24)..(24): n is a, c, g, or t
  misc_feature (31)..(31): n is a, c, g, or t
  misc_feature (69)..(69): n is a, c, g, or t
  misc_feature (99)..(99): n is a, c, g, or t
  misc_feature (218)..(218): n is a, c, g, or t
cgaaccccgttncctaactntganagacatnatgacaaaagaagaaaggattcccatgaggaatcattntttcgaaagacttctttggtgggtccggtngccagctactttaccagcttttacagggtaattcactctacaagccggctcacacaaaagactacatattggatgaatctggttatatgaaatggccagaaaagggaaatctattgacnaagcaaatcagtagttgcctacggcccagggattggctacaaataggctccagaaaactctgggaagatggtaga

SEQ ID NO: 510534 - DNA, 203 bp, Homo sapiens
agagacctcggacgccacgagaactgaggcccttgaacgacggggatctacgcatgcatagtggtcactatctctgcttgcgcgactcgggcagaccatccgacctctgcaccttgggaggacatcgtgcatggacaagcgctcgagaagtttacctgtttcgaaggatctgcgcatgctgagtgcaggcctgatgcgcgttg

SEQ ID NO: 510535 - DNA, 212 bp, Homo sapiens
ttctctcggcgagcgcggcagcacaagaaacctgctgcgagatcacctgcactctccggaacccactgcgacagcaaaatgccccctgctctgaacaaggcttaactgcgaggctacgtggacgccgcagggtgtcagccaatgcgctgctgcccctacactgcccgagtggcagaaacctgtcgcgtgctcctatggacgccacaaccctg

SEQ ID NO: 510536 - DNA, 119 bp, Homo sapiens
ctagagatcgggcgggccccaagtgatgtgccttctgtgtcagggtctgcgatgctattacagaaggggctactgtatgagtagcaagagcaggaagatctcagattatgaggtgctac

SEQ ID NO: 510537 - DNA, 143 bp, Homo sapiens
taactacttaaaaacaagttgaggcaggcgtggtggatcacacatgtaatcccagcaccttgtgaaggcccgaagtgggcagatcacctgaggtcaggagtgctgagaccagcccgtgcagcatggcaaagccccgtctctac

SEQ ID NO: 510538 - DNA, 574 bp, Homo sapiens
ttgcagcaagtttgtttagtgaagaaaaaattgattccgttctggtaaaaagtggaaagatgccctaaaatcttgaagtctggtgatgctgccatgttttatatggttcttgcaagcccatgtgtgttgaaagcttctcaactaatccacctttgggttgcttttctgtttgttatattaaacaaacaatttcggtgggtgttatcaaaacaatggacaaaaagggttctggagctggcaaggttcccaagttttccccaaaagctcaaaagggtaaattaatttttttcctaaaacctgccccccccctttttatcagtgggggaaaaacggtttcaaaactgttttttttaattggccctttaagtttagtagtaaaaaactggtttattataacaatgccttgttaaacctttaaaaagaaaagaaaattttttttgggcccctttggtttttttttttggggggggcagttttaagtttttagttttttaaaacaggacttttttattgaaaaaactttgccaaaaattttttccaaaatttttagacccctttaaaaagtttaatttga

SEQ ID NO: 510539 - DNA, 731 bp, Homo sapiens
  misc_feature (60)..(60): n is a, c, g, or t
  misc_feature (106)..(106): n is a, c, g, or t
  misc_feature (136)..(137): n is a, c, g, or t
  misc_feature (206)..(206): n is a, c, g, or t
  misc_feature (209)..(209): n is a, c, g, or t
  misc_feature (272)..(272): n is a, c, g, or t
  misc_feature (351)..(351): n is a, c, g, or t
  misc_feature (359)..(359): n is a, c, g, or t
  misc_feature (372)..(373): n is a, c, g, or t
  misc_feature (495)..(495): n is a, c, g, or t
aggagccctccgtggagacggaggacccagccctgagactttccgccagctcttccggcncttctgctaccaggaggtggctgggccccgggaggccctgagccgnctctgggagctgtgctgccgctggctgcgnncggagctgcgcaccaaggagcagatcctggagctgctggtgctggagcagttcctgactgtgctgccgnggngagatccaggctcgggtacgcgagcagcagccggagagctggtgaggaggccgtggtcctcgntggaagggctgcagcggaagcccaggaaacacaggcagcggggctcagagctgctttctgatgacgaggtgcccctcgnggataggngggacagttcttnnaaacaccatggcagaggctcagccagaggatctgtccctggaggaagaggctcgattctccagccagcagcccccagcccagctgagccacaggccacagaggggcccgctgttgtggccangagagaggccctccagctccccgtgcatcagtgagatggcgtcagcctcgcccttcctttcggcctggtcccaggtgcccgtgaacttggaggacgtggctgtataccaatctggggaggagccaagattgcctggacccagctcagcgggacgcgccgctggagaattgccggactgggatccagttggaggccggcggtgatgcccggcacgatgcccgttgagactggactgg

SEQ ID NO: 510540 - DNA, 236 bp, Homo sapiens
  misc_feature (83)..(83): n is a, c, g, or t
ctgaaaggttcaccgctctgtggcatggagaggcagatctatgacacacctagaaacggacccctaaagcaatggcacagagngtgattttctattattcatacatgctgtctgagtgcccccagttagctatttggaagagaaacgaatacgcccgatgagtcacacacactaacagatctcaagtagtgaggatgaatttttttagatcataataattaaaatataggctgggc

SEQ ID NO: 510541 - DNA, 169 bp, Homo sapiens
  misc_feature (26)..(26): n is a, c, g, or t
  misc_feature (114)..(114): n is a, c, g, or t
  misc_feature (147)..(147): n is a, c, g, or t
  misc_feature (153)..(153): n is a, c, g, or t
ggggctcctgcagtccgggagcgcangggccgcggcgctccgacctccgctttcccaccgcccgcagctgaagcacatcccgcagcccggcgcgacctccgatcgccgcagttnccctctggcgccatgtcgagaacggagcgcccnggatgnaggaggagagcctgga

SEQ ID NO: 510542 - DNA, 220 bp, Homo sapiens
ctctagagcgcatccccgtaccaggcgcacttctgcaggtactgtgctgcggaaggggagcgagggcctcacttaacggcatggcactggcgcgggaactgtgagcactggtggtattctgaggctacgatgtcctgtggtcctaacggagcagcattacagcggaagggacggaagagcccacgaacaggatgactgacagaagcatcgcactttgact

SEQ ID NO: 510543 - DNA, 577 bp, Homo sapiens
tacaggcgagtcgggttagcactttatgtttacctggcacgggaggaaaggtcacggcctctatggacatggggggcggggtgggactcgtcaacgttcggtcacgaccaaagcagtctctgtgtgatggacatgtggcactgcggtgggagtcaccataaaacaacacatcctgtaccgggaatgggacagagacagtagctacacagctggacagatccccttcccatctgccaggactcaagagccaatacacctttggcggtgctccagccaatttgatgagactgaggatcccgtgttgtggaaatcattctttggttggctgaggaatattcatgtcattcacatccctgtcccggtcactgaagcgctggcatggtccaggtgccggtcaggctgaatggttgtcctgaccagtaacccaagcctatttcacagcaaggaaatgcaccttcacaagcactgattagccaatgcacctccctccccagctcgagatcattcttcacttaggacacaaaccagacaggttaggtagcgaatctaatctagaattgtgaccatggatagccgg

SEQ ID NO: 510544 - DNA, 448 bp, Homo sapiens
aattcggccataatggccgggaagggggttaaaaaaaaaaaaaaaatttaaaaaaaaaaaaaaaaaaaaaaaaaaaaaaaaaggaaaaaaaaaaaaaaaaaaaaaaaaaaaaaaaaaaaaaaaaaaaaacatgggggcccccttggcccaaccaattttaaacttggccaagcttaatcatggggcccaaatttgggcccaattggccaattccccctaaaggggggcgatttaaaaataaagggcccgggttttaaaaaggcgggaccgggaaaaccctggggttccccaacttaaaccccttggaaaaaaacccccttttcccaaggggcggaaaacccaaaaggccccaaccgaaggccctttccaaaaagtggccaccccaaaagggcaagggaaattggaagcctaaaaattttggaaaaaatccgggaaaaattttgtaaaa

SEQ ID NO: 510545 - DNA, 386 bp, Homo sapiens
gcagcaataaaaggaacaggagtcgatccatataccagcacatacaatcaggtcagtctcagcgtaggcccttcagaactgttcgccgcaacatatagtgcccatgtgttcaccatgctaaagagcatcacttagggtcctcaggaatgaccttacagtgaacgctttactatatacctaaagagaggagctgagcaggaggcagccaaaaacaagaaaagcccagagatacacaggagaatagacatttcccccagtacattcagagaacatggttaggctcatgatgaaatgaaaagtccccgggaacctggctacaaggctgagggaaaatacaaagatgatcctgtggatctccgccttgctattgaaacttctaaactagg

SEQ ID NO: 510546 - DNA, 762 bp, Homo sapiens
ggtggaggtcttgaggctatcagatcggtatggcattggcggtcctgtggaccccgcaatggcggagcgctaggtgggtccgaggcagctaacggccttgggggcttcggggccccgagactgcgtggggcgctatgaacgtgtgggtgcggtgccgcatccatgcggaaaggtcggcaaggcgcttcctcccgctgtggattgggggtgtacgagactccctgtgcgtctgtgcgcgccatcaccttttgcgggaagatgccttcgtgccctgggtgcggcggccgatctttccgcccctgggaccgcggtaacgaggaccccagggttctacgctcgcgcccttcttcacgagcatcgggtgtacaagtgaccaggccgtgttatatctttcacccacgtgtttgccggccttctcgagggtgtaaagcaggccctcgtggctcaccatgaccatgttattagaaggccttcccgagaaagtgcttaggccttgttgatgcatccagtgaaccaccttaggatgaaccaagaagagtgcgtctgaatgtgatctctcacgcccgtcttcttggcagaccagctgatggaaatccgccaagagagagacctactgcccggttcatcggtggacgacctagtaacagctgtgtaacctctgcagatgctcaagcatccttctctggccaggaggatctgtgtccaacactccatgtttctggctcctggaccgagagtctcttctcttcagccgggatctgg

SEQ ID NO: 510547 - DNA, 498 bp, Homo sapiens
tagttctagatcgcgagcggctcccaagtagctggaattgcaggtgcctgccaccagacctggctaatttttgtatttttagtagagacggggtttcaccatgttgaccaggcatgcgccaccatgcccagctaatttttgtatttttagtagagatgggacttcgccgttttggtcaggctgggctcgaactcctgacctcaggtggtccgcctgcttaggcctcccaaagtgctgggattagccactacgcccagccccaaattaaaaaaaaaaaaaaactagcggggcgtggcggggaggggtggctcacgcctgtaatcccagcacttggggaggctgaggcaggcggatcacgagatcaggagatccagatcatccgggctaacatggtggagccctgtctttactaaaaatacagaaaaattagccaggcgtggtggcgggcgcctgtggtcccagctactcgggaggctgagacaggagaatgcggtgaaa

SEQ ID NO: 510548 - DNA, 971 bp, Homo sapiens
  misc_feature (469)..(469): n is a, c, g, or t
cctagggcaccagaaccgccgccacgggtgttgcggaagaacaaaccaatgtgtggtgttcccaacaccaacaagggagggtgttgcttaccaaaaaacaggggcccctgttgtttgtgtaacacacagacgcgtgtgttggtctataaacccgccgcggaccgacttgtcccgaccagtacggcgaggcaccaaagttgggggcccacccacccaaacgctgggaaattgcaccccgcaagtaggaggtgtgcactagtactgtgtaattaagcccaccgcctcgccgccctggctatcgttggggcaagaaaagagctgacctgggagaaatgtggcggcgcccgccccgacgcgcgccgcaacagtatggttcttgtgagaaaaagaaaacgcccgcactggcgtagtttcttggtaggaacaaccaataccacgtggggcgacgcgtggtagtgcggcgtccaanatagtaattgttttgtctgtgcggaaaacaataccccccctcttctgtctcccaactctagtaggggcaccacgtgcttgccaactggaagctttgttctttggtctctctttacaatatttccccactcacagaattttacttgtcgttgccctctcgcactcgcagtgtgctcacagctcacgcaaacaaacaattacgcgcctccctccactttaggatatcctgaactagccggtatgcactactggaggagagtatatacatagcagttcttctcatattccatccgtggtaacaaccaccaggagcacacattatattaatgattctttgtttacgcagatcgtgacaacatttacggccgcactttgttccgttcaaataaggggcgaaactatctgttttcttccctcaaaaagagacagcctcaaccatatatgttggcacccagatccgcacgctgttggggcataaaaaaaacatttcgcccaaaaaaaca

SEQ ID NO: 510549 - DNA, 133 bp, Homo sapiens
tcacagttaatgatgcagaacttactggcatctagtacgtggggtctccggggcttttcatgtttaacttccaatctgtgaagaactgtgcaggtgatcacctgccttcctaccccacacaccaagcacaggg

SEQ ID NO: 510550 - DNA, 546 bp, Homo sapiens
gcggaggcgccatataggaggggacaaatccgacgacagcgagtgacacaataaaccggaccctgtacctcagctctagggcggagtgtacctaaagactatctggaaatgatgagcagtcctatggatctgcgggacgttcaggaaatgcgcgagatggactgcaggtgcagaatgcaggatcactagaacaaagagtcaggaatctttatgaatgcagcaaataaacctgagggagggaagagccaatggctccacaaaagactactataacgcttggcgatgcgagagaaggtcgcggccacaatttgactgcgcactccccgctgcccccagaagatgaagtatcatattccatatgagcactgggccctctcatgaacatcctctaatatacctcagaactgcatcctgtatgctccagactaagcgaaactgccacttggctatccggttaatcctcctatggcttccggtaaataaccgacagtggtagtaaagcctgagacgccacaccggggccctagggatgacgcatcaaactga

SEQ ID NO: 510551 - DNA, 337 bp, Homo sapiens
cttagaggatcccccgtgaagcatgacagcattaaagagactcggaggacttaagcagttatcgatgggatggatggaatcaaaatctctcagtggcttgggctgcaggactttgacctaattaagaagttcttcggggcgcgggcacgctacgccaaggttctccctggtgcggttgaaagaagaatgaccaaattttacgcccatgaaaagttggtgaaagaaaagagcttggtcgcatgatgacggaggatatttgacctgggtacgagacatgagaaagcacggtgttttgagccaggctatccagcaaccccctttcctgggtcgggattta

SEQ ID NO: 510552 - DNA, 355 bp, Homo sapiens
aacagagagcacacccccgactctgagccagcccaagcagatgtactcgtcagtgctgcgctgagtcagtatgtccctcgatgtctgctctcctcccttcttgtgttcctgctcacttcaagcttcttccatggactttccaggacacagtcatctctagcccccaaatcatctcgttcatcctctgtgtgtgcattctgttcaaccaatatgaaatagacaaggaaagctcactacctttgtgggacaggcagaactttctaaatttagtacgcaatcacgtgttctagagatagactgttgactatatatgtatagtgtatatatatcaaaaacaacattggataggagcaat

SEQ ID NO: 510553 - DNA, 313 bp, Homo sapiens
ggcaactatagaatgtaatagtatctagtatagaatatgtaaagacatctgcaaattagtacctagcaaagaagacatacatttataaatatacacattctaggtcacgataaggtcaatagtcaacagatgccatgactcctatattcaaacagaaactccacaagactaatagagacccaataggctccctatagtacgaatgtgcacaacttaaagcataggtcacatgatctactacataaatatcaaaccaaccattagtttatacattgtcaaagaccttctcagatatgtcatgagtgcacccaag

SEQ ID NO: 510554 - DNA, 248 bp, Homo sapiens
  misc_feature (7)..(7): n is a, c, g, or t
tcgcccntacagactgcgccggtgagaggcagtgaggaaaaccaccagcgagaccagtgtggtggctcacaccttgtaatcccagcactttgggaagtcaaggcaggtggatcccttgagctcaggagttcaagaccagcctgggcaacatagcaagaccccatctctacaaaaaatacaaaaactagccaggcagggctgggcgcggtggctcacgcctgtaatcccagcactttgggaggccgagg

SEQ ID NO: 510555 - DNA, 1278 bp, Homo sapiens
  misc_feature (799)..(799): n is a, c, g, or t
cgaccattgggcgtgttccacgaaaaagggggattctatttctgttttgtaattgtgttcccaccgtcgcccgcaaagagggggtgcccgccgccgatgtgctttgtaaggagtagtttttgttgtcttttggtataagtggccgcctcaagtaaatttttaaggaggggttttttgtggcgggggcggtatagatttggttgtggggcatccctaaaaacccccctccgcgccaatagatcctgatgacagtattatggggggtgtaaaaaggtgttggtaatagtttggcttaatataaagagactggcgggggtttctttttttgagaagggcctccctcttgggggggtctctaggacacagtgggcacacagggacaaagctcttgtctcgccccacagtctttgaaggggcaaccagtcactatgtcctctgggggcaccacagaagagtgttcgttgtgtgccccacacccacacaacagggaacccacagtgagagccccacagagagcgtgcccctcgctgtgtccctgtgtgacacccacaggccacacaggtgcgcacatcgccccttgtcgacgagacgcgcctctcctaggtgccccctcttcacagtggtctttgggtgggcgcacacactcggggacacacacagggtgcgacacacagcatttgtggtgggttttgtgtgagaggtccacatgtcacatcttataatcacagagagctttgggagagcgcactcacattcccctgctgtcacacacagagatgagaggagaacctcacacagnggcacatgtgagagcacagcgtttctcctacagagaggtctgagaattcttaagagttcttcacattctggtacacattccgcggtgttttaattcgctcttggcttctcgtttgttgctatcttacacagggcttctggagaaattcacgagatgctgtgggaacttataatttttcctcctctccctcggccctcacacccacacttagtgttctttttcacattcctgcttccctgccttaaacttcctccttcccacctggcccctgagttcccacggcccacaggcttttacacaacctcggtggctcacagctttccccacatcacagtgaaagaaggggtggggctaagagagtaaactaacctcacgcacggccctcccgtcctgatagtctgtggagtttcggagtccttttcacggaagcttcaagtctaaatggagactattaaattataactcctggtctgcaaata

SEQ ID NO: 510556 - DNA, 275 bp, Homo sapiens
ttacaaggtcaccgctccggcctcattttctttattcactttgtctctcgtatgacacttaggttgattccaaatcttggctattgtgaatatgctgcaataaacatcgattgcagattttctttgacatactaatttcctttctttttggtgtatacctagcagcagaattgccggatcatatggtagttctgtttttagtgttttgaggaacctccatactgttctccatagtggccatactaatttgcattcctactaccagtgtacaaggg

SEQ ID NO: 510557 - DNA, 320 bp, Homo sapiens
  misc_feature (33)..(33): n is a, c, g, or t
  misc_feature (51)..(51): n is a, c, g, or t
  misc_feature (157)..(157): n is a, c, g, or t
  misc_feature (307)..(307): n is a, c, g, or t
tcattctccagaaggatcagacagcttcctggnggcacgttagttactctnggtggtttcaacctggaagaggcaatacactcttcttagtggaatagaggcttaccctacatatgaagtcactgttcctacatagaatgcaatgcttttaggctgngctgcatgagagtctttgtgttaaagaaaggaatgcggtcttcaaagggcatgacaataatttcactgaactaatagttgaggctgcttcctagatgctttggggtcttcaggctgttgcatcaacaagcaggagttgagtgttggctgnggttattgttctg

SEQ ID NO: 510558 - DNA, 224 bp, Homo sapiens
  misc_feature (194)..(194): n is a, c, g, or t
  misc_feature (224)..(224): n is a, c, g, or t
gctgggcgtggtggcacgtgcctatagtcccggctacatggagagctggggcaggagaatcacttgagccaggctggagtgcagtggtatgatcttggctcatggacgcctctacctcccgggctcaggtgatcctcccgctcagcctcccgagtagctgggacaacaggcatgtcctgcctattttttgatanggttagctttggtttttttgagacgggccn

SEQ ID NO: 510559 - DNA, 530 bp, Homo sapiens
  misc_feature (57)..(57): n is a, c, g, or t
  misc_feature (81)..(81): n is a, c, g, or t
  misc_feature (111)..(111): n is a, c, g, or t
  misc_feature (114)..(114): n is a, c, g, or t
  misc_feature (116)..(116): n is a, c, g, or t
  misc_feature (133)..(133): n is a, c, g, or t
  misc_feature (149)..(149): n is a, c, g, or t
  misc_feature (153)..(153): n is a, c, g, or t
  misc_feature (161)..(161): n is a, c, g, or t
  misc_feature (163)..(164): n is a, c, g, or t
  misc_feature (167)..(167): n is a, c, g, or t
  misc_feature (199)..(199): n is a, c, g, or t
  misc_feature (202)..(202): n is a, c, g, or t
  misc_feature (208)..(208): n is a, c, g, or t
  misc_feature (225)..(225): n is a, c, g, or t
  misc_feature (231)..(231): n is a, c, g, or t
  misc_feature (257)..(257): n is a, c, g, or t
  misc_feature (462)..(462): n is a, c, g, or t
  misc_feature (528)..(528): n is a, c, g, or t
ggggggggggttgggtgggggggggggggggggcttggggggggggggggggggggncaccctgggtcattaatgatatgnttacaccacaaatcccaagtgcactaaaanggngngatgggccctaccacancttctggggggggggntgangcgaaggngnnggntcttgtgcctttctccctgggggctcacaagnggncgcatnttcaaggtatcaggggngcgggnccaagggcgcgcaaaagagggggctngtgacatggtccagagcggtggtaagggaggagagaaggcctcaaactatgggcaactgaaccccacaggtaggcatcggtcattcctgaagagctgcgggagttttgtccagtgtgtccttatggaggtggagggactgctgggagggactctcccagacgagaaacctccagaagagggcacagggtcggggagggagcaganaaaaaaaaggccttgaatgacaatacccccaaccctgcctccaaagaggttagagggagcagaggngg

SEQ ID NO: 510560 - DNA, 375 bp, Homo sapiens
  misc_feature (337)..(337): n is a, c, g, or t
  misc_feature (352)..(352): n is a, c, g, or t
acgttggaaaatagccgacgaacactggcgtggttaattgaaggatggctaattaatcgttcccactcaagagtggcatctctggcttagggattggttgttggagggagtgggcctcacttggggaaatgtatcaaatggataagattcttggaattattaggattacagagaatctccatataaaccacagtggaaaccggagaaacctgtacagttggatagagtagaataactcctatgagggcggtaactgggctaattataatgactgaagtgctgagaggaagggtggaaaagtgaacaggtttcctaggtagtggatctcactggggtnggcgggcacctcttnagaacaataccgactacctcctc

SEQ ID NO: 510561 - DNA, 324 bp, Homo sapiens
agaagatacgtaacctacatatagacataatggcagtaagggcaagaaagctcaaaacaaccataaggaagggaaaaagagaaaaatacatctggaggaaaataaattagaaggccagataatcaattgcagagcgccgccaggaaaacatcgtgtagaaagaggccggggtgattacaaacgagtctcaatgtcatgaggcaacaaaaaggccagaacaaccaacctgcgtatggatagtcgaaagaaacataaagacgcagaaaggacaatgacaccaaaaataataaatgtcagctggttttgatactaaaatgtgctgaa

SEQ ID NO: 510562 - DNA, 183 bp, Homo sapiens
tggttttctcaggggaagagtagaaggtggagggggatgagggataaaagactacacactaggtacagtgtacactgcttgggtgatgagtgtaccaagatctcagaagatcaccactaaaggccaagtgcagtggctcatgccgtattatcccagacactttgcggaggctgagcgcaagtg

SEQ ID NO: 510563 - DNA, 112 bp, Homo sapiens
  misc_feature (13)..(13): n is a, c, g, or t
cggaccctattantcacaagcacaaaaatcagctgggcgttgtggtgtgcacctgtactcccacctacgtggggggccgagccaggataatcgctctcaacccaggtaagct

SEQ ID NO: 510564 - DNA, 292 bp, Homo sapiens
aggtgtaccccgcatggccaatggcatctcctcatgagaaacctctgagtgcaagcatggcctggggcccgctgcccaactggcatgttctcagcatggatcatgtcattgggagtcttcttggactcatctctggacattgctcaggtccgaagtgatggtcttcaggtgcttctgtacgtgcttattcttctctgactcagtggtacgtttctcgctcattgcggtccttgaggcatatgactcaggcctgtatgtaggaatagtgtctgtcctaatgctcattctgcta

SEQ ID NO: 510565 - DNA, 358 bp, Homo sapiens
cgatgaagtcatgagatgttctacgtaaacttataaatcatatttaaagtaccccagattgctaaggtttattctcttttaatatacgcatagcacacaccaagataaagttataataagtgtcaatttcactctcttacatttggtatgttttcctaagtgataaagctagcacacagagtttcatataaccattgataagtccttaggaaaatgtcaagtgctgagaaccagtaatattaatactcagtactcagtggtatcttggcaagatattgtatcttaacactctgtcacagatgttgccatatggccttcataattgacattttccttaaatccaggtaaaatatacaaa

SEQ ID NO: 510566 - DNA, 179 bp, Homo sapiens
gcccgatgtgatatttgtgatccattagagacttcttcggcagatgctgaaaacaagcttaaattctggccccagcaatacagagctgatgccaagcacgacactgaccatccttcttcagagcaaataaatgccgtttctccacaaggcaccacccaagccaggacagacactcccga

SEQ ID NO: 510567 - DNA, 1668 bp, Homo sapiens
gtcctgacactgtgccggactcgaaggcagtcagtagatgtctagcaccgtgcgcataagtacactctgtcgttattgtgctagtgtctctcctcaatgggagcatgtggacagaacttggccgtcggggacgtgtgtttgtcacttggtttccagctatgctaactgatattcgtcaggtatagggccacttggagatgcatagaggattccattctcagactgtcagtactagccgggttatgtcctatagtgttaccactaaacttaggagaacggtgactaggagccaaagtctactccgattactaccgaggttccaaggcgatgagatctctgaaaagatagtggctatttgtaccctgtgctcacttgggttcacagccatctttgcttgctacggagtctccatgaaaccgcacacccgcttggggggtgacaaacatgtgcatctgcgcacaagataaactcgaagcaaaggaagttgtgcttgtagcaatgggatacgctgagatatgagcctggcgtgtgtgccagggcttttgtgcttgaggtgctgtaacagtgtatccagatgaccactacgtggtgaaacaacattggtacccagatgcacagaaaaagggagcaagaaattgagggaggagctcaaaggccttgcaacttcgctaagtggccgcaccgggaacttgaacaggcctctggcctgaaaacagggtctggaatctaattaaaggttcccaatgggtacccagaagagggggacgacccgaaacaagtggtttgcgtgttacaccatagatgaccatgcaacacggatacgtggctcaaactacataattataggaaaaaaaaaaatgtaagggcgaatggcaatataggcacacgaacgggagtatgcaagtatatgatgcttattgcattacgcttcgtatagagaaaacaaaaagaacaacaaaaaaagacagcgaataaagaaggaagagagacacaagcagaacacaggaaaagcaatcaaagggagagggacacacaaagacagagaaagaagcagaagagatagagaggcaagaaaagagacgacaaggagaggaaacaggcgagagggataagagacgtacaacgaagatacgcaagaaacaaagcaaaacgagaaaacagcatggagaaaggagacaggacagctagagtaagaaaaagaaacaaaagcagaagagcgacaagagacgaagaaaaacaagaagtagagagacaacagaagaaaaacagaaacagacacgagaaaacgagaagagggcagacagataaagcgaaaaaacaacaacaaaaaacagaaccaagccaacaggagacaagggaaagacaagaacagatggcaaaagcagaaagaaagcgaaagagagcgcaaagaaaagcacagaagagtaacagaagaagcacaaacaagaggaagagaaagagggagcagagacaccatgagacgaacgaaagaagacacgaacgagacaagaaagaaacagaagagaatgatagagcagagtgaggacagagagcaggacgagaagggagaagagacaggaaaagcaacgaagaaacaagaagagaacagacaaacggaagagagaaagagaaaaacacgagagagaatagcggcacacacaacacgac

SEQ ID NO: 510568 - DNA, 801 bp, Homo sapiens
aaactgaagatggcgtgtgttgtaggagggttgctccgagcgtcggtgcccgaatgtgagtgccattccttggggcattctgccattgggccctcaggctgctgatgtggaagaaggagcttgacaaatttatggtgtactggtatccagtcaagcagaagattattcagcgacccagttcctcatgccatgcactgttgtcacccagaatgaccctattttatggggtacagccgtgtcaatggagagtccaaagacctaagcctgatgactttaaggggaaatattgtggtgctttcttctatccttttgatttcaccttggtgtgtcctacagaaatggtggttttagtgacaaagctaagcgaatttcacgattgtgaactgtgaagtggtcgcagtctcagtggattcccattttagccatctttgcctggataaatacacaggaaagaatggtggttgtggggcaattgaacatcgcactcttgtcaagacttaataagcagatttccgagactacggtgtgctgtagaaggttctggtcttgaccttaagcaggttctcttccttaaattagaccccaatggggtcatcaagcattttgaggcgtcaacgatcttcccagtgggccgaagcgttgtgaagaaaaccttcccgtttggtggaagcgttccagttctttcggaacaccattgtcgaaggttgcccagggaactgggaccggggttctcctagaacaaccaagtacacgtgttcccacacagactttccacaagggaaccacgggaccccctgtgta

SEQ ID NO: 510569 - DNA, 350 bp, Homo sapiens
tttttccggggggtggggctttttcccagcaaacccacgtcagtggggtgcgcctttcgcacaggccattttgggtttggtggggccaggtcccgtaacaccccgtgttgggcttgtgctgcagctggggggtggggccctcattttcatgttccagctgttgggcagtgttttgcctgtgtgttgggcctccagggtgggtgggctcccgtggttttcctgcatcccttgccccctccccccctcaaaggaaagggtgctccccgaggccccgtttccctgtggggggctgcaaaggggcccccagtgtggccctccttgtcaaaaaaaaataaaggctagacctgcca

SEQ ID NO: 510570 - DNA, 610 bp, Homo sapiens
ctcatccttcttctttctatattttaatcatcccatactacctaatattcatttctcgactctcacaataactattctaatctatcaaattacacaacactcctcaaacctaacttcttaccaccctacaaaaacacacatctccaactatccctcatcccacactcaacacttaatatcttccacctcctccatcaacaaccaacaccctccctctccccctcacttctacctcccccatccccataccccaccaacatctcaccactaccacttcaatataataaacatccctaccaccaaccaccctcacaaaccttatcaataaatacaacacttccacataaaccactccatatcaccatctaacccacaaccccaccaatttcctcactccttccaacattcaccacttcatcacccccactaacacactcatcctcccacctcaaacatccatacctatcacactacacaaacccctccacaccacctcactacctctcacaacctcacaccttattcaccactcaccaaccccaacctctaacatatacttaacacaactcttttcacaaatactcatcacacaccttcaacccttccttca

SEQ ID NO: 510571 - DNA, 719 bp, Homo sapiens
  misc_feature (9)..(9): n is a, c, g, or t
  misc_feature (89)..(89): n is a, c, g, or t
  misc_feature (104)..(104): n is a, c, g, or t
  misc_feature (123)..(123): n is a, c, g, or t
  misc_feature (125)..(125): n is a, c, g, or t
  misc_feature (132)..(132): n is a, c, g, or t
  misc_feature (136)..(137): n is a, c, g, or t
  misc_feature (143)..(144): n is a, c, g, or t
  misc_feature (153)..(153): n is a, c, g, or t
  misc_feature (163)..(163): n is a, c, g, or t
  misc_feature (217)..(217): n is a, c, g, or t
  misc_feature (220)..(220): n is a, c, g, or t
  misc_feature (244)..(244): n is a, c, g, or t
  misc_feature (273)..(273): n is a, c, g, or t
  misc_feature (307)..(307): n is a, c, g, or t
  misc_feature (407)..(407): n is a, c, g, or t
cccgggccnactcatatacaacctcaaccagcccaaaatttagctcccccacaaattcctccaccgtctggttcaggccataagctacntggacctcaccaatncgcttggttatagtttggntntgttttntttnntgcttnntggtgtttnggagctgatncccagcgtccccagggctctggcagaccaggccagagagcaaggcagctatttnctnaggccgcaggtgctcagtgtattnttaaatatgagctcagtgaggagcaaatnatggctgttcatggcacaagctacccgccctgcnagcttcacagtttccgcctcgtccacataaaccagggttcggagcacctctactcgctgatggtactcaggaagcagcagcaatgactgatccgacagtnggaagcgcagcgctcccatctccttctgtatctgcattcgctcccgcagcttcaggtactgggcaggaaaacgggggctgtgtacacactgagccccctggatcagctcctccagcttccgggcccggagcccaccctctacaactgacatatctttgagctgcaggtcattgacagggtcgagggtgggaggtccggctgggtgggcctgagccagacgcagcagttcctggacagcagtggtcacggctgcaaggggaggatccttcttgaattttggctgctgcctcttgctgaagtcctccaagatct

SEQ ID NO: 510572 - DNA, 885 bp, Homo sapiens
  misc_feature (24)..(24): n is a, c, g, or t
  misc_feature (126)..(126): n is a, c, g, or t
  misc_feature (130)..(130): n is a, c, g, or t
  misc_feature (133)..(133): n is a, c, g, or t
  misc_feature (143)..(143): n is a, c, g, or t
  misc_feature (278)..(278): n is a, c, g, or t
  misc_feature (491)..(491): n is a, c, g, or t
  misc_feature (500)..(500): n is a, c, g, or t
  misc_feature (516)..(516): n is a, c, g, or t
  misc_feature (736)..(736): n is a, c, g, or t
  misc_feature (787)..(787): n is a, c, g, or t
  misc_feature (810)..(810): n is a, c, g, or t
  misc_feature (860)..(860): n is a, c, g, or t
ccccccccccccttctgggagttngcctgctgctgcgcgccccgggccccgctgggcctggctgtgctctggcggggctgcccgcggggcttcccccggtgccgtgggttgcggcccgtgtgtgcnggtngcngccccccgcngttctcctctccctgttcttgccttctccgctggttcgcctccggtggtgctgggtgcccgctggcggggccgtctcgcggggccgggcgggccccgctgtgcggggccctcgccctccctgcctccccgccggngtcggggctcccctggcgcccccgctggggccggcgccccttgggccgccccccctccccccgccggcttccgggctccgtctgccgccccccgctcggcttgggtggtgtggggcggtggccttggggctctgctgcggtgcgtgcccccccccggtccgtccccctgccttcgccccggccgccccccggtgggtccgccccgcgccgccntggggcgcntggcgcccccgcgccntttcctgtccccccgcgggccgggccccggcccccccctcccggcccccccccctgccctccgccccgccctgggggccccggctccccccgccgcccggggtgggggggccccccccgggtcccttcctttcttgccgttcccccgctgtgccctcgccccccctcctgtgctgtggcccccggcgcctgggctctttctgccctggcggttggggccntcctgggtccgccggggtgggctcgggcgtcctcttccccgtgcgcgtgtnttgggggcctctgtcggtgtgtnctgcctgtgcgtgtgtccgcctcggtccgggtgccctctgcctgccctgntttctcgggtctgtcccgccgtggt

SEQ ID NO: 510573 - DNA, 479 bp, Homo sapiens
ggaaacatattaacttcatagttaatatgtagaaacgtggcagacatcatattcaccaaatgatcaacttaataccatcagtaagaagacttcttgacatcatataccacctgatgtgatgcactgagaagtgcacaagagcacttccatggtcttcttgccaaaaatacaaatcttccatttaattaagtgaaaatattggccggacacagttgcttatgcttataatcctagcacttcgggaggctgaggtgagtggatcacctgaggtcaggagttcgataccagcttggccaacttggtgaaaccctgtatctactaaaaatacaacaattatctgggcgtggtggtgcatgactgtaatctcagctactcgggaggctgaggcaggagaatcgcttgaacccaggaggtggagattgcagtgagctgaaatcgtgtcattgcactccagcctgggtgacagagccagagggaaa

SEQ ID NO: 510574 - DNA, 513 bp, Homo sapiens
cggaccccagaaggtcatcctggaacctgcccctagagtaataggcagcagatcaggtctaagcagcagaacatccagcctggccagccgaaccagctctgagatgacgttggatagatctgaacatccctgatagcccagaagctcctccctgatatatggatgtcatacctgaagatcaccgataggagagcccaaccactcctctgctagatgacatggatggatctcaagacagccctatctttatgtctgcccctgagtacaagtacatgccaccaccgacttatactgaggtggatccctgcatcctcaacaacaatgtgcagtgagcatgtggaagaaacgaagcagctttacctacttgttactggtagtctctctgcctggacactcacttaatcagagactcaacagtctctgcaatggagtgtgggtccaccttagcctctgacttcctaatgtaggaggtggtcagcaggcacatctcctgggactaaaaggatgaggact

SEQ ID NO: 510575 - DNA, 208 bp, Homo sapiens
tagcaatgagtcaggttcgttactgctgagcacaatgggaacggggtgcctggtgttttatcgtgaagccacaacctctctttggcagaatgacaacattgttgtggagggcagggccaagtttgagcatgcaagatgttggtaagtggggcctggtgtgggggggggtatgagctttggaacaagggtctctcaagggtaccggagc

SEQ ID NO: 510576 - DNA, 513 bp, Homo sapiens
  misc_feature (32)..(32): n is a, c, g, or t
  misc_feature (41)..(41): n is a, c, g, or t
  misc_feature (53)..(53): n is a, c, g, or t
  misc_feature (56)..(56): n is a, c, g, or t
  misc_feature (66)..(66): n is a, c, g, or t
  misc_feature (93)..(93): n is a, c, g, or t
  misc_feature (111)..(111): n is a, c, g, or t
  misc_feature (117)..(117): n is a, c, g, or t
  misc_feature (119)..(119): n is a, c, g, or t
  misc_feature (122)..(122): n is a, c, g, or t
  misc_feature (143)..(143): n is a, c, g, or t
  misc_feature (151)..(151): n is a, c, g, or t
  misc_feature (159)..(160): n is a, c, g, or t
  misc_feature (183)..(183): n is a, c, g, or t
  misc_feature (188)..(188): n is a, c, g, or t
  misc_feature (227)..(227): n is a, c, g, or t
  misc_feature (236)..(236): n is a, c, g, or t
  misc_feature (242)..(242): n is a, c, g, or t
  misc_feature (259)..(259): n is a, c, g, or t
  misc_feature (267)..(267): n is a, c, g, or t
  misc_feature (270)..(271): n is a, c, g, or t
  misc_feature (310)..(311): n is a, c, g, or t
  misc_feature (315)..(316): n is a, c, g, or t
  misc_feature (321)..(322): n is a, c, g, or t
  misc_feature (326)..(328): n is a, c, g, or t
  misc_feature (332)..(333): n is a, c, g, or t
  misc_feature (336)..(337): n is a, c, g, or t
  misc_feature (343)..(344): n is a, c, g, or t
  misc_feature (346)..(347): n is a, c, g, or t
  misc_feature (369)..(369): n is a, c, g, or t
  misc_feature (373)..(373): n is a, c, g, or t
  misc_feature (380)..(380): n is a, c, g, or t
  misc_feature (503)..(503): n is a, c, g, or t
cacccggcccgtgggggagtatctgtcctgcngccttcgcncacgccctgcantcngggaccgtcnctgcgcgctctgggcgcaccatggccngcggggctgcgctggcgntgatgntnttnggaatgatgggtgttatggtngccgcccnggatggtnntttcgatttatccgatgcccttnctganaatgaaaacaagaaacccactgcaatccccaagaaaccnagtgatggngatgantttgaattaggagatgntgttgttnatnnagaaaatgaagaaaaaagaaaaaagaaaaaaaaaaaaannatgnnaaatnnaaannncaannaanntagttnntnnggtagattttaagatgctgaanttgnggatggngtttaaggtggagaaggaaaaggaggaagttatggtggaggaagaaaaaggaaagaaggggaagaggccgacgccccaggcgtgcatccccgggattgtgcgcgcgcgctgtagtggctagangtgcgcatgc

SEQ ID NO: 510577 - DNA, 366 bp, Homo sapiens
tcaggctttaaagacgaataaaagtttggtaggagaaagaaagcaacatcccgagtagctgggactacaggtgcctgccaccacacccggctaatttttgtatttttagtagagaaggggtttcaccatgttggtcaggctggtctcgaatgcctgacctcaggtgatccacctgcctcagcccctcaaagtgctgggattacaggcatgagccaccacgcccagccttcccccaagaaatgtaatcatcctttttcacttttacagttgtggaattcctccaataaaggccaccagaaacacacctgtagttaaacaagctgggtttattaacttggttgcaaggagggaagacttcacactatg

SEQ ID NO: 510578 - DNA, 413 bp, Homo sapiens
  misc_feature (9)..(9): n is a, c, g, or t
  misc_feature (20)..(20): n is a, c, g, or t
  misc_feature (128)..(128): n is a, c, g, or t
  misc_feature (141)..(141): n is a, c, g, or t
gaaacacanccatgtgggtnaagccgctggccccagctctgtgcggctgtgtgaatgtgctgaaagctgaaagaacgcgaagcctgcatggctgccatcgtggtggtttttagaaattcgttcctccnctgggcgtggtgnctcatgccctgtaatcccagcactttgggaggccgaggcagatcacttgaggtcaggagttcgagaccaacctggccaacatggtgaaaccctgtctctactgaaaatacaaaaattagccagacatggtggtgcacatgtgtaatcccagctacttgggaggcggaggcaggagaatcgcttgaatgtgggaggcggagattgcagtgaactgagatcatgccactgcactccagcctgggcaacagagccaaactctcaaaaaaaaaaaa

SEQ ID NO: 510579 - DNA, 241 bp, Homo sapiens
caaactccagaagtcatagctgatcaaggtacaaatgcacttgacaaaaaaaaaaaagatgttaatgccttacagacggtactgcaggacagtacataaacaccaaaagggaacacataagcaaatcattaaaatgcaagtaaggatgtccgagcaggtcgccgaccgggccagatagatacccacggccacacgaatgatgtaggctaaactaaatcagccgtcgatcactttgcaacgt

SEQ ID NO: 510580 - DNA, 280 bp, Homo sapiens
ttgtacgcgtgtacactcggtgtcgctgtatgacgacagcagcctcacgcccttgcagataccggatgcacgtgtcgaacaactgggcgaatcacgcacctatgagaaggtcatcaacagcatccgccatggcgtgatcgaaacccgctacgccctctacccgcaacacagtggcgccgtggtgattccggcgcagaccttcagcgctaccctggtggaatcgcgaccgccccaggaaaacaccctgcagggcaccaagccgggcaagatgattcatgtc

SEQ ID NO: 510581 - DNA, 198 bp, Homo sapiens
tcaacagtgccacacaaattaaaatacttttttatatatttgtggccatttgtatatcttcttttgagaactgtctattcgtgcccttggcccactttttgataggatagtttggtttttttcttgctaatttgtttgagttccttgtaaattctggatattagtcctttgtcagatcaatgtcttagaatactttct

SEQ ID NO: 510582 - DNA, 398 bp, Homo sapiens
gagatggagtctcgctctgtcgcccaggcaagagagcagtggcagaatctcggctcactgcaagctccgcctcctgggttcacgccattctcctgcctcagcctccccagtggctgggactacaggcgcccgccacacccatctaatttttttatttttagtagagatggggttttaccatgttggccaggctggtctcaaactcctaacctcaggtgatcctcccaccttggcctcccaaagtgttgggattgcaggcgtgagccaccacacccagcctttttcatgaattttctaaaaacttaaagcaagaactttttgcttctgtgacagattagcttacatcttaccacctcaccgagaagagctataaagctggattttaaaaataatactat

SEQ ID NO: 510583 - DNA, 749 bp, Homo sapiens
gtccgccctattgttgtcttttttgggaaaacccccaaccttttatgcttgaaagacagcgggatgaacgggcaaaagccagttggttgaaatttcaagagggtataaaagaggcttccaggatatagtcagcatattcacgttcacgttcagattccattcacagagtggatttcagcttccaccgggttgcactgcttgaatcactcatccatcattggccaactcgtgatggtgaggtactgatacaagggatcaagtccttaaaaattttaacaagaataaatggatggctgggaattctgggacctggaggatcttcagtatttggaacaaatccacagattaaactggaaggtaaattaagacttcagtttgggttatttccaacttttctggggaggatgtatatccattaaagctcaggcttatagccacacgtgttactttggctaggataactcttcaagttatagtggtttaaaatccagccaaccaggtggctgtaacagccgaattagccataattcacgggctcacacaggggcaaatcgggctctcattcataccaaagcatttctgggtaatgacctccatatttagagatcaggggaacaactttagtgagcagcaaccaatccactcaaacagtcggcctggtgcttaatgcctgactttttctggtgcctacctcaggaacccccaaggtaaaacggctttatcttggaaacattggggttcacttggaa

SEQ ID NO: 510584 - DNA, 262 bp, Homo sapiens
ctggagtagtcacatgagtgtgaggacatcaacacagcatatgaaacatatcactccagtatatggtcagatacggtggtaggaataggcagagaataggaatagctaatttgctagagatgtgctgtgcatatcttgtaatttcctagctatgatcttagctcctcagtcattcattgcagaatattgaaacacattaaatttgagatccaaggcgttcctattttttatttttttttgggaccttttaaacctcccccgg

SEQ ID NO: 510585 - DNA, 870 bp, Homo sapiens
  misc_feature (1)..(1): n is a, c, g, or t
  misc_feature (59)..(59): n is a, c, g, or t
  misc_feature (815)..(815): n is a, c, g, or t
ncgccccactggtaggtagtacacggcgagccagcagagacaggtgcgcagattgttanctttcttgtcatctgcttgtatcctcgctctccttctctttgttactcgatgatcgccactgttcgtgacccccccggtttccaccctgccgttcccggccgtctaatgaaattttttgtggatagctctctcctttggggatgggccccacccccctcgggtcttccacgtgccctccctcttagtcgaggccgccaacaagctggggaacaacgcacgccccacacgtgtggtacaactgccacgcagtgtttcaaatacaaaggaaggcgtttgccttttttataggcccaccaacgggtcactccccccacctcgacaaattccttgtcaccccccccgatacatgttgtccccactcagcaccacccggttacctctctatcatccaagggcccctcaacctgccccttgtcttccgctgggagcacccacaaatgtatccttcacaatgtgtgaacagtaggcatcaagcaagttcccatcccccagatgatcgccgtccagcaaccaacacagaatcgccccattttgtgaagcctattgcagactccacattttttctaaaaaaaggaaacccctttttcccccccacgatgcacaactagggctaaccctcgtcatagaaagaaagatggcactaatgcacacggccacacaatagaaacatggtgattctgctataaaccctctgccttcctcctcctttgggacacctgcagtcgatactccccccacctagagtgcccctgtgncaaatcccctcgatcttctcccccccccaaaaacaatatccccgcccacaaaaca

SEQ ID NO: 510586 - DNA, 579 bp, Homo sapiens
  misc_feature (2)..(2): n is a, c, g, or t
  misc_feature (129)..(129): n is a, c, g, or t
  misc_feature (133)..(133): n is a, c, g, or t
  misc_feature (141)..(141): n is a, c, g, or t
  misc_feature (154)..(154): n is a, c, g, or t
  misc_feature (182)..(182): n is a, c, g, or t
  misc_feature (186)..(186): n is a, c, g, or t
  misc_feature (189)..(190): n is a, c, g, or t
  misc_feature (199)..(199): n is a, c, g, or t
  misc_feature (221)..(221): n is a, c, g, or t
  misc_feature (251)..(251): n is a, c, g, or t
  misc_feature (258)..(258): n is a, c, g, or t
  misc_feature (260)..(260): n is a, c, g, or t
  misc_feature (266)..(266): n is a, c, g, or t
  misc_feature (276)..(276): n is a, c, g, or t
  misc_feature (284)..(284): n is a, c, g, or t
  misc_feature (287)..(287): n is a, c, g, or t
  misc_feature (297)..(297): n is a, c, g, or t
  misc_feature (305)..(305): n is a, c, g, or t
  misc_feature (309)..(309): n is a, c, g, or t
  misc_feature (318)..(318): n is a, c, g, or t
  misc_feature (320)..(320): n is a, c, g, or t
  misc_feature (323)..(323): n is a, c, g, or t
  misc_feature (327)..(327): n is a, c, g, or t
  misc_feature (329)..(329): n is a, c, g, or t
  misc_feature (334)..(334): n is a, c, g, or t
  misc_feature (345)..(345): n is a, c, g, or t
  misc_feature (352)..(353): n is a, c, g, or t
  misc_feature (357)..(357): n is a, c, g, or t
  misc_feature (377)..(378): n is a, c, g, or t
  misc_feature (381)..(383): n is a, c, g, or t
  misc_feature (388)..(389): n is a, c, g, or t
  misc_feature (393)..(394): n is a, c, g, or t
  misc_feature (397)..(397): n is a, c, g, or t
  misc_feature (410)..(410): n is a, c, g, or t
  misc_feature (423)..(423): n is a, c, g, or t
  misc_feature (450)..(451): n is a, c, g, or t
  misc_feature (494)..(494): n is a, c, g, or t
  misc_feature (513)..(513): n is a, c, g, or t
  misc_feature (533)..(533): n is a, c, g, or t
gngcctttgcacatagaaatacgcttaccctacgcgagagaattcaggagaaagcatagaaaactaaaaagtctctctcttggtggtagaaaaggcgagacgacacttaggcagaattcctcgccgccncacncacgcgcngcagagtgcaggnagccaccagtgaaattttacctggctgngggnggnnatcccggcnacatcttcggggtatcccgggngggaagggcgggcggattgcatggcccgcnacttttncncccggnggggcgccangcctcccngcntttgctagcngccaccgncggngggacgccncngtntccngnaaaangcaaagcttgngaggggnnggcngccttgccccccgtggcatnnggnnncgcgnnaccnnccngggccccccggcngccgaggaaagangtggttgtcgggggagggggccggtcnngcctctgatacttctccaaatggtctggcatcataacagctantgatcctccacaagtaggnacgaggaaagacttactggnttatcacctcaaatcccagcctaatcagctccacaaagcataaggc

SEQ ID NO: 510587 - DNA, 212 bp, Homo sapiens
ctgttattgacttcaacacaccacaatactatgggtgattgtggtttgttatgctctctttcttcattcccatgtcatcgtatccctagttcctagatcatcataaacgtattacccccggatgcaatctcagattacaatatatacaccagacaaacaatgtacagccagtgaactactactagatcaactgcctattttacaccaatccc

SEQ ID NO: 510588 - DNA, 491 bp, Homo sapiens
tcgctcggtaccggcgttgcgctctgaatcctaccggaaaatgtgccgtggtctgttgttactcatgtgttatcaggcagaaagttgatccagcagttgtaaaatctgctgccattcgtcaggcagtgacgggggtgatagacaaccggctgcctttttgcagcacacgcattgacgacagcgacggcaccgcacgttattcggcaagactaagcaagcgggttttacgtacacccttcacatccaccatcatccagcgagggttttcacggcgtcgccttcggatcaaaatagtggctggaggagtcaaattgcgtgtgatccgggtaagccgtgctgacgacttctgccatgacccgcgataccgggcgcaggacaactcgaatggtaaaacagaacaccatcaccaatctgcatcgcatcccgcatgaaattcctggcctgataattcctcacgccaaaccaggggatggaagatgtagccatcacat

SEQ ID NO: 510589 - DNA, 114 bp, Homo sapiens
gaggaaaaggttggggaacagctaaataggttgttgatgagatatttggaggtggggatcaatagagggggaaatagaatgatcagtactgcgacctttcacagtcgctatgca

SEQ ID NO: 510590 - DNA, 486 bp, Homo sapiens
atcattagaagcaggccagaacaggcgggggaaaagtaaaccttttcccccacaaaaattcccccgcaaacccaaaaccagcaaaaatttcccttaaaaaaaattgccgggtttaaaaaaaaaaaactcgtgccgaattcggcacgagagagaggggagcatccattattgaaacatgtgggcttttaaaaactccatcccttaaaaaaagtcaaggtttgggccccccaaaggatattttcatcaaggaaaaatttcaactccccaagccggaaaggtgaacagaattggagcattttcaaaaaaaattcttgaacaggcaaaagaaagcctattatagaaagcaaggatttccctcatccgggaacaacagccccaggaaaacgcgggcagctaatgtactaaaaaataaaggaaactttccccaacaaaaaggaatcttttttcccccctcaagaaaaaaaacaacaaccggggaaaaaggga

SEQ ID NO: 510591 - DNA, 167 bp, Homo sapiens
gcttacatacccgacgggaaacagcagtgatcactttacaataaacgaaagtttaactaagctatactaaccccagtgttggtcaatttcgtgccagccaccgtggtcacacgattaacccaagtcaatagtttatgctgtaatagtttatgctgtaatagtttatg

SEQ ID NO: 510592 - DNA, 148 bp, Homo sapiens
tgttgacctcctgagcttgacgactcggtctcgaggtcggatcatcgggatgccgatgcgctcggctggctcgcggccacccttaggtttccagactttaaggaagagcagggagagggcgacggtgacgacggcggcgaaaatctca

SEQ ID NO: 510593 - DNA, 148 bp, Homo sapiens
tggaattaccaacgtgggcacagtctaaaaaaggagtaatgcgcaattaaattatcctctctttgaaagtcttttgaaataagagaccatgtaagtaggaccctaagacaaccaaggaatttgcttccagggccctcattcctctgct

SEQ ID NO: 510594 - DNA, 319 bp, Homo sapiens
aatgtcgcgtgcgtgtgaactcacacctgtaattccagcattttgggaggccacgggaggtggatcacttgaggtcaggagttctgagacctgcctggccaacatggcaaaaccgcatctctaaaaaaatacaaaaattagaccgtgcgcgatgcttcacacctgtattcccagcattctgggaggccgaggtgggcggatcacctgaggtcaggagttcaaaaccagccttgaccaacatggtgaaaccccgtctctactaaaaatagaaaagttaaccaggtatggtggtgcgtgcctgtcgcttgaacccgggagg

SEQ ID NO: 510595 - DNA, 359 bp, Homo sapiens
tcggtcattgatcacttactacagctgctcagaagcaccactaggaaactcagatgtgggcgccccagccagaagcagagaggggtacaggcaagctacagatgaagccccttctagatgccccagtgcagtcaagtcgatctccttaccaggtctaccaggaacaccacatatgcaatatagaaacctgtatcatagagaaggagtacaggaatagcctatccatccaaaggaaacgatgacctactcccgtagaccagtcgaggataataggggagaactaaccagtctagctaccactaaaaccatcacatccctaccagtagatagcttctagaataggtaccctgagggggtaa

SEQ ID NO: 510596 - DNA, 303 bp, Homo sapiens
  misc_feature (2)..(2): n is a, c, g, or t
  misc_feature (29)..(29): n is a, c, g, or t
tnagacacaagaatcgcttgagcctgggngatggaggctgcggtgggctgagatgatgccactgcactccagcttggactacagagtgagactccgtctcaaaaaaaaagaaagaaaaagataaaatattctccaaaagtatgtttttatgctctgtagaataacaagttttatatctaattttgaaatctaacttcagcattctttctttcacgagtctcttgaattctctattgaatcagctttgttctcctgctggctgtctcatgagtcagttaaataaatcactgacataccctcact

SEQ ID NO: 510597 - DNA, 158 bp, Homo sapiens
cacttcagtgacacctgaattgtttgtagtgtttttgttttttattggtcttcaaagaggaagggccccattaaagggtgaactgtgtaataaatgggaatttcaaataaacctcatgtactgtgtgtttataaagcaagaaaacaccaacaaaaagg

SEQ ID NO: 510598 - DNA, 885 bp, Homo sapiens
cactccaccttactaccagacaatccttagccatagaacatgttacccaaataaggtataggcgatggaaattgagcacctggcgcaattagatatagtaccgcaagggaaatgatgaaaaattataatcgagcataatatagcaaggactaacccctatacctgtctgcgatatactgaattaacctatgaagagtacacttttcgtccgaaggagaagccgaaagctaaagacccccgaaaccagacgagctacctaagaacagctaaaagagcacactccgttcggtatgctagacaagaagtaatggtggaagacgattgtgatatgcgtagcaggcgacaagacctatccgagtcctgtgttgataggctggttgttcccacgatatgaatcttagtatgcaacttttgaattgttgcccagcaggaaacccgtctaaatcgcccttggtaacattttaacctgtttagtccattagaggaacagacatctctggacaagtaggaaagaagaccctatgtagagagcagtagatagattttaaacaaccattagtaggcgctaacaaagcaagcaacaagtttaagaaagcgttgcagatgctcaacaaccgggtaactaaagagatatcccaagacatgataactgaactcctcaaacccaaatttggatcaagtctatcaccctataggaaagaactcaaggttagtataagttacatgagaagcgattctccctgccgctcaggcgctgccgtcggattagaacactgaacggacgattgaacagccaatatatacaatcaacgcaaacaagtccatgatgtacctcgacggtaaaccaaacaggagtggcatacgaaaggtccaaagagtaaggga

SEQ ID NO: 510599 - DNA, 367 bp, Homo sapiens
cctgctcagaatcaaacttatcactgtttcccttatgagactcctactgaaagaaattcagttgatactactttttaacatgggttttaagacgtggcttgttgatataatagcgcatccacttgtactcaagtgattcaaaccttgcgtcacaaggcgagtttctggagaatttagaagaatctttattgacatttaatctagagcacgtcttcaggagcaaaccagtgcaagtacaagtgtaaccaggtgccctgagtcagtcatgtgctacttgtggttcaacaccgaaacatgatactgggatgagaagtgcgcagggtacacacgtcaataataatcaaattacccaagcaccgcaccagag

SEQ ID NO: 510600 - DNA, 322 bp, Homo sapiens
ccggtttgggatgtgaggagcacctctgcccggccgcgaccccgtctgggaggtgaggagcgtctctgcccggccaccctatctgagaagtgaggagcccctccgcccagcagccgccccgtctgagaagtgaggagcccctccacccggcagccgccccgtctgggaagtgaggagcgtctccgcccggcagccgtcccgtccaggagctggactccgtcccatagatgagctgaagcaaaaggaccttcacacagaacttttatcatcagcctgaggaaaagtactcgaaggacaaggccattggttgggaacttacacc

SEQ ID NO: 510601 - DNA, 743 bp, Homo sapiens
agcgggttttcaggcacctcttgggtggcgcctggcacaacagtttcccctggaagtttcagcacagccacaatttcccctggagcaagtagaacgactggggctgcacctgccgcagaaaccacaacttccctagaaggaggtggcaccactggagcggaaataaaatcaggagccacctccggagtaccgggaagtaagacaggcacagctggagtgccctctgctacaacaattgcccctgggagctccaactcagaggccacgacttctttaggagaaagtggaaaaacaagagttgaaacaatcacaggtactactgagggtaaaactctggcagctggaagtgcccacacagaggccacaactttctcaggaggcagcgggagcacccgagcaggaccactgggtggcgcttctggtacatcaggaggatatgtccctggaagggaaacagagcccacaacttccattgaagaaactggaacttccagaactatattcaaaactgtaggcatcacttcagccccagggaggcaagcaggcacctctgtggtggcgcctagcacaacagttgcccctggaagtttcagcacagcagccacaacttctcctggagcaagtggaatgactggggttagaaccacttcaaagactacaagttgcctaggtggaactggcaccactagaactgaaataaaatcaggagccacactggagcaccaggaattaagacagatatc

SEQ ID NO: 510602 - DNA, 257 bp, Homo sapiens
tccggctagcttgcatgcaggcagactgtatagtgaagcatgacacgactgaacgcactgagtgcaaacgattctcctgtctcagcctcccgagtagctaggattacaggcacgcactaccacgcctggctaatttttctgtttttaggagtgacagggttacaacatgttggccaggctggtctggaactcctgacttcaagtaatccacctgccttggcctcccaaagtgtcagaatattttatttttttatttt

SEQ ID NO: 510603 - DNA, 1549 bp, Homo sapiens
  misc_feature (555)..(555): n is a, c, g, or t
ccgcgtgtgtgtcgtcacaaggagaatcccacgagggcccccccgttgtcgcgagaaaaagggccgcggccccccccaaacaaaggggggggagactccccccaccgcggagagagaaaaaatagtgcggttggagagcacgccgcagaggtgggtcggtctagaagaaaaaaagagattttggggggtaacaaaagaagaggggtggtggaaagcgccccccgcccctcgtgcggataaatagcgtgtccccgccagataaaattgagaagacaggatgatttgaatagtggggggacaaaagagaacccggccgcctctgctggttgccacacccccacgggggggagccccccccacatgggggagcagctcgccgcgaaagtaggtggccagatgccgtcgcgaaatagggggttttccctctcccacaacagggttttttccccctccttctgtgtttttgggaaaaagcacgcgaaagatttcctcctgctgcctaggaaagtttgtcccccccgacaagaattagcgaaccgcgaacaagagttttgncccaactatttgatgacacaaagaatagttctcccaacagcccttgcgaaattttacccctgcagagcacaataagtgtttcccacagcggcgctttaaaaaatacaccctggccccccctgagccgtaaaaacccttgttccacaccaagggccccccattgggggattcctctttattccccccccgcggagcacaccacaaacaatgggtggggtgtgcccaccatggggggtccacacacaaaaaaatgtggggcccacagaccccacacagtgagttgtggaaaaagtctcttcacactgttgtgtggacactgtctccaaagaagactgaccccccgagtgcgggtttaaactctggggcttttcgctgtctcgtgtgttgtctcgtgggtgtgtgcgtgtgtgttacactctcaataataccccccacactcacactccacagattaccgcgagaagagcctctcttgataggtctccacagccaccccacacacaggtgctctcgcccacacattcctcgcgagaagacaagattgtagatgtgagagatatctcactgtgagactctccagagagagagtgcgccacgacccacacatctgagactctgtaataagataatttggtgcacaataaaaattgaattccacacaccacgccactctggaaaaaagacacacatatagaacacaagagctctgccccacttctattcttattcctcctcccactcgagttgttcttcgcttatagagaaaggtataaaaatgtctgagaagaaggccccacgctcttgaagattgggagaacgcctcactggaggccttcactggtgaaggcccgctatgctttctggaaaaaccccctggggaccgacgacaccggtgccttaaattgaacgcacctgatgcgatatgaaccccccctcccagaatctgttttaagttccacacttccaattagtggccaataaaaaatgctatttg

SEQ ID NO: 510604 - DNA, 157 bp, Homo sapiens
cttagtattccaacatgtgaggttacagttatgtacacagtaaactatgattatctcaataatacttagaggtaggcatattatatcattgtctacaagacatttgagacttagggactaagtgaattgtccggcgttacacagcttgcaggtgatg

SEQ ID NO: 510605 - DNA, 322 bp, Homo sapiens
  misc_feature (271)..(271): n is a, c, g, or t
  misc_feature (300)..(300): n is a, c, g, or t
  misc_feature (302)..(302): n is a, c, g, or t
aatcccagcacttggaggccgaggcggtggatcacttgaggtcgggagttcgagaccagcctggccagcatggtaaaaccccttctttactaaacatgcaagaattggccgggtgtggtggtgcacgcctgtagtctcagcctccccagtggctgggtttgcaggcgtgcaccaccatgcctggctggtttttgtatctttggtggagatggggtttctccatgttggtcaggcttgtcttcgagcttccgacctcaggtggtccgcccgncttgggcttccaaaagtgcttgggtttanangcggggttccactggggctt

SEQ ID NO: 510606 - DNA, 285 bp, Homo sapiens
ggggggtgccgaccggctcccccagcccagatctcgcacctgcagcagagccggctccctgggatgcagctgccaccgtccgccgccacccaactgaccaacggcactcgcagtaccttcgcgagggagtaagtatagatgacatagtggaggggtaagagagagaagataccgagattatataataaaattataaaaatagaaactatattatatgaaaagagtaaaaaaagaaagagaaataaaattatataataagaaagatattaaagagaagaaaagaga

SEQ ID NO: 510607 - DNA, 316 bp, Homo sapiens
ttgctataacttttttcaaaattttgacttaatttcagactttttagaaaattggccaggtgtgatggctcatgcctgtaatcccagcactttgggaggccaaggtgggtaaattacttgaacccagcagttcgagacttgcctgggcaacatagtgagaccttgtctctactgaaaacaaactaaaaaaaaaattagccaaccatggtggtgcatgcctgtagtcctagctactcgggaagctgaggcaagaggatagcctgagcccaggggagttggggctgaagcctgggtgacagaggaagaccttgccttc

SEQ ID NO: 510608 - DNA, 921 bp, Homo sapiens
tgtcttcctgttgggcctgacaatcatagccagacacctgggctcgtgacgcccactcagtagctcaccaagcatgacgtggagagactaaaagcctcggtggatcgccctttcacaaatttggaatctgccttctactccatcgtgggactcagcagccttggtgctcaggtgccatggatgcaaagaagagcatgtacgctacgaatcagatctaacgcttggatcccagcgaatgtgggattcccctcttctacagcttggccaggccagcgcaggccctctcaggatgtgagatctctatttcaaatgagaccaaatgatctgtttctggcaggtgtcagtgaggactcatctgttacccagatctaccatgcagttgcgagctctaagtggcttatggccttcccttggcactcccaaagaatgcatcctcagtgccccttacgtgctcgttctcatgcgaagggagagaggactggtgcttgtgcgaatcgaggtccgagagctctaggtcagacaagcatccgcaaccgtgtccccagcaggcgtagacctgagtgagcatctgtgtgacggagattgaggaccttgttgctcgcctggatgaactcgggggcgtgtatctccgagtttgaagaaggactggaaacgtacagcgttatttgtggtgccaacatatagagctcatggatcatgtggggggactgagggcatgcgattaaggaggatcgaggtcattccacgtctgatggaaagcgatactctcagtacagaggaacttttgggttcctctttccgaaacttcaagggcctctgcgagtgctgggcgctcggataaatggtacccgtgccagttggtgggtgtgccgagggatcgggccggacatctgaaaagggcttgggggggtccccgtttgt

SEQ ID NO: 510609 - DNA, 522 bp, Homo sapiens
  misc_feature (438)..(438): n is a, c, g, or t
catatgggtcaggcgggtctctaacactggcctcaagtgatccgcccgtctcggctcgcaaagggcggggattacagatgtgagccagggcaccgggtcagaggtctggcggtgatctttttcacgggataggtcaagcacttttccacatggcctcatagtcttcattatgatcacctttaaggggcggggggaaagtcggtcaagggggctgtcccatacgttcacttaccccttaaatagtgtcatagtatatagcaagggtttcatggccagcggttttctcatccattcccagggtttccgctactacctatacaacagtgacacagatttatttttctagttctctccttcccaagcggaagatgcttcccagggaggggctgcccccagctgagccagtccagtataatcagaccttccggatggtccagncccttccttcctgagcgccatgcagggtctcctcattcacccctgttcctcagctgtggcagggtcgatatgattcacttacca

SEQ ID NO: 510610 - DNA, 546 bp, Homo sapiens
ctagcaggatcttcgctctccacccaccccagccaaggagtagtgattgtgcaaccacacctgggaaaccacacttctcccacagatctttgcaactcacctatcaggagagtcccctacatgagaccatgccaacagggccttgggtctgatacacagagctatgtggagtcacggcagagtagccacttaggtacatgcagagacccaggagttttaaatacaccagccccaggattcccagaaaggtgggaaatccatctgtatatatccctaggaagggagctgaatccagggagtcaagcagcgacgttctgtgggccccacttccacagcacctcacaagttaagaccgactggcgtggaatcccagccagccaatggcagtggattagagtccatcagagacaactctgagttcctgggggggagaggcagccaccacctctatggttcagtcaagtcagctgctctagtctgccagctatggagaatataggtggtccaaacaaggaagggacctcctccaacacagcatacctgctc

SEQ ID NO: 510611 - DNA, 588 bp, Homo sapiens
  misc_feature (413)..(413): n is a, c, g, or t
  misc_feature (509)..(509): n is a, c, g, or t
  misc_feature (538)..(538): n is a, c, g, or t
  misc_feature (541)..(541): n is a, c, g, or t
  misc_feature (568)..(568): n is a, c, g, or t
tgccctgcctgttggcagcctccatgggccaagctcttgcctctcaccatcctctccaggcccagtactgtttccagccggcctctccaggcccaactctccctctcagctgtgcctgccggcccagctcctacctcgcaaaagccacgttcggcccagctcctgcccagctcctggcagcctttgtaaaccccaggatcctctaagtcaggcctttcaggccctgcctttggctccccggtggcatggagaggcccagctcctgcctgacagcggcctctccaggcccagctcttgcctcacgttggcctccctgggccacgtttccgcctgcctcgcggcagccccgacaatcccggctcctgcctcccgatggcatctttaggctcatctcgtgcctcaccacggcctgnaccaggccacactcctgcctttcggtggcctccgcgggcctgactcctgcgtcccaatggcctctttaggcccggctcgtgcctcgccgcggcctnctgaggcccacctttgcccttctggcagnctntcaggcccaggacttcctcaagtcggnctttgccagcccagttggcc

SEQ ID NO: 510612 - DNA, 334 bp, Homo sapiens
cgtcgacgaggtcatacaggcacgtggaggccacacacactactgagcctcattttgacttgttttaaggacattacatcaaagttggatcagcgtgtagtgtagttttccactttaattttgtgtgactccaaatccagacctccatgggttgatacatttgatttccattgataatttttgtgattttgttgtcagcacattcaactatgtaaataaagtatttaataagaatatttcattttattttagtgttccctttatttgttttgagcagtgtgtgtgtgtgtgtgtgtgtgtgtgtgtgtgtgtggtcgacgcggccgcgaattta

SEQ ID NO: 510613 - DNA, 1289 bp, Homo sapiens
  misc_feature (624)..(624): n is a, c, g, or t
  misc_feature (825)..(825): n is a, c, g, or t
  misc_feature (864)..(864): n is a, c, g, or t
ttccggggcgcggtaatgtgaggaaattttgtagaaaggagggcccgaaatgtttttttgcttcctacgggccactaagttccacaaggaaacacctctggtttctgagaaaacaacgtttgtttcgccaccggggaaaaaaaagttgggtccggaagcccaaccgtgttgataacgtttttcttggagaaaaaaggggaggaaatcctgttcaccccacggggtttaattatccccgctgagaaaaagggggggcccccccccccaacggaagagggggaagaaacccccccttcgctccgcggatagggggaaaacctctcttcaacaattgtcaacacaacttgtcacaatcgttatgagagatacttttcacagccccttctttctcttcggggacgaaagagagatagacatatacatagaagaggggtctctcccggcggcgttgtttgaacacacacaaaatggtgttagcggggtgttattaacacacagagcataacggggagaatccttgtggcgttatacccgcgctgtttttcgggagaccatcaatattctgtcgataaaggtcatcacattggtacccacagcagaacacaacatgggagatataccaancggggggctttgttatacaccacactcgggggctcttccaccgtttacacacacagagtatgagaggtgtctctgtggtataaaagcgctctcacactctgtcccccccactgtcacaacacgctgttgtgtaatctcccacaggagagagatatggggtgtctctctcttttcgagaaatcctcgagaaaatttttcttntgtggggtgagaaaaaatatacacatctcgcaacagagnggtttctggagatgagagagaccacagcggtgtgtttgtcctgtgtggttcacagatatatctctcacaaggcccacagagaaagagatgagaattataatcccgttgagaaggagaaatgagcaccttgagagccttgttttctaaaattctacagcggcgctttgagattcaccgcacaagccacacacaccacaggtttagaaacacacaaggagatatatcaggagaaatttttgtgagatggtatatcttaatgtttcttgtaaaaaagggagacctgttctaagcaaggcgtgagatgagaataaagagatttaaagagagttatccctgggtaacaagagaaagaagaatgcccagatgacacttaagacctacttgtgatatttaaatgaagccattaaagacctattgatttggga

SEQ ID NO: 510614 - DNA, 604 bp, Homo sapiens
gtagtcatggtgtagctatccgtgtaaacacgacagcagtgaatctactccactagtctactagctgtatatacagtctactggagcactactgcatgacatgcaaaaggacaggattaacaggtttaatctagttcttctcccaaaagtgccaatccagcaattccaaataaggtatgaaaaggatccaccatatctacctggcctgtctgcaaatccccccgatgtcttcatacttgacatgctaaaatgaaattacgcagttactctctatcaatccaatgaagtcttccaattatcttgagggaagccaggacccaccatgagtagcatacatctggtaacttctccggccttccattgagcccgactgagggtaatagtcgttcacacaagccatcagccaagtaactcagcatatacttaatgcaactgacttgtaatagccagaaatcctgtgcaccaatagatctgaccagcatgggattcagaacctggtctgcaaccaaatccaccgtcaaagttcctacaggactaaaccaaatacgatagacatatataccaacataaaatagcatcaagctacccgacaaagccaaagtag

SEQ ID NO: 510615 - DNA, 663 bp, Homo sapiens
  misc_feature (11)..(11): n is a, c, g, or t
  misc_feature (123)..(123): n is a, c, g, or t
  misc_feature (148)..(148): n is a, c, g, or t
  misc_feature (177)..(177): n is a, c, g, or t
  misc_feature (184)..(184): n is a, c, g, or t
  misc_feature (191)..(191): n is a, c, g, or t
  misc_feature (216)..(216): n is a, c, g, or t
  misc_feature (289)..(289): n is a, c, g, or t
  misc_feature (295)..(295): n is a, c, g, or t
  misc_feature (300)..(300): n is a, c, g, or t
  misc_feature (322)..(322): n is a, c, g, or t
  misc_feature (325)..(325): n is a, c, g, or t
  misc_feature (351)..(351): n is a, c, g, or t
  misc_feature (355)..(355): n is a, c, g, or t
  misc_feature (365)..(365): n is a, c, g, or t
  misc_feature (404)..(404): n is a, c, g, or t
  misc_feature (410)..(410): n is a, c, g, or t
  misc_feature (555)..(555): n is a, c, g, or t
  misc_feature (562)..(562): n is a, c, g, or t
  misc_feature (573)..(573): n is a, c, g, or t
  misc_feature (636)..(636): n is a, c, g, or t
aaaagcaaatngattcatttcaatcaaaataactcatgtttacatatttataactgtacaataaaatatataaaatgttttcatatttcatacttcaatcatcatcttcttcctcttcatcgntgatcacatacttcttatgcttttnatttgctttatcatcatcttctgcttttntctttcnggaaggntcaccttcctcatcactggtaagtntctttgctttgagtaatctttgagctttatcttcttctgatccctcatcactgtctgatgaatagattctggntcgggnctctngggggggcccttgatggggggnttnggggggggggggggggatggggtggngggnttcctcctcngcatggtatcgatcaggttccaggtaactggggctcagnccccgntggtgctgtttctctctcattcggcgctgctgagattccctacgtatggaagccctcaaacgttcttcttctttcttaatcatttctgtgcgttggcattcaggatcacgaccagccattggcgaagattctaatcttctgtgtntttgaanacctatctgcnagtgacagagtcatctttctatgtgtggcactgtccgtagagtgaggtctgaaggtgagtttngttttaaagactgcttgtccctgtaga

SEQ ID NO: 510616 - DNA, 474 bp, Homo sapiens
  misc_feature (465)..(465): n is a, c, g, or t
ccacttaggcaccaatgtactccagggttccacctatgttgtaagccatgtgtccggaatttacttccttaagggctaagtaatctaattgtgtgtatataccacatttttgcttatcccattcatcccactgatagacacttggattgctccgatgttttagctattgtgaatattgctgctatgaatacgggtgtatagatacctcttcaaggtctgttttcaattcttgggtatatacccagaagtggatttgggaatcatctggtaattatatctttttaaactttttgagtatcttctctactactttccacagtggctgtaccattttcattcccaccaacagtatgcaaggaaaggctccaatttttccatttccttgccaacactattttctgggtagtttttgtttgttttttgtttttaatctttggagaaatgtctattcaagttttttgcccnatttttatt

SEQ ID NO: 510617 - DNA, 2211 bp, Homo sapiens
gttggtggttgcggcgtgggccgctctttcgctctctcttgctgtctgtgccgtgcttcgtctcgtccgcctgcttttctgccttgtttcgtctcccttcgtgctgctcgctcgcggcggctctgtcgttccttgtctcgctctcttcttctcttctcacctttcgctcatcctcccttcttctctcttctcgctctcgcttcgttcgccgtcctctctcgtccttccgctttctgttcttgtcgcctgctcgtctctctctggtttcttgttctctctcgtgtctgcttctcgttgcgtcctcgcctctccgccttctctctttctccctcttcctttctctcttcttctgtgctccctctgctccgtgctggtgctctcgcgtgctgctctcgcccttccttgttctgttctcgtcgtgctctctgtctccgtgtggcgtcctgcgccctgtgctctgccctgctctctcctgctctttttctggtgggcttctcgctgctgctcgtgtctgttcgtgtgtgcttcgtcgcgctcgcgtttgcgtgtctccgtcgtcatgtggtggttgtcgattgtccggtcgggtgctgtgcctcgctgcgagtgcgtccgcatctctcgtggtcctcgcctcttcccgctcctctctttcttcggtctctcgtcgtagtaccctcatctctcctgcggcttgtgctccttcctccctgtgtcgcttcgtctcgtgcttcactcgcgtccgagtcgctcgtgtgtgcgtagttctctggggcttggtgtgccgtcgcgtatgctgttgtttgtttttgttgtctttctgtgttggtttgatgtgtttgtgttgtggtttgtgtgtgggctttttgtctgggtgtgtatgttgtgtcctggcgtcgtgtgttcttggttgggctttgttttcttttgcttttttgttgttggtttgtttcgttgtgtccttgttgttttgtgttcgtctctctcttttctgttttttgtgttctttttcttgtctctgtgtgttaggttcgacaggcgtgcgcgctctctgtgcttttcttgtcgtctgtgtgagtgttcatgtgtgtggtcgagtttctgttgtccgtttcttatgctttgcccttggcgttgttgtggtgggtctgcggtttcatgtctggggtatggctccgtgcgtctgtgcgtctcgttgtcgagtgccgtctgttcatcttgccccttgcgtgtctcccgagggctgccggcgttggtcgctttggcctggttgctgggatgtgtctggtatgcttgggtgtaccatggacgtgcgggttgtgcggttgggttgcacgggtgtgtggtactcttggctggtggttgtgacaggcgttgccgttgggtgccctttgcgttcgtgcctgtgcgtttctgggcgtctctgaagtgtggttgtgtctgttttgtgctccggatggtggtcgtatcttgccccgtgcgaggcctccttgtggcgttcgtgtgtctgcctggtcctcggtgtccgtcgcgtgctgttgtcccttgctggtcgtgggttcatggtagcctcccttcgaggttgcgtcgccagttggccgagctttgcagtgcgggtggtgcactgctgccttctggggggccggttggttcggcgcaggctggtcctgtcttggttgtgtcgctaggcttcgcgatgggcgttctagccttgcgagctatgcttgggatgcccgtgggatggcgctgacctgtgcagggagtctctctgctgtggcctatctgactatcctgccgctcgagcttgcctcgggggttcgcctgcctgatgtgcattggcctgtggccatcgggctctttgggactccttcgtccaagatctggaacttaatggcacgtcacctcccatctgggccccaaggtcgcaggatgggtcccgtgccctatgccctatcactacacggccaggtgctgcagggccgtgtgcgcaagtcgccagccccgcttgccccgggtccagcggggctttgggtccgctgcctctcccacccaggtttggttcctcccggggccacccacgtgtggagataagaaggggatggaatgggggaacgaggaggagcacggaggccctcaatctttctgcatgaccctgtggttggggcatcaccccttctggagggctcggaggtcaggaggtggaaaccccag

SEQ ID NO: 510618 - DNA, 311 bp, Homo sapiens
  misc_feature (7)..(7): n is a, c, g, or t
  misc_feature (68)..(68): n is a, c, g, or t
  misc_feature (256)..(256): n is a, c, g, or t
tcagaangctttgctgatattgctgacttgaaacttaaaagaaatttgagaagcatgggtctccgaanctgcagatttctcttgtgctctctgttgcattgaaccatctgaaagctaccccttgaaagtcatcggtggaaaagcggaaatgcaacctgccactgtgcaacgcagcgcctggcaaattttttagttcattccagcaacaactttggtgccattctctcatctaccaactgggatcgcatacatatgngcagaggaatgcagtagaggttttaaagagagagccactgaattacttgcccctt

SEQ ID NO: 510619 - DNA, 973 bp, Homo sapiens
  misc_feature (750)..(750): n is a, c, g, or t
agcggggtccggacccattcgtcgcgtgccggaaccggccccgtagcgtgccatggcctgatacatctatccagctgccctcctgtggtgctgtacgatctgtgccgttaagcatgagacgcgctcattcgatctggagactagtgatgtgcggtgcagcctcctacggtgatcacagacctgatccagcatgtacgaagcatcaaagtccatggtagctgggtgcctggtgtgatgcgtcactgccgggatctgctgatttgtgcgttggggcatgccgagtaacggccacctgtctatactactgtgtggactcctccgtgtgaccgccttggagcctctaaccggagcgtgaccagaatcactcctgtactcctggaacatcctgtgttccgtgtaaactcaggctgtccccaagaatcgcaggccgttctccttgtaccgtctgattcagattgcacaagtaagaaagtcgcattttgggtaaaggcctatcttcgtaacgaaaaactgcgccttgacgggacttgaacatcccagcgaagcgaagagcgcgcgcagagctctataggattgcatagtgaactcgagaccaccgcttctttcgcaaagtggctccatacgcgaggtctacatacattgtccacgtcactgaggaagtactcgctaagatgcatcgcggcgagtgcacgtggtttcctttacaccaagagcacctttacacatatgaggaagggcagaggaatattncccccctgccgttaccttaaatttccctattgtaaacgcacaaggactcagaacgtcctttcacgcaccaaatggatgttctgctcttttgagatatctaagcgcacgtgtatcttttcagagttgctatagccttccgccatatttagcgccttaacagcccatgcggaaagaccaaagctttgtgtggtaaaggccgtttggggccttgtgaagcaacaag

SEQ ID NO: 510620 - DNA, 1278 bp, Homo sapiens
  misc_feature (160)..(160): n is a, c, g, or t
  misc_feature (304)..(304): n is a, c, g, or t
aatgcctacagttattcccccgtggacttactcgagaacaagaaagagcttatatagtgcaagctgacacgatagagaggacctgaacatcgtaaacttgctgcacaaggagaccatggggattctcgcctcactaagcccatgaggactagggtccccnttcacccatgagccctatctacaattagcgaggtggaagcggcttaatcagccagaagagttcgcgcgacctcgcaattaaagactggaaagagggaggcggcgacaaccttcgatcaacacgacgatggcttgcgactcgaantctctggatttcaatgcgcatcacttgtcacgattacagagacgcatccaagactaactatcggatgatgaggtgattaacatgatcgaattgagttaccagcaaagatcgcatgttacccacgaagagtcgacatctgtatgtagggcgcttgctcaatcgaggcgccagtaggagaatcgagcccgtgacagatacattagaggaaggcaggtgcaatggccgagatttatgagtccgggggacaagggtctcgtgaacaggcaacgcgaacggttagggctgcatgaagagtcgggccagactgtttgccacggagacagagtgacgccaactatcatgtccctggcttagctgaccaatacaagtggtagaagcgtcacaacacggccgttgcgaacagataagaaaacatcctgagagcagggctactcgatgacgtccagtaggagcagaatgatctacggaacaatgcagcttcgggagttggctcgcttaacatgggacccttcgggaaagaccgattcacgagcgatctgcaggacacgtggcagaaagctcaagagaacccacaagcgattgacaaccaccccagagcgtaccaaatgtggaaggggccggccacatagcgtcagcacggcactccaaaggcctggagaccccagacaggtccagaaaaagcgcgagatggactaacagaacccttggacccccatgatgaacagcgtgacaacacgctcccgagaccgggagcacaacgagaggcgggcaccaaaccccggtacaggcaccagacatgtctacccacaacaaacaccagaggactgaggacaccagcagagcaccagaaaatagaccgcacagaggccaaccagcgagaagaaggacaatagacgcaccaacccccaggccgactacagacgaaaagagcaccagcaaagaggcggaaccaagcaacgagacgaaaataaaaa

SEQ ID NO: 510621 - DNA, 250 bp, Homo sapiens
ggtaccgcgttgagggctgggtggctggcagcaccaggcggcgatggggcccgtcattcttcagcacacgaagtactctctccactctgccgtcttgtacaacgcacagggcgtctctcggtcacctcacaggccagcatgacacactcggaagttatggcatgcacgaacaccatgttctcgggggtccacgatacgcggggtgaactttcggggtaacccggaggcttccgaaatttcggtaaatcaa

SEQ ID NO: 510622 - DNA, 120 bp, Homo sapiens
gaaatggtatcccgaaaatttgtggccagaaaacaatatatatttgaggtgggacacccaataagagaagagacagcttggattcttagataatagaaagcaagctataacattcaggta

SEQ ID NO: 510623 - DNA, 170 bp, Homo sapiens
tttggggggggccccccccctttttttttggtttgggccccggaatttcccccccgggggggatttttcccgggggttttttgtttttgtgccccccccttttttggaacccccccctttttgggggttttcccccttttttcaaaaaatgggttttgtggggggattta

SEQ ID NO: 510624 - DNA, 378 bp, Homo sapiens
tgtctcagtaattaaatagagggctgggtgcgtcagctcatgtgtaatcccagcactttgggaagtcaggcaggtggatcacttgaggccaggagctcgagaccagcctggccaacttggtaaaaccccatctctactaaaaatacaaaaatttttacatggcgcctgtaaccccagctactccagaggctgaggcaggagaattgcttgaacccgggaggtggaggttgcagtgagccatgattgcactaccgcactctatcctgggcaacagagcaacaccctgtttggaaaaattaataaatagataataagaaaaaaaggattggttttttgtgcgtgtgtgtatatatatatttttttaagtaacagctttat

SEQ ID NO: 510625 - DNA, 246 bp, Homo sapiens
tgagagagagttcagtctgcagtcctgtgctcacagacatctgaaaagtgaatggccaagctggtctagtagatgaggctggactgacgaggggtaggcctcgcaccacattgaggatccaggccatggcacaggctgtcagtggcagagattggctgtgacctttgcccctaacacgaggaactcgctctacgggggcagacgttcctgtctcatttgccctctggtagaaagcggttatcacta

SEQ ID NO: 510626 - DNA, 911 bp, Homo sapiens
  misc_feature (35)..(35): n is a, c, g, or t
  misc_feature (42)..(43): n is a, c, g, or t
tctgtcagtaatccccggggttatgtagcgaggcntgggtgnngggcggcagttgtggtggcggagggggacagcgactcccggcccggacaggagttgttagtggcctggaacaccgtgagcaccggcctggtgccgccggctgcgctggggctggtgtcttcccggaccagcggtgcagtcccgccaaaggaagaggagctccgggcggcggtggaggttctgaggggccacgggctacactcggtcctggaggagtggttcgtggaggtgctgcagaacgatctgcaggccaacatctcccctgagttctggaatgccatctcccaatgcgagaactctgcggatgagccccagtgccttttgctactccttgacgcttttggcctgctggagagccgcctggatccctacctgcgtagcctagagctgctggagaaatggactcgcctgggcttgctgatgggcactggtgctcaggggctgcgagaagaagtccacactatgttgcgcggagtcttgttctttagcacccccagaaccttccaagagatgatccagcgtctgtatgggtgcttcttgagagtctatatgcagagtaagaggaagggggaagggggcacagacccggaactggaaggggagctggacagccggtatgcccgtcgccggtactaccggctcctgcagagcccgctgtgtgcagggtgcagcagtgacaagcaacagtgctggtgtcgccaggctctggagcagttccatcagctcagccaggtcttcacgagggtccgctggtgggagggtctgccgagtggccccacctgccaggtcccggagagtggtcgccccggcgggacaggccctcgggagccggtcggggtgcggcccaagttcaggagagcaatcggaag

SEQ ID NO: 510627 - DNA, 832 bp, Homo sapiens
gctggtgaccctgagggcgggcggagttacgcggctccccgtgcggctcctccgcggcggtgacggcgcaccgccactccccggttcccgctccccgtgctcctccgcccgggtccgccagtccgtgggcgctcccgtgcgtcggaatgatgccggccgtgtccaacgggtggacgtgcattgcggggcgctgcgctggtctctcatctctgggatatcctggagacctgctaaaagtaaatgaacgcagaacataacataagggataaacctagaggaaacctcggcaaattatcagactcaacatctcaagaggtgacaagacggtcgtctttgactgtgctagtacgctagaagaagaatagtacgctactgcgcagtgtgtcgtcttcactctcttcctaccatgtggcgcactgaccactatgatcttttgggacaccactgtgaggcctgctgaatccgtgcctttgacgtttcaaagctaagatacagcggaagaaagctagcattcgtggcgtaccccttgttcagtcctctgctggtgtgggtgaaacctcaaaaacaggtcgagcctgagtccgttcctgaattcagatagacgccagtcaacgaattgaccttgggccacgccgtggagacctcacgctatcattgggctcttggcgccgtgcagcctgcatcggcccagcatgtgggcacgctcgggaggatgtgcctgagtgccgttctgccgtgggacgatcgcctagagggtccctccgtacgcctggatggacacttatgagacatgctgttgacatgcagaagctgccggcccctggtgcgttga

SEQ ID NO: 510628 - DNA, 133 bp, Homo sapiens
gcgtcgacaaaattacctactgggtacagtgtacctaattcaggtgactggcatactaaaagtccagacttcatcattgtacaattcatccatgtaaccaaaaaccatttgtacccctaaagctattgaaagt

SEQ ID NO: 510629 - DNA, 810 bp, Homo sapiens
  misc_feature (26)..(26): n is a, c, g, or t
  misc_feature (707)..(707): n is a, c, g, or t
  misc_feature (715)..(715): n is a, c, g, or t
  misc_feature (725)..(726): n is a, c, g, or t
  misc_feature (728)..(728): n is a, c, g, or t
ggaacgagcgacaagggaaaacaacnaaaaacatacggctaggtacgaggctgggtgttaggcggcagttgtggtggcggagggggacagcgactcccggcccggacaggagttgttagtggcctggaacaccgtgagcaccggcctggtgccgccggctgcgctggggctggtgtcttcccggaccagcggtgcagtcccgccaaaggaagaggagctccgggcggcggtggaggttctgaggggccacgggctacactcggtcctggaggagtggttcgtggaggtgctgcagaacgatctgcaggccaacatctcccctgagttctggaatgccatctcccaatgcgagaactctgcggatgagccccagtgccttttgctactccttgacgcttttggcctgctggagagccgcctggatccctacctgcgtagcctagagctgctggagaaatggactcgcctgggcttgctgatgggcactggtgctcaggggctgcgagaagaagtccacactatgttgcgcggagtcttgttctttagcacccccagaaccttccaagagatgatccagcgtctgtatgggtgcttcttgagagtctatatgcagagtaagaggaagggggaagggggcacagacccggaactggaaggggagctggacagccggtatgcccgtcgccggtactaccggctcctgcaancccgttgntccaggtcanntnacagcaacatgtggtcccggtcgagcattcctatcgcaggttaccggcgctgtgacgtccgccagtttaccccctccggtcc

SEQ ID NO: 510630 - DNA, 206 bp, Homo sapiens
  misc_feature (41)..(41): n is a, c, g, or t
gagtcggcccagttctagttatacaggtttgaccctgccangcctgaattactaggaactaaacaccatgaatagccaagtaaacgccaacgttgtccacgaatccgaagcccagcgccaacacgcccgggtcaaaatcccggccaagctgcgcttcttcggcgccgaccaaacaccgatggaagtgctaagaattttggcatggg

SEQ ID NO: 510631 - DNA, 284 bp, Homo sapiens
acaccagtagcaatggtaacaaaaaccaaaattgacaacatgggatctaattaaactaaagagcttctgcattgcgaggagaaactaccatcagagtgaacaggcgacgtacagaatgggagaaaatttctgcaatctactcatctgacaaacggctaatatccagaattgccccgaagtccagaattgccccgaagtccagaattgccccgagtccagaattgccccgaagtccagaattgccccgaagtccagaattgccccgaagtccagaattgccccga

SEQ ID NO: 510632 - DNA, 482 bp, Homo sapiens
  misc_feature (261)..(262): n is a, c, g, or t
  misc_feature (351)..(352): n is a, c, g, or t
  misc_feature (397)..(397): n is a, c, g, or t
  misc_feature (465)..(465): n is a, c, g, or t
cattgttgaacttgaatctgaagaggaagtgaaattggctttgaagaacggacagagaaaccatgggacacagatacgttgaagtattcaagtctaacagtgttgaaatggattagggtgttgacagcatacatggtccgaatagccctgatactgccaacgatggcttcgtccggcttagaggactcccatttggctgtagcaaggaagagattgttcagattcttattcaagaggatatgcgaaaacttagtagcccannaatggcgatgacacatgccagtaggactttcagcgggcgtaagacacagggagacagccctatatgttgcaagattatgactatccacnnaggacgaactagctggagcacaggcccttaacagaaagcacaagngaaagaatagggcacaggtacattgagatcttcaagagtagccgagctgaagttcgaacccactatgnattccccctcggaaacg

SEQ ID NO: 510633 - DNA, 2692 bp, Homo sapiens
  misc_feature (26)..(26): n is a, c, g, or t
ggaacgagcgacaagggaaaacaacnaaaaacatacggctaggtacgaggctgggtgttaggcggcagttgtggtggcggagggggacagcgactcccggcccggacaggagttgttagtggcctggaacaccgtgagcaccggcctggtgccgccggctgcgctggggctggtgtcttcccggaccagcggtgcagtcccgccaaaggaagaggagctccgggcggcggtggaggttctgaggggccacgggctacactcggtcctggaggagtggttcgtggaggtgctgcagaacgatctgcaggccaacatctcccctgagttctggaatgccatctcccaatgcgagaactctgcggatgagccccagtgccttttgctactccttgacgcttttggcctgctggagagccgcctggatccctacctgcgtagcctagagctgctggagaaatggactcgcctgggcttgctgatgggcactggtgctcaggggctgcgagaagaagtccacactatgttgcgcggagtcttgttctttagcacccccagaaccttccaagagatgatccagcgtctgtatgggtgcttcttgagagtctatatgcagagtaagaggaagggggaagggggcacagacccggaactggaaggggagctggacagccggtatgcccgtcgccggtactaccggctcctgcagagcccgctgtgtgcagggtgcagcagtgacaagcaacagtgctggtgtcgccaggctctggagcagttccatcagctcagccaggtcttacacaggctcagtctgctggagcgggtcagtgccgaggctgtgaccaccaccctgcaccaggtgacccgggagaggatggaggaccgttgccggggcgagtacgagcgctccttcctgcgtgagttccacaagtggatcgagcgggtggtcggctggctcggcaaggtgttcctgcaggacggccccgccaggcccgcatctcccgaggccggcaacaccctgcgccgctggcgctgccacgtgcaaaggttcttctaccgcatctacgccagcctgcgcatcgaggagctcttcagcatcgtccgagacttcccagactcccggccagccatcgaggacctcaagtactgcctggagaggacggaccagaggcagcagctgctcgtgtccctcaaggctgccctggagactcggctcctgcatccaggcgtcaacacgtgtgacatcatcaccctctatatctctgccatcaaggcgctgcgcgtgctggacccttccatggtcatcctggaggtggcctgtgagcctatccgccgctacctgaggacgcgggaggacacagtgcggcagattgtggctgggctgacgggggactcggacgggacaggggacctggctgttgagctgtccaagaccgacccggcgagcctggagacaggccaggacagtgaggatgactcaggcgagccagaggactgggtcccggaccctgtggatgccgatccagggaagtcgagctccaagcggcgttcatcggacatcatcagcctgctggtcagcatctacggcagcaaggacctcttcatcaatgagtaccgctcgctgctggccgaccgcctgctgcaccagttcagcttcagccccgagcgggagatccgcaacgtggagctgctgaagctgcgctttggcgaggccccaatgcacttctgtgaagtcatgctgaaggacatggcggactcccgccgcatcaatgccaacatccgggaggaggatgagaagcggccagcagaggagcagccaccgttcggggtctacgctgtcatcctgtccagtgagttctggccgcccttcaaggacgagaagctggaggtccccgaggatatcagggcagccctggaggcttactgcaagaagtatgagcagctcaaggccatgcggaccctcagttggaagcacaccctgggcctggtgaccatggacgtggagctggccgaccgcacgctgtctgtggcggtcaccccagtacaggcggtgatcttgctgtattttcaggaccaagccagctggaccctggaggaactgagcaaggcggtgaagatgcccgtggcgctgctgcggcggcggatgtccgtgtggctgcagcagggtgtgctgcgtgaggagccccccggcaccttctctgtcattgaggaggagcggcctcaggaccgggacaacatggtgctcattgacagtgacgacgagagcgactccggcatggcctcccaggccgaccagaaggaggaggagctgctgctcttctggacgtacatccaggccatgctgaccaacctggagagcctctcactggatcgtatctacaacatgctccgcatgtttgtggtgactgggcctgcactggccgagattgacctgcaggagctgcagggctacctgcagaagaaggtgcgggaccagcagctcgtctactcggccggcgtctaccgcctgcccaagaactgcagctgacacatcgcccgcccgcccgcccgcccgccaggcgctgccctgcaggtgctctcgtcctcccgtgccagcccccgcccgcccgtgtcccagaatgcactgctgaggagcatgcccacccccacccccgcagtgtgcagattaaagcaagtcagatcatcaaaaaaaaaa

SEQ ID NO: 510634 - DNA, 2682 bp, Homo sapiens
  misc_feature (12)..(12): n is a, c, g, or t
tcgccgcgcgcngcgccgagcgaatctcggagtcggtgggtgcagatggcggcggcagttgtggtggcggagggggacagcgactcccggcccggacaggagttgttagtggcctggaacaccgtgagcaccggcctggtgccgccggctgcgctggggctggtgtcttcccggaccagcggtgcagtcccgccaaaggaagaggagctccgggcggcggtggaggttctgaggggccacgggctacactcggtcctggaggagtggttcgtggaggtgctgcagaacgatctgcaggccaacatctcccctgagttctggaatgccatctcccaatgcgagaactctgcggatgagccccagtgccttttgctactccttgacgcttttggcctgctggagagccgcctggatccctacctgcgtagcctagagctgctggagaaatggactcgcctgggcttgctgatgggcactggtgctcaggggctgcgagaagaagtccacactatgttgcgcggagtcttgttctttagcacccccagaaccttccaagagatgatccagcgtctgtatgggtgcttcttgagagtctatatgcagagtaagaggaagggggaagggggcacagacccggaactggaaggggagctggacagccggtatgcccgtcgccggtactaccggctcctgcagagcccgctgtgtgcagggtgcagcagtgacaagcaacagtgctggtgtcgccaggctctggagcagttccatcagctcagccaggtcttacacaggctcagtctgctggagcgggtcagtgccgaggctgtgaccaccaccctgcaccaggtgacccgggagaggatggaggaccgttgccggggcgagtacgagcgctccttcctgcgtgagttccacaagtggatcgagcgggtggtcggctggctcggcaaggtgttcctgcaggacggccccgccaggcccgcatctcccgaggccggcaacaccctgcgccgctggcgctgccacgtgcaaaggttcttctaccgcatctacgccagcctgcgcatcgaggagctcttcagcatcgtccgagacttcccagactcccggccagccatcgaggacctcaagtactgcctggagaggacggaccagaggcagcagctgctcgtgtccctcaaggctgccctggagactcggctcctgcatccaggcgtcaacacgtgtgacatcatcaccctctatatctctgccatcaaggcgctgcgcgtgctggacccttccatggtcatcctggaggtggcctgtgagcctatccgccgctacctgaggacgcgggaggacacagtgcggcagattgtggctgggctgacgggggactcggacgggacaggggacctggctgttgagctgtccaagaccgacccggcgagcctggagacaggccaggacagtgaggatgactcaggcgagccagaggactgggtcccggaccctgtggatgccgatccagggaagtcgagctccaagcggcgttcatcggacatcatcagcctgctggtcagcatctacggcagcaaggacctcttcatcaatgagtaccgctcgctgctggccgaccgcctgctgcaccagttcagcttcagccccgagcgggagatccgcaacgtggagctgctgaagctgcgctttggcgaggccccaatgcacttctgtgaagtcatgctgaaggacatggcggactcccgccgcatcaatgccaacatccgggaggaggatgagaagcggccagcagaggagcagccaccgttcggggtctacgctgtcatcctgtccagtgagttctggccgcccttcaaggacgagaagctggaggtccccgaggatatcagggcagccctggaggcttactgcaagaagtatgagcagctcaaggccatgcggaccctcagttggaagcacaccctgggcctggtgaccatggacgtggagctggccgaccgcacgctgtctgtggcggtcaccccagtacaggcggtgatcttgctgtattttcaggaccaagccagctggaccctggaggaactgagcaaggcggtgaagatgcccgtggcgctgctgcggcggcggatgtccgtgtggctgcagcagggtgtgctgcgtgaggagccccccggcaccttctctgtcattgaggaggagcggcctcaggaccgggacaacatggtgctcattgacagtgacgacgagagcgactccggcatggcctcccaggccgaccagaaggaggaggagctgctgctcttctggacgtacatccaggccatgctgaccaacctggagagcctctcactggatcgtatctacaacatgctccgcatgtttgtggtgactgggcctgcactggccgagattgacctgcaggagctgcagggctacctgcagaagaaggtgcgggaccagcagctcgtctactcggccggcgtctaccgcctgcccaagaactgcagctgacacatcgcccgcccgcccgcccgcccgccaggcgctgccctgcaggtgctctcgtcctcccgtgccagcccccgcccgcccgtgtcccagaatgcactgctgaggagcatgcccacccccacccccgcagtgtgcagattaaagcaagtcagatcatcaaaaaaaaaa

SEQ ID NO: 510635 - DNA, 409 bp, Homo sapiens
gcacggcctaaccgacggcatcttgaacttgggcattttgaacctgctgtctttggcagtcacatccttgtcggccaaggacaggtccccctccaactgtgcactatccagcttggctctccgagcctggacgtccacctcgacgctgggcagagacacctcgacatcggggactctcacttccaccttggggtcttttaggtccagcttggggcccttgatgtccatctgggggcccttgaggtccattttggccatcttcaaactgcgcttctccaccttgggcaagttcccttcaaggccagctccctcgggcaggtggccctccgggagcttcacatccacctggtcagcctggaccttcaggtcagtagaagcgggctgaatgctgaggtcagtggtcttcagg

SEQ ID NO: 510636 - DNA, 243 bp, Homo sapiens
  misc_feature (6)..(6): n is a, c, g, or t
accttnaccttttccctcttggggaaaaggaggggatttataggggaaaatggactttatggaaaaaattttaagaactaaaaaaaattttttttttaaaaaaggaaagggcccttaattttaccccggtaaaatactgattaaaaatttggtgaggtgatttaaggggtaaaaaaattggatccagaggtttattttttggcttcaaagcccttttaaaaaagccttttttttacatgggga

SEQ ID NO: 510637 - DNA, 2676 bp, Homo sapiens
  misc_feature (35)..(35): n is a, c, g, or t
  misc_feature (42)..(43): n is a, c, g, or t
tctgtcagtaatccccggggttatgtagcgaggcntgggtgnngggcggcagttgtggtggcggagggggacagcgactcccggcccggacaggagttgttagtggcctggaacaccgtgagcaccggcctggtgccgccggctgcgctggggctggtgtcttcccggaccagcggtgcagtcccgccaaaggaagaggagctccgggcggcggtggaggttctgaggggccacgggctacactcggtcctggaggagtggttcgtggaggtgctgcagaacgatctgcaggccaacatctcccctgagttctggaatgccatctcccaatgcgagaactctgcggatgagccccagtgccttttgctactccttgacgcttttggcctgctggagagccgcctggatccctacctgcgtagcctagagctgctggagaaatggactcgcctgggcttgctgatgggcactggtgctcaggggctgcgagaagaagtccacactatgttgcgcggagtcttgttctttagcacccccagaaccttccaagagatgatccagcgtctgtatgggtgcttcttgagagtctatatgcagagtaagaggaagggggaagggggcacagacccggaactggaaggggagctggacagccggtatgcccgtcgccggtactaccggctcctgcagagcccgctgtgtgcagggtgcagcagtgacaagcaacagtgctggtgtcgccaggctctggagcagttccatcagctcagccaggtcttacacaggctcagtctgctggagcgggtcagtgccgaggctgtgaccaccaccctgcaccaggtgacccgggagaggatggaggaccgttgccggggcgagtacgagcgctccttcctgcgtgagttccacaagtggatcgagcgggtggtcggctggctcggcaaggtgttcctgcaggacggccccgccaggcccgcatctcccgaggccggcaacaccctgcgccgctggcgctgccacgtgcaaaggttcttctaccgcatctacgccagcctgcgcatcgaggagctcttcagcatcgtccgagacttcccagactcccggccagccatcgaggacctcaagtactgcctggagaggacggaccagaggcagcagctgctcgtgtccctcaaggctgccctggagactcggctcctgcatccaggcgtcaacacgtgtgacatcatcaccctctatatctctgccatcaaggcgctgcgcgtgctggacccttccatggtcatcctggaggtggcctgtgagcctatccgccgctacctgaggacgcgggaggacacagtgcggcagattgtggctgggctgacgggggactcggacgggacaggggacctggctgttgagctgtccaagaccgacccggcgagcctggagacaggccaggacagtgaggatgactcaggcgagccagaggactgggtcccggaccctgtggatgccgatccagggaagtcgagctccaagcggcgttcatcggacatcatcagcctgctggtcagcatctacggcagcaaggacctcttcatcaatgagtaccgctcgctgctggccgaccgcctgctgcaccagttcagcttcagccccgagcgggagatccgcaacgtggagctgctgaagctgcgctttggcgaggccccaatgcacttctgtgaagtcatgctgaaggacatggcggactcccgccgcatcaatgccaacatccgggaggaggatgagaagcggccagcagaggagcagccaccgttcggggtctacgctgtcatcctgtccagtgagttctggccgcccttcaaggacgagaagctggaggtccccgaggatatcagggcagccctggaggcttactgcaagaagtatgagcagctcaaggccatgcggaccctcagttggaagcacaccctgggcctggtgaccatggacgtggagctggccgaccgcacgctgtctgtggcggtcaccccagtacaggcggtgatcttgctgtattttcaggaccaagccagctggaccctggaggaactgagcaaggcggtgaagatgcccgtggcgctgctgcggcggcggatgtccgtgtggctgcagcagggtgtgctgcgtgaggagccccccggcaccttctctgtcattgaggaggagcggcctcaggaccgggacaacatggtgctcattgacagtgacgacgagagcgactccggcatggcctcccaggccgaccagaaggaggaggagctgctgctcttctggacgtacatccaggccatgctgaccaacctggagagcctctcactggatcgtatctacaacatgctccgcatgtttgtggtgactgggcctgcactggccgagattgacctgcaggagctgcagggctacctgcagaagaaggtgcgggaccagcagctcgtctactcggccggcgtctaccgcctgcccaagaactgcagctgacacatcgcccgcccgcccgcccgcccgccaggcgctgccctgcaggtgctctcgtcctcccgtgccagcccccgcccgcccgtgtcccagaatgcactgctgaggagcatgcccacccccacccccgcagtgtgcagattaaagcaagtcagatcatcaaaaaaaaaa

SEQ ID NO: 510638 - DNA, 2673 bp, Homo sapiens
ccatgaagagtagaggcgtcacgtgtaattcatcctgtacgttggcttagttgtagtagttgcctggctacaatttacacggccggacaggagttgttagtggcctggaacaccgtgagcaccggcctggtgccgccggctgcgctggggctggtgtcttcccggaccagcggtgcagtcccgccaaaggaagaggagctccgggcggcggtggaggttctgaggggccacgggctacactcggtcctggaggagtggttcgtggaggtgctgcagaacgatctgcaggccaacatctcccctgagttctggaatgccatctcccaatgcgagaactctgcggatgagccccagtgccttttgctactccttgacgcttttggcctgctggagagccgcctggatccctacctgcgtagcctagagctgctggagaaatggactcgcctgggcttgctgatgggcactggtgctcaggggctgcgagaagaagtccacactatgttgcgcggagtcttgttctttagcacccccagaaccttccaagagatgatccagcgtctgtatgggtgcttcttgagagtctatatgcagagtaagaggaagggggaagggggcacagacccggaactggaaggggagctggacagccggtatgcccgtcgccggtactaccggctcctgcagagcccgctgtgtgcagggtgcagcagtgacaagcaacagtgctggtgtcgccaggctctggagcagttccatcagctcagccaggtcttacacaggctcagtctgctggagcgggtcagtgccgaggctgtgaccaccaccctgcaccaggtgacccgggagaggatggaggaccgttgccggggcgagtacgagcgctccttcctgcgtgagttccacaagtggatcgagcgggtggtcggctggctcggcaaggtgttcctgcaggacggccccgccaggcccgcatctcccgaggccggcaacaccctgcgccgctggcgctgccacgtgcaaaggttcttctaccgcatctacgccagcctgcgcatcgaggagctcttcagcatcgtccgagacttcccagactcccggccagccatcgaggacctcaagtactgcctggagaggacggaccagaggcagcagctgctcgtgtccctcaaggctgccctggagactcggctcctgcatccaggcgtcaacacgtgtgacatcatcaccctctatatctctgccatcaaggcgctgcgcgtgctggacccttccatggtcatcctggaggtggcctgtgagcctatccgccgctacctgaggacgcgggaggacacagtgcggcagattgtggctgggctgacgggggactcggacgggacaggggacctggctgttgagctgtccaagaccgacccggcgagcctggagacaggccaggacagtgaggatgactcaggcgagccagaggactgggtcccggaccctgtggatgccgatccagggaagtcgagctccaagcggcgttcatcggacatcatcagcctgctggtcagcatctacggcagcaaggacctcttcatcaatgagtaccgctcgctgctggccgaccgcctgctgcaccagttcagcttcagccccgagcgggagatccgcaacgtggagctgctgaagctgcgctttggcgaggccccaatgcacttctgtgaagtcatgctgaaggacatggcggactcccgccgcatcaatgccaacatccgggaggaggatgagaagcggccagcagaggagcagccaccgttcggggtctacgctgtcatcctgtccagtgagttctggccgcccttcaaggacgagaagctggaggtccccgaggatatcagggcagccctggaggcttactgcaagaagtatgagcagctcaaggccatgcggaccctcagttggaagcacaccctgggcctggtgaccatggacgtggagctggccgaccgcacgctgtctgtggcggtcaccccagtacaggcggtgatcttgctgtattttcaggaccaagccagctggaccctggaggaactgagcaaggcggtgaagatgcccgtggcgctgctgcggcggcggatgtccgtgtggctgcagcagggtgtgctgcgtgaggagccccccggcaccttctctgtcattgaggaggagcggcctcaggaccgggacaacatggtgctcattgacagtgacgacgagagcgactccggcatggcctcccaggccgaccagaaggaggaggagctgctgctcttctggacgtacatccaggccatgctgaccaacctggagagcctctcactggatcgtatctacaacatgctccgcatgtttgtggtgactgggcctgcactggccgagattgacctgcaggagctgcagggctacctgcagaagaaggtgcgggaccagcagctcgtctactcggccggcgtctaccgcctgcccaagaactgcagctgacacatcgcccgcccgcccgcccgcccgccaggcgctgccctgcaggtgctctcgtcctcccgtgccagcccccgcccgcccgtgtcccagaatgcactgctgaggagcatgcccacccccacccccgcagtgtgcagattaaagcaagtcagatcatcaaaaaaaaaa

SEQ ID NO: 510639 - DNA, 183 bp, Homo sapiens
tctttcgcgcctttcctgagcgcaccgtagtcgaactcgtggttcccgatcgcgagcgcggcgtaaggaagcgtgttgtagtacttctccacgctctcgccatggaagaggttcgactcgagcgtgccctggtacatgtcgcccgcgtcgagcatgacgaggtgatcgccgaacttgcgccgg

SEQ ID NO: 510640 - DNA, 2683 bp, Homo sapiens
  misc_feature (75)..(75): n is a, c, g, or t
  misc_feature (77)..(77): n is a, c, g, or t
  misc_feature (79)..(79): n is a, c, g, or t
  misc_feature (85)..(89): n is a, c, g, or t
ggagatatgcctaggtctgtgctgggttttatttcgtcacggggacatggctgcggtagttgtggtggcgcctcngngnaccgannnnnggcccggacaggagttgttagtggcctggaacaccgtgagcaccggcctggtgccgccggctgcgctggggctggtgtcttcccggaccagcggtgcagtcccgccaaaggaagaggagctccgggcggcggtggaggttctgaggggccacgggctacactcggtcctggaggagtggttcgtggaggtgctgcagaacgatctgcaggccaacatctcccctgagttctggaatgccatctcccaatgcgagaactctgcggatgagccccagtgccttttgctactccttgacgcttttggcctgctggagagccgcctggatccctacctgcgtagcctagagctgctggagaaatggactcgcctgggcttgctgatgggcactggtgctcaggggctgcgagaagaagtccacactatgttgcgcggagtcttgttctttagcacccccagaaccttccaagagatgatccagcgtctgtatgggtgcttcttgagagtctatatgcagagtaagaggaagggggaagggggcacagacccggaactggaaggggagctggacagccggtatgcccgtcgccggtactaccggctcctgcagagcccgctgtgtgcagggtgcagcagtgacaagcaacagtgctggtgtcgccaggctctggagcagttccatcagctcagccaggtcttacacaggctcagtctgctggagcgggtcagtgccgaggctgtgaccaccaccctgcaccaggtgacccgggagaggatggaggaccgttgccggggcgagtacgagcgctccttcctgcgtgagttccacaagtggatcgagcgggtggtcggctggctcggcaaggtgttcctgcaggacggccccgccaggcccgcatctcccgaggccggcaacaccctgcgccgctggcgctgccacgtgcaaaggttcttctaccgcatctacgccagcctgcgcatcgaggagctcttcagcatcgtccgagacttcccagactcccggccagccatcgaggacctcaagtactgcctggagaggacggaccagaggcagcagctgctcgtgtccctcaaggctgccctggagactcggctcctgcatccaggcgtcaacacgtgtgacatcatcaccctctatatctctgccatcaaggcgctgcgcgtgctggacccttccatggtcatcctggaggtggcctgtgagcctatccgccgctacctgaggacgcgggaggacacagtgcggcagattgtggctgggctgacgggggactcggacgggacaggggacctggctgttgagctgtccaagaccgacccggcgagcctggagacaggccaggacagtgaggatgactcaggcgagccagaggactgggtcccggaccctgtggatgccgatccagggaagtcgagctccaagcggcgttcatcggacatcatcagcctgctggtcagcatctacggcagcaaggacctcttcatcaatgagtaccgctcgctgctggccgaccgcctgctgcaccagttcagcttcagccccgagcgggagatccgcaacgtggagctgctgaagctgcgctttggcgaggccccaatgcacttctgtgaagtcatgctgaaggacatggcggactcccgccgcatcaatgccaacatccgggaggaggatgagaagcggccagcagaggagcagccaccgttcggggtctacgctgtcatcctgtccagtgagttctggccgcccttcaaggacgagaagctggaggtccccgaggatatcagggcagccctggaggcttactgcaagaagtatgagcagctcaaggccatgcggaccctcagttggaagcacaccctgggcctggtgaccatggacgtggagctggccgaccgcacgctgtctgtggcggtcaccccagtacaggcggtgatcttgctgtattttcaggaccaagccagctggaccctggaggaactgagcaaggcggtgaagatgcccgtggcgctgctgcggcggcggatgtccgtgtggctgcagcagggtgtgctgcgtgaggagccccccggcaccttctctgtcattgaggaggagcggcctcaggaccgggacaacatggtgctcattgacagtgacgacgagagcgactccggcatggcctcccaggccgaccagaaggaggaggagctgctgctcttctggacgtacatccaggccatgctgaccaacctggagagcctctcactggatcgtatctacaacatgctccgcatgtttgtggtgactgggcctgcactggccgagattgacctgcaggagctgcagggctacctgcagaagaaggtgcgggaccagcagctcgtctactcggccggcgtctaccgcctgcccaagaactgcagctgacacatcgcccgcccgcccgcccgcccgccaggcgctgccctgcaggtgctctcgtcctcccgtgccagcccccgcccgcccgtgtcccagaatgcactgctgaggagcatgcccacccccacccccgcagtgtgcagattaaagcaagtcagatcatcaaaaaaaaaa

SEQ ID NO: 510641 - DNA, 724 bp, Homo sapiens
tgtcgccgcgacacgcgtggagttgcgtgatgctcgtgggtacgcttactgggtgcgatcgtcggtagtgcagggtgagcgtgcggagaccgagccgatcgcaatggcgtttgccgacatgtggcctcacattcagcaattggggttcgtctcgagctacgaaggtggtcgtgtctattaatcttagttgtatatatttttgagacgagtcttgttttgtcatccaggctggagtgcaatagcacgatctcggctcactgcaacctctgcctcctgaggcaggagaattgcttgaacctgggagccagaggtagcagtgagctgagatcacgccactacactccagcctggatgacaaaacaagactctgtctaaaaaatatataaataaataaaagaaagaaaattcatagtagagagaaaccctacaaatgtgaagaatgtggcaaagcttttaatcggtcctcaagacttactcaacataagaaaattcatactagagagaaaccttacagatgtgaagaatgtgccaaagcttttacccggtcttcaagacttactcaacataagaaaattcataggatgggtgtggtggctcatgcctgtaatcccagcactttgggagtcagaggtgggcggatcacgaggtcaggagatgagaccgtcttcagcgacatggtaaaccgttagctgggggtgggggggcgtggtgggttggggggggg

SEQ ID NO: 510642 - DNA, 2928 bp, Homo sapiens
  misc_feature (26)..(26): n is a, c, g, or t
ggaacgagcgacaagggaaaacaacnaaaaacatacggctaggtacgaggctgggtgttaggcggcagttgtggtggcggagggggacagcgactcccggcccggacaggagttgttagtggcctggaacaccgtgagcaccggcctggtgccgccggctgcgctggggctggtgtcttcccggaccagcggtgcagtcccgccaaaggaagaggagctccgggcggcggtggaggttctgaggggccacgggctacactcggtcctggaggagtggttcgtggaggtgctgcagaacgatctgcaggccaacatctcccctgagttctggaatgccatctcccaatgcgagaactctgcggatgagccccagtgccttttgctactccttgacgcttttggcctgctggagagccgcctggatccctacctgcgtagcctagagctgctggagaaatggactcgcctgggcttgctgatgggcactggtgctcaggggctgcgagaagaagtccacactatgttgcgcggagtcttgttctttagcacccccagaaccttccaagagatgatccagcgtctgtatgggtgcttcttgagagtctatatgcagagtaagaggaagggggaagggggcacagacccggaactggaaggggagctggacagccggtatgcccgtcgccggtactaccggctcctgcagagcccgctgtgtgcagggtgcagcagtgacaagcaacagtgctggtgtcgccaggctctggagcagttccatcagctcagccaggtcttacacaggctcagtctgctggagcgggtcagtgccgaggctgtgaccaccaccctgcaccaggtgacccgggagaggatggaggaccgttgccggggcgagtacgagcgctccttcctgcgtgagttccacaagtggatcgagcgggtggtcggctggctcggcaaggtgttcctgcaggacggccccgccaggcccgcatctcccgaggccggcaacaccctgcgccgctggcgctgccacgtgcaaaggttcttctaccgcatctacgccagcctgcgcatcgaggagctcttcagcatcgtccgagacttcccagactcccggccagccatcgaggacctcaagtactgcctggagaggacggaccagaggcagcagctgctcgtgtccctcaaggctgccctggagactcggctcctgcatccaggcgtcaacacgtgtgacatcatcaccctctatatctctgccatcaaggcgctgcgcgtgctggacccttccatggtcatcctggaggtggcctgtgagcctatccgccgctacctgaggacgcgggaggacacagtgcggcagattgtggctgggctgacgggggactcggacgggacaggggacctggctgttgagctgtccaagaccgacccggcgagcctggagacaggccaggacagtgaggatgactcaggcgagccagaggactgggtcccggaccctgtggatgccgatccagggaagtcgagctccaagcggcgttcatcggacatcatcagcctgctggtcagcatctacggcagcaaggacctcttcatcaatgagtaccgctcgctgctggccgaccgcctgctgcaccagttcagcttcagccccgagcgggagatccgcaacgtggagctgctgaagctgcgctttggcgaggccccaatgcacttctgtgaagtcatgctgaaggacatggcggactcccgccgcatcaatgccaacatccgggaggaggatgagaagcggccagcagaggagcagccaccgttcggggtctacgctgtcatcctgtccagtgagttctggccgcccttcaaggacgagaagctggaggtccccgaggatatcagggcagccctggaggcttactgcaagaagtatgagcagctcaaggccatgcggaccctcagttggaagcacaccctgggcctggtgaccatggacgtggagctggccgaccgcacgctgtctgtggcggtcaccccagtacaggcggtgatcttgctgtattttcaggaccaaggtgagcccaccagcccctagctggcctgccccggccacacggcccagctgtgggtgaggggctgttccccagtgagggtgtggtttggggcagctgcgccagcaggcggcacccttccctttcccacgggcaaggcagggtggcccgggagccccccgacctctcggctgacgggaggcaggggaggtgcagcccgtgcccaggctgcccagcgtccccggtgactctgcacgcagccagctggaccctggaggaactgagcaaggcggtgaagatgcccgtggcgctgctgcggcggcggatgtccgtgtggctgcagcagggtgtgctgcgtgaggagccccccggcaccttctctgtcattgaggaggagcggcctcaggaccgggacaacatggtgctcattgacagtgacgacgagagcgactccggcatggcctcccaggccgaccagaaggaggaggagctgctgctcttctggacgtacatccaggccatgctgaccaacctggagagcctctcactggatcgtatctacaacatgctccgcatgtttgtggtgactgggcctgcactggccgagattgacctgcaggagctgcagggctacctgcagaagaaggtgcgggaccagcagctcgtctactcggccggcgtctaccgcctgcccaagaactgcagctgacacatcgcccgcccgcccgcccgcccgccaggcgctgccctgcaggtgctctcgtcctcccgtgccagcccccgcccgcccgtgtcccagaatgcactgctgaggagcatgcccacccccacccccgcagtgtgcagattaaagcaagtcagatcatcaaaaaaaaaa

SEQ ID NO: 510643 - DNA, 411 bp, Homo sapiens
  misc_feature (57)..(57): n is a, c, g, or t
  misc_feature (386)..(386): n is a, c, g, or t
  misc_feature (401)..(401): n is a, c, g, or t
gatgtgtaaaattccccacgatagggcaaaagcatggcccactcccacactaatgcngcccctctcactaaattaaacccttggaaaaataagatgtggccttggcctttaaaacctcagtgaactatcctttatggtacagttggtttcccatagcctgtaaacacaaaagatcctatggtttcctgccctaccccaggatagtccttgtctctagacaatgtattgatgatgcaaatgttctggaactaaatagtggtgatggtggcacaacactgtgaatgtactaaatgtcactgatttgtacgtatttaatatgaattaaatgttaaaatggtgaattatatttatgtatattttaccataataaaaatatgcattggaanatgcattttttgtgnccaaaaaaaa

SEQ ID NO: 510644 - DNA, 302 bp, Homo sapiens
  misc_feature (10)..(10): n is a, c, g, or t
  misc_feature (21)..(21): n is a, c, g, or t
  misc_feature (23)..(23): n is a, c, g, or t
  misc_feature (38)..(38): n is a, c, g, or t
  misc_feature (114)..(114): n is a, c, g, or t
  misc_feature (224)..(224): n is a, c, g, or t
  misc_feature (296)..(296): n is a, c, g, or t
aggagtcatntttcgcagccngngaccaggccctccanggagacgtactgtgctacccccgccaagtccgagagggacgtgtcgacccctccgaccgtgcttccggacaacttncccagataccccgtgggcaagttcttccaatatgacacctggaatcagtccacccagcgcctggaggggcctgctgccctcctgcgtgcccgccggggtcacgtgctcgncaaggagctcgaggcgttcagggaggccaaacgtcaccgtcccctgattgctctacccacccaagaccccgnccaggg

SEQ ID NO: 510645 - DNA, 2767 bp, Homo sapiens
  misc_feature (75)..(75): n is a, c, g, or t
  misc_feature (77)..(77): n is a, c, g, or t
  misc_feature (79)..(79): n is a, c, g, or t
  misc_feature (85)..(89): n is a, c, g, or t
ggagatatgcctaggtctgtgctgggttttatttcgtcacggggacatggctgcggtagttgtggtggcgcctcngngnaccgannnnnggcggcggcagttgtggtggcggagggggacagcgactcccggcccggacaggagttgttagtggcctggaacaccgtgagcaccggcctggtgccgccggctgcgctggggctggtgtcttcccggaccagcggtgcagtcccgccaaaggaagaggagctccgggcggcggtggaggttctgaggggccacgggctacactcggtcctggaggagtggttcgtggaggtgctgcagaacgatctgcaggccaacatctcccctgagttctggaatgccatctcccaatgcgagaactctgcggatgagccccagtgccttttgctactccttgacgcttttggcctgctggagagccgcctggatccctacctgcgtagcctagagctgctggagaaatggactcgcctgggcttgctgatgggcactggtgctcaggggctgcgagaagaagtccacactatgttgcgcggagtcttgttcttcttaaggggccccaacacccctccccccaatgaaaaactcctttagcacccccagaaccttccaagagatgatccagcgtctgtatgggtgcttcttgagagtctatatgcagagtaagaggaagggggaagggggcacagacccggaactggaaggggagctggacagccggtatgcccgtcgccggtactaccggctcctgcagagcccgctgtgtgcagggtgcagcagtgacaagcaacagtgctggtgtcgccaggctctggagcagttccatcagctcagccaggtcttacacaggctcagtctgctggagcgggtcagtgccgaggctgtgaccaccaccctgcaccaggtgacccgggagaggatggaggaccgttgccggggcgagtacgagcgctccttcctgcgtgagttccacaagtggatcgagcgggtggtcggctggctcggcaaggtgttcctgcaggacggccccgccaggcccgcatctcccgaggccggcaacaccctgcgccgctggcgctgccacgtgcaaaggttcttctaccgcatctacgccagcctgcgcatcgaggagctcttcagcatcgtccgagacttcccagactcccggccagccatcgaggacctcaagtactgcctggagaggacggaccagaggcagcagctgctcgtgtccctcaaggctgccctggagactcggctcctgcatccaggcgtcaacacgtgtgacatcatcaccctctatatctctgccatcaaggcgctgcgcgtgctggacccttccatggtcatcctggaggtggcctgtgagcctatccgccgctacctgaggacgcgggaggacacagtgcggcagattgtggctgggctgacgggggactcggacgggacaggggacctggctgttgagctgtccaagaccgacccggcgagcctggagacaggccaggacagtgaggatgactcaggcgagccagaggactgggtcccggaccctgtggatgccgatccagggaagtcgagctccaagcggcgttcatcggacatcatcagcctgctggtcagcatctacggcagcaaggacctcttcatcaatgagtaccgctcgctgctggccgaccgcctgctgcaccagttcagcttcagccccgagcgggagatccgcaacgtggagctgctgaagctgcgctttggcgaggccccaatgcacttctgtgaagtcatgctgaaggacatggcggactcccgccgcatcaatgccaacatccgggaggaggatgagaagcggccagcagaggagcagccaccgttcggggtctacgctgtcatcctgtccagtgagttctggccgcccttcaaggacgagaagctggaggtccccgaggatatcagggcagccctggaggcttactgcaagaagtatgagcagctcaaggccatgcggaccctcagttggaagcacaccctgggcctggtgaccatggacgtggagctggccgaccgcacgctgtctgtggcggtcaccccagtacaggcggtgatcttgctgtattttcaggaccaagccagctggaccctggaggaactgagcaaggcggtgaagatgcccgtggcgctgctgcggcggcggatgtccgtgtggctgcagcagggtgtgctgcgtgaggagccccccggcaccttctctgtcattgaggaggagcggcctcaggaccgggacaacatggtgctcattgacagtgacgacgagagcgactccggcatggcctcccaggccgaccagaaggaggaggagctgctgctcttctggacgtacatccaggccatgctgaccaacctggagagcctctcactggatcgtatctacaacatgctccgcatgtttgtggtgactgggcctgcactggccgagattgacctgcaggagctgcagggctacctgcagaagaaggtgcgggaccagcagctcgtctactcggccggcgtctaccgcctgcccaagaactgcagctgacacatcgcccgcccgcccgcccgcccgccaggcgctgccctgcaggtgctctcgtcctcccgtgccagcccccgcccgcccgtgtcccagaatgcactgctgaggagcatgcccacccccacccccgcagtgtgcagattaaagcaagtcagatcatcaaaaaaaaaa

SEQ ID NO: 510646 - DNA, 157 bp, Homo sapiens
  misc_feature (79)..(79): n is a, c, g, or t
ttctgattacgtagcttgtagtaagtttgaaataaggaaatgcgagatcctcaactatgtacttttggaagattctttngacgtgttcagagtcccttaagattccatgtgaatttggggatcgattttttttttgatttctgcagaaagtaccatg

SEQ ID NO: 510647 - DNA, 188 bp, Homo sapiens
ccccgtatgtatgtatgtatgtatgcatgtatgtatgtatgtatttattttgagacggagttttgctcttgttgcccaggctagagtgcaatggtgcggtctcagctcactgcaacctccacctcctgggttcaaacgattcattctcctgcctcagcctcccaactagctaggattacaggtgccca

SEQ ID NO: 510648 - DNA, 301 bp, Homo sapiens
  misc_feature (140)..(140): n is a, c, g, or t
  misc_feature (267)..(267): n is a, c, g, or t
gtcttatcacgtgcatgtggaaggatagtgctgctgtgtacaattatacaccatgatgtttctggtctataactccggaatacaggctgcgcaagatcatgtgacactacatctacaggaacaagatctgcagggcattngtggaggcacgtatcgttcgaagaattcctttccctgccgcaataaagagacacttgtccattaaagttatcaaatcccaatcccctgggaaaaggttctttccaactggcaccaacaatcgatggncctttacaatgtggccaaacatttagtttggctc

SEQ ID NO: 510649 - DNA, 553 bp, Homo sapiens
gcaagatcctgctgcacaagtcgagcattaacagggagggcacacggttacggagccggatggctgactgtatttcaattgggcatgtcaaagtccaatggcagcgtctatcggccgggactcctctcaggtgcacccgttagctgtgctgctgcatgaccgacggggacgtgcacatccgtgatgacgggcgccgggcccaccatcgtcaactgagcgacagtgacctgctgccggctggagggtgactcgcgtaccgtgcggcttgctgacaggagctgcggcgggccctgggccgcatggtggagcggaacctgcgcagcgagctggctgcacttgctccgcagcgatactatggaggagcacggtgcaagctgcgttgcgctacgtgtgcatgagcatgctgcagaggaccacgtgtggcagttttgatgtgcgcaagaccagctgacgactgagccctgcttctgctaggggctgtgtacagagtgcaaatgtctgatttaccacactaaagttctattgtatccctatgtgaaagcagtgccctcgg

SEQ ID NO: 510650 - DNA, 517 bp, Homo sapiens
gaccacctcttccggtaagtaatagtcacagggtctaacttagatactttaggttatcaattcacattcattccacgatagacctccccttctcttaggtgggtagagtaattctcagtgtgtccatttttcttatagcaaaactcattacataaactgaatggtattgtgtctcttttccccattccttcgcatacatacccccaataatttatttgaggtcagagacccctatctttctcactttagtagttacagttctaacattatacctggaacataggtccccaataactgtttcctgatttagcaaataaaattcctatccttgaatgtgttcacgcataggagcaataaatacccatctgatagacatgtatgatttcaaggacccttttcacctgggtattgactcattacaactgccttcgttctagacttagtaggtcaggtccgcttatgcttgagcacagttagattttagaccgtgacttatttaacatgatattctttcgaa

SEQ ID NO: 510651 - DNA, 141 bp, Homo sapiens
tctctcgactgaaggcatcattaaccttccagtggactcacaacttccagatgaatccttaatttgaatattctcagattaggttctttctctcgctttctcatttcatcagcctatagaactggtgaattctacaacgct

SEQ ID NO: 510652 - DNA, 156 bp, Homo sapiens
ctgctctcatctacgtaatccaaccggccagtctaatgctagtatctattctgtgcctggtcgattagggggctccaggtgtgggcatgctctcgagtcgaccagcgggacctggaagttagggacaggcggtcgtgtatccacgggaagattgag

SEQ ID NO: 510653 - DNA, 1048 bp, Homo sapiens
agttccgctgtagggaacgtgaaggcgaatgtgagggacatactcgtggatcgttgatgcatcgtgcccgcatttctaaagaggtacctccgtcagttatgaatacactctgattgaccaacgtgcattctgagggacgctacgactcgtccagtgtcagtcttccagttagcggaaccaggacatccaatgcaaaacgccacaaaccacagtgacctcatgtgcgtggataaaaattctcgacccaaaatgagtgatgcaatagaagttgacttatccgggcagagaacgtgggtcgctgagacttgagtatactttaatatcatggagactggtcttcctatatcttttgttggactggcttgcactctggtcattggcaccacatacacctaattatggtactaaagcctacgaccaatgtctcttggcgccctgatagactgtcggccgacttgattgcacgtctcctggacttttcgccttctccctctgactgaacactgtggcatatacccaggtatgttacgccgacgacgggtgacccatattttcgcttcaatttccaccctgttgatcacgagaacagtcgacctccgactgaggaccgtccgcgtccgccctttattaaggacttggtgcgtctgggactaacccgctattctaatgatgctgcgggatgcctcagcgctgcgtctaagagtaccagggacgcactagcgtcgataaaaccatccgaatcttgtctctatctgtatcaatcgttcagtccgacttaatttgtaaccgctgaatccttaaaatgttgcagactccctgaatccaagcctttgttagactaacatttctaagtgagcgcgattcatggacattgcctcataggcacgtccctcgtgatggcgggcatccgtcctcgtcacctggcgaaggaacataccaccggctgagttgccacaggcaacagaacggggccgcgccacaagactggtcacattcgggatccccgtaacggggcattctctccgagcgctgcccacgcgacccacgg

SEQ ID NO: 510654 - DNA, 215 bp, Homo sapiens
attaacaattataaaatagttttcattgatgctgcttttttcacctaaattttgaactactaagtagcacctgcgtggtctaagaaacaaaagatgaagacctagtgttttggatggaaagcaccttgtagaccattatatactacctgaagttctttttctcgatcgaaaaacaaaattacagcttaattcgtgtatctcagcattctattaaa

SEQ ID NO: 510655 - DNA, 111 bp, Homo sapiens
atcctcctgcacttcctcttaggatccttgtaattacatttgagtccacccagatagtctagaatgatctccttgggcggatgtggtggttcatacctgttatcccaggcc

SEQ ID NO: 510656 - DNA, 533 bp, Homo sapiens
acatgcagtcgggcgcggtgcatcatacctgtaatcctgcactttggcaccacttgcaagtagctgactaatagaggtcaggagatcaagaccgtcctggctaacgtggtgaaaccccatctctactaaaattccaaaaattagccgggcgtggttgtcggcgcccgtagtcccagctactcgggaggctgaggcaggagaatggcctgaacccaggaggcagagcttgcagtgagccgagatcacgccaacgcactccagcctgggcgacagagtgactccgtctcaaaaaacaaaacaaaacaaaaaaaaccaagacacggatgcctgctgcaatttacctatatggatggtagtcgtggaattactagccagtgcagaaaggcaagaaaacgatgtaaggattgaaaggaggaactaatactgccattaacttatcatggtgtaggtggaacacttttaaatcttaagaatctacaggtcagtaataagaattctgtatgctcatatgcacacatggattctgtttaccg

SEQ ID NO: 510657 - DNA, 861 bp, Homo sapiens
  misc_feature (36)..(36): n is a, c, g, or t
  misc_feature (86)..(86): n is a, c, g, or t
  misc_feature (135)..(136): n is a, c, g, or t
  misc_feature (218)..(218): n is a, c, g, or t
  misc_feature (225)..(225): n is a, c, g, or t
  misc_feature (256)..(256): n is a, c, g, or t
  misc_feature (326)..(327): n is a, c, g, or t
  misc_feature (333)..(334): n is a, c, g, or t
  misc_feature (336)..(338): n is a, c, g, or t
  misc_feature (340)..(342): n is a, c, g, or t
  misc_feature (350)..(351): n is a, c, g, or t
  misc_feature (365)..(366): n is a, c, g, or t
  misc_feature (378)..(378): n is a, c, g, or t
  misc_feature (412)..(412): n is a, c, g, or t
  misc_feature (415)..(415): n is a, c, g, or t
  misc_feature (423)..(423): n is a, c, g, or t
  misc_feature (441)..(441): n is a, c, g, or t
  misc_feature (503)..(503): n is a, c, g, or t
  misc_feature (563)..(563): n is a, c, g, or t
  misc_feature (628)..(628): n is a, c, g, or t
  misc_feature (630)..(630): n is a, c, g, or t
  misc_feature (638)..(638): n is a, c, g, or t
  misc_feature (640)..(641): n is a, c, g, or t
  misc_feature (643)..(643): n is a, c, g, or t
  misc_feature (645)..(645): n is a, c, g, or t
  misc_feature (661)..(661): n is a, c, g, or t
  misc_feature (664)..(664): n is a, c, g, or t
  misc_feature (667)..(670): n is a, c, g, or t
  misc_feature (673)..(673): n is a, c, g, or t
  misc_feature (838)..(838): n is a, c, g, or t
ggcagcgggcgaggaggctgcgagcgagccgcgaancgagcgggcggcgggcgcgcgcaccatgggggagaaacccgggaccaggntcttcaagaagtcgagccctaactgcaagctcaccgtgtacttgggcanncgggacttcgtagatcacctggacaaagtggaccctgtagatggcgtggtgcttgtggaccctgactacctgaaggaccgcnaagtgtntgtgaccctcacctgcgccttccgctatggncgtgaagacctggatgtgctgggcttgtccttccgcaaagacctgttcatcgccacctaccaagccttcnncccggnntnnnannnagcccggnncggcaaccggctgnnggggggggtggngaggaagctgggccagcatgggcaccccttcttnttnaccatacnccagaatcttccatggtncgtcacactgcagccaggcccagaggatacaggaaagggctgcggcgtagactttgagattngagccttctgtgctaaatcactagaagagaaaagcgagaaaaggaactctgtgcggcgtngtgatccgaaaggtgcagttcgccccggagaaacccggcccccagccttcagccgaaaccacacncnacttcctntnntntnaccggtccctgcaccncgnggnnnnccnggacaaggagctgtactaccatggggagcccctcaatgtaaatgtccacgtcaccaacaactccaccaagaccgtcaagaagatcaaagtctctgtgagacagtacgccgacatctgcctcttcagcaccgcccagtacaagtgtcctgtggctcaactcgaacnagatgaccaggtatctcccagct

SEQ ID NO: 510658 - DNA, 228 bp, Homo sapiens
gcttgctacgtggggaatgcttaagttaagtgggcgacagtggagtggctgggatgtatggatatgttgtctggcggcaattttgctgatggatcctgttgccattctctcgcaaagtttatggctctctgccgctgcggtcgcggcattgatattttggtatcagtggtttccctgtcctgagtggcaactgccgccggtattgcgtgcagttgtttccctcatcca

SEQ ID NO: 510659 - DNA, 140 bp, Homo sapiens
aaactgctacgatcctttctcaaatgtatccctctccgtgaaggacacatgtctgtatggacatcattgtccttagactttggcaaactacacataagtggaccttggatttcaggtatgatattggccaaacgcggagg

SEQ ID NO: 510660 - DNA, 849 bp, Homo sapiens
  misc_feature (39)..(39): n is a, c, g, or t
  misc_feature (100)..(100): n is a, c, g, or t
  misc_feature (155)..(155): n is a, c, g, or t
  misc_feature (162)..(163): n is a, c, g, or t
  misc_feature (174)..(174): n is a, c, g, or t
  misc_feature (181)..(181): n is a, c, g, or t
  misc_feature (186)..(186): n is a, c, g, or t
  misc_feature (189)..(190): n is a, c, g, or t
  misc_feature (192)..(193): n is a, c, g, or t
  misc_feature (202)..(203): n is a, c, g, or t
  misc_feature (206)..(206): n is a, c, g, or t
  misc_feature (230)..(230): n is a, c, g, or t
  misc_feature (247)..(247): n is a, c, g, or t
  misc_feature (264)..(264): n is a, c, g, or t
  misc_feature (309)..(309): n is a, c, g, or t
  misc_feature (313)..(313): n is a, c, g, or t
  misc_feature (323)..(323): n is a, c, g, or t
  misc_feature (345)..(345): n is a, c, g, or t
  misc_feature (352)..(352): n is a, c, g, or t
  misc_feature (370)..(370): n is a, c, g, or t
  misc_feature (401)..(401): n is a, c, g, or t
  misc_feature (539)..(539): n is a, c, g, or t
  misc_feature (550)..(550): n is a, c, g, or t
  misc_feature (555)..(555): n is a, c, g, or t
  misc_feature (559)..(559): n is a, c, g, or t
  misc_feature (562)..(562): n is a, c, g, or t
  misc_feature (566)..(566): n is a, c, g, or t
  misc_feature (569)..(569): n is a, c, g, or t
  misc_feature (573)..(573): n is a, c, g, or t
  misc_feature (578)..(578): n is a, c, g, or t
  misc_feature (584)..(584): n is a, c, g, or t
  misc_feature (591)..(593): n is a, c, g, or t
  misc_feature (599)..(600): n is a, c, g, or t
  misc_feature (606)..(607): n is a, c, g, or t
  misc_feature (618)..(618): n is a, c, g, or t
  misc_feature (621)..(622): n is a, c, g, or t
  misc_feature (630)..(630): n is a, c, g, or t
  misc_feature (656)..(656): n is a, c, g, or t
  misc_feature (665)..(665): n is a, c, g, or t
  misc_feature (677)..(678): n is a, c, g, or t
  misc_feature (682)..(682): n is a, c, g, or t
  misc_feature (688)..(688): n is a, c, g, or t
  misc_feature (705)..(705): n is a, c, g, or t
  misc_feature (711)..(712): n is a, c, g, or t
  misc_feature (717)..(717): n is a, c, g, or t
  misc_feature (719)..(719): n is a, c, g, or t
  misc_feature (722)..(723): n is a, c, g, or t
  misc_feature (725)..(725): n is a, c, g, or t
  misc_feature (728)..(728): n is a, c, g, or t
  misc_feature (737)..(738): n is a, c, g, or t
  misc_feature (753)..(754): n is a, c, g, or t
  misc_feature (762)..(763): n is a, c, g, or t
  misc_feature (766)..(766): n is a, c, g, or t
  misc_feature (772)..(772): n is a, c, g, or t
ctctcgctctgtcaccaaaaccctccgtccctcccagancctcgaggagtttccccttgtgtaaaccggtatcgcgtcccttccagctctgacatcctgnggttctagaatacccattgattgaaagagctgtggccaaacaggaaggacagagnaagagcnnctgacaaaggnttgtgcnaaganagnntnncaaggtcannggngagaggcttggggcagtgaaagcnctctcgggtcttggctntggaagtgtggactgtnccagcagatgggcccttgggaagccaacagggaacaattcaaggntggngagaaaaggncacctttgacccagcagaaggnagagggnggagaggagggtgaggangtacaaggagcatcgcaggcgaggaaacaanggccaggacctaactgtggtgggaactgcctttgtctccacacactcgcaatcaacatgcgtttttgctattctcaaacaactcccttccacccccttaggctgaaaggacaaactcatcagagtggaggagtacctncctgatgaagntgttnatgnttncagnatnaaantggangtttantgtctgnnnaaaagnnagtttnnaaaaggtttgnttnnctctgttnagtggattcttgactacatataggtnatatatttnaaaaaataatgnntagntatttntactttgaaatcatgantaaagnnaaacnanaannanagnaaagataanntaaggatttgtttannagaaatanntanaaaaangtttgcaggccgggcgcgatggctcacacttgttatcccagcactttgagaggccgagatgggcagatcacctgagg

SEQ ID NO: 510661 - DNA, 500 bp, Homo sapiens
  misc_feature (93)..(93): n is a, c, g, or t
attgtatctgtaacatgctattgagcagtacaataagtataaatgggatgactgggcaaaggtatgtgaaacgtcatatgtagctccttcatnggaatcaagtactgttctcaagattagaagatgtcacactctttgcattacctccctaaagaagtgcaacaccattaattttcccttatggaatcaatatggagtggaaatatgaaatgaggagatgtattagaaagcaggacaaatctacctaccattactggaattacaatgtatactctgggcccactccattgataccgatctgaggtgaggaggactaaaagcagcagcaggttacagaaagactgaataagatgatagtatgctacgtctgtctagctggggaaggggggatctggaaaaaaaatcttacgaactagaatgtagtgtcagtcagcatagctgctgaaatctacgttgtagaggtaaacctagcagagctaatacaaacaagggtaccgagc

SEQ ID NO: 510662 - DNA, 1029 bp, Homo sapiens
gggaacaagttgagtttgccggcatagacccggtcctctccatctctctcctcggtaggctgcgggaggcagaggaaggcggcaagaagatagaagagctgtttcccactccaggggtgactttttataaagaagcccaccactcttgtgactcgcacgatccctgactcgctgacgggttttcagtggggacagtggaggatccaggtcttggggagctcagtgacttgggactgattctggtagatttaataattggccttattagacaaggaaaagaaaatctatcgcagctctttagcttatagattctgatgactcgatttatcttctagctactgttggtccccaattttccataaacgtcgtcatctaagagtgtcctatgggacctggggcagggtccaagatcttcttgcaccttgccgacaggcccctcggtctcacctgcgcaagataccacgagcgccaagagaacacatggtagaccaaaagcgagaaaaatactgccgacagcccatcatgcaccacagcaactgactcatggatcgagaaccgagagcccccactaactcgactacgagtggggcatagggagaaggggaggacaccaaaggaacagggacctcgccgcaggaaatacaggcaacaccactcgaaaaagtgcgagaaccccaagaaactaacgcactaagaaatggaacatacacccgtgcagaaataagagcaaaactaaagagagaggagaacaggcgagagaacaaaagatggcagcgggcacacgggcggcagccaggcgaccccaacagacgcaactccccaagagggccatccatccaagacgaccaactgcagtgcacgagatacacagacacaccggaccgcggtacggacaagtcactcacgatgacatcgaggaacaacgagcaaaacaaacgacaaacaaacgacaacccacggcacaaaacaaaaagaacaaaacaagaccaccacagaggcacaggtagacgacacagccgcaggagcagc

SEQ ID NO: 510663 - DNA, 279 bp, Homo sapiens
  misc_feature (168)..(168): n is a, c, g, or t
gttattcaaacagaaactaccattttcaaactctaggcaggaaatcctaagtcacacagaaatagaaaggaaaggccattttcaggaggattttttgtttgtttgttttattgttgtttgagacacagcagactctgtctcaaaaccacacaccaccaccacatattngcaggcttgatggtaggtgctatatctagctactcaggaggctgaggcagacacttgcttcaccaggggtggagcttagtagctgagatcggccatgcactcagctgggcg

SEQ ID NO: 510664 - DNA, 312 bp, Homo sapiens
  misc_feature (217)..(217): n is a, c, g, or t
cgtcgtgctccactgtatcagcacttctaggaggccagtgggaggatcaactgagcccgagagttcaagatcagcctgagccaggcgcatgtggctcatgcctgtaaccccagcacttgtgggaggctgagcgcgggtggatcaccgtgaggtcaggagttcagagaccatgcctggccagcatgagagaaacccctgtctctacgtgaaaatacanaaaattagcctgtggcatggttggcagacaccttgtaatcccatgctactgtgggaggctgaggcagtgagaatttgcttgaacccggggaggcg

SEQ ID NO: 510665 - DNA, 1059 bp, Homo sapiens
gcaacaacccggagaaccctcgacccagccgcgcagcacgtgcttagaatttcagagacgtaatgtgaatattacttgtcataatctccaagaggaaactatgccaaagtcacatccatcttgagaaggcctcagaggagctgtaaggaagctgagggagacctgcgtctcaaagaggcatctccaggagagtagacacgtaaatccctaaacagactgtgactgtgatgcatgtaaaaagtgaacgagaactcagaacgagcctaaatcgggcaagcagcctcagctccattctgacgtcgaagagacaggaacttggcgtgtctttctcgacatagttctgaaatatgagaaactttcaaacacccttcctatgctgacgatacagctcagctcagaatcacttgcccaggttgtgtcactccttgctacactgatgcagtttcaccgaagaactagtctgcagtgggcaagttcaccttggttcaacggactgactgatctgcaggctcgacaagacacgcgcaacatgtctgcgccagattcaaatgcaccaaccgtcgacgtaacactgggatctccccattcactaagtaaaggcagcagagcagagtactttacgagcatgaggataagccaagtaccaccttctgctggtctacattactgtacaaaggctcagagaaacaactggatagaaaatacaacatgacgagtctagcacgcacaagccttaacaggaatcacgcctctctttccagcccagccaagggcacaagtcggctcacactctgttcctcccagccatctccggcgaggctgcctgcggcacgggatccctttgacgccccgggcaggttccacgggctggcagccatagcctcacggcatgccctgcccactggcacttccaacccctgcgagtcgaaccgcacgtacggaacccctggccctcgctaagcaccaacggacaaagcaaggcaaaaacgcctcagacaacagcgccccgcgcgctccactatcccgcgggcgggaccacacagcgacacagacacgcgc

SEQ ID NO: 510666 - DNA, 120 bp, Homo sapiens
gtggactccccaggaaatcgaaagagttgctgagagggatgagactcagttgtggacacgcacacctgtcgacgatgactgtctagagagattaaacctgccaacgcccaaaaaaaaaaa

SEQ ID NO: 510667 - DNA, 118 bp, Homo sapiens
gcccagccttgatctcaaactcctgggcctcaggttgatcctccgaagtcagcctccccaaggggcggggattacaggcatgtgccaccaggcgggccaattttaaaaaattttctgg

SEQ ID NO: 510668 - DNA, 112 bp, Homo sapiens
tctagaggatcccggcaaacttcgtccattgcgatttctcgtatggtcgttcggcgtgtgcagcaacaacttcgtccatagcgatctgtatggaccttcggcgtgtgcagga

SEQ ID NO: 510669 - DNA, 752 bp, Homo sapiens
atgaattattaacccaatatgtcatagattgatgaggctgaattcctcttgaattaattgaaatagcttccttcacatcctctgtgatgatcatgttctatttagctgataagaattcaatacctagaaactggcacctatctcatgatggtacctattaaatatcttgccattgaaatgatgtggtgatgcatgcctataagttttaagctacgttgagagagaggtggtctagtagtcccaggtggggttcctagacactagcttagactaacgatagcaacagacccccatcttcgaaaaattcatgtgcgcaagatactaaaacaagattaaagcatgttgtagtaagttaacttcgttggaatacagtcgagcttatttcgtaataatcggaaatgttggtccgcgcgtgcgatgtgaggtcttatgcgctgtttttccaacgacatggttttggctggtgggggtgtgcaagtgtcctttgatgtcactatttcgaaaccagcccagccaacatggtgaaaccccgtgctctactaacaatacaaaacacttagactgggtgctggtgatgtgcacctgtaatcccaggctacttgggaggctgaagcaggagaattcacttgaacctgggaggtggaggttgctttgagccagattgcaccatgaacctccattgcctgggtcgacaggttgcgaccgctgtcaccactgaggttcgttgactttttgccaatacacttacaagg

SEQ ID NO: 510670 - DNA, 1499 bp, Homo sapiens
taaaaattttttttttttccatttttggaaaaaatagggtccccccttttgccccgggggggttttaaccccgcttggccctcaagcccttcttctccgccctcggccctccccaagagctgtctgagaattctacgcggccctgaagactgccatgtagtggccatagtaattgtgtgcttaagagcccgcacacagagagcggtgatagtctcacagcgtgcctaaacattccgcgagtctttaagagagggtggagagtctccacttttgtgcacactctctgtgcgccctctctgtgttgtcgccccaacatttgtcgcgagggctccacagtgtgttctccccagtgtgtgcctcccgaggtgttacacccctgtgaacagtgtgcgggagctcccccacaccctcttttctctgtgtgtgacggcgcaccccgaggcgccgagagattctcccccacctgtgagagcggccaagaagagtaaccccctgtgaggaaaccaaactctcctgtgatggggccctctctctatcgtgtgggggaggttctcccgacgaaaaaaaccaccgctgttggggggggcgtctccccccccggcgtgttgtgttgctaccacacacaaacggggggtgtggtcttcttgtgcgagaggcctccatcttattaacacaggaggcggagagtactacaagagagagtcttccaaccacagaggagagacccgacctatgctcgcccacaacaaaagaggagtaaacacgctccccgtagaagagaactagcagctccaggcgcctcggtagagacacacacttcttttcttctaccaagaagcaggaggtggttgattctcatagtcgcggcgcggcggcggagagaagatctaccatcccccgcggagggaccccccccgcagagatgattattaccccgcccccacgaaagaagaaagaagcataggttatctcttcttcgatcgcagaacgagcgacaaaccaacagccgcgcagagtatgttgatcccagaaggaggagagggccctcatccaccattataaaaagaacaccccgccggagagataaatatgagcggacgcgaggaaaaaaacacctctatcgtagcaataggaggagcccttcgtggagcggcattatagcacaaccccaccttctgtttgcgcggaggaaaaacaattttgagggggagggtgaacactcatcccccccgcggacaacacccactcgtcgtgatgacaagaggaggcgcaccccccctcgatgattgaaacacgagtagtgtgtgacgccacaacaaaacacaacaacggacgcgtcatgactccacaacagcgagtagtatgtctccacgtgctacatcaacaacgaaggggcgggcccccccccgcgggtcgtaaaatacttgataccccgctggtgcagcccacctcctcttcacccaccgaatgaagacgggagagcacgacaaacaaaacgg

SEQ ID NO: 510671 - DNA, 1571 bp, Homo sapiens
  misc_feature (237)..(237): n is a, c, g, or t
  misc_feature (355)..(355): n is a, c, g, or t
gttcaaacccctattgagtgcaggagccgacaattccagtagctctcttcaaggtcgctattggccatggtgaatggacggatggaagtgatgaatgacaggcgagttgactctgtgcggtagatagcaggaaagctgcatccaatccgtcgcgatccaccacgagtccgcgtcgcgtgctcggcgtccggtcgtccgcttagcctctgcgaatcgtcactcacgcaattatcttgntgagccctgtctcctgccccatggagaacgaatcactgcgaactctggaatgatcttgccacatcaatggcacggaagtacacgtggcagtaaaggcaggtccaggtgtccgatgtgnagagacagatgtgtcctgtagaggcgcctcaggagacccaggcagaagcgtcagtccttgagccgcatggctttgtgtcttgtcgtggagcatgtggttggtccttcgattctctggggctctcgcgcatgccatggcctgtgccgttgctcgtccttatcgcctagtccgctgcaggtctgaaagatagacccgtgtgtactgtgtccgtcgtagtttgcacgtaggcacagacacgcagcacccatccccttgtgtattcgcatgaccaattgacggaggcaattagcttgaagggttccttgtgtgacaagcagatgtggtgcgaacggatcactgggttagggacaatgcgagtgcggaagaacttgcttcatctagaggagtgcatatacgagtaacgtacgcctcgtgtacatcaagtccgcgttaaaagtaaatagaggcgagggtgcacagcaatcgtgtaggacggttgacttgtagggacagagacgcgagaaggatctaggccgtcctgtgatcactctaacccatggggaggtactcgcaccccattgacactctgggaattggtacattcgcatcacccaactttatgttcgtcgacacccatatggttgagctcgatcgggacttccgtagagcagactatagaggtcgagatttggaacgcggaatacacaagggccgagtggcgaaacattcctttatagagagtttttcagcgaggtgtgcgctgggcaacggaacaaattgggcccaatggtaacaggctttcgaaagggaattcgaaaccggacataggagaaacgacaacggttccccacattgggtaccacacgggcggccacttagaacacacatactgtgatacacctagaacccaaggaacaatcccggtgaccagactaactccaatgttacacagttaacgatagcagagcacatagaagcaacagttacaagacatctatagagacccgattgatttaaacccacaaataggggagaacatctaagcagcaaaatggtgtccagcgagagatataggacaacatacaaaaatcgatatccagcacccggatcataataacgcagaacgatagaacagaacatctagggcaaaacacaaatcaggcgacgatacaactaactaactaatgacagagaaacaaagacatattagacacgacatcagtagtacaacacagct

SEQ ID NO: 510672 - DNA, 422 bp, Homo sapiens
agtgctgtgctggcgctctagaggtccccagggtgcagcaataattaaaatcattggaacaaaaaaaaaaagggcactcggattaaacggcattacagccggcaggacacctggggccagctgggttttactctagaatttcactggtcgtcccaccccacctcttccaccccacttcttccttcaccaacaggcaagttctttccttcccggccagccagatagatagacagaggggaaaggcaggcgcggccttcgtggtcagtagtccttggatgtgaagggggcagcacagtcatttaacctggatccaacctcttggcatcttacaaagttaaccagctaaaagaagtaaaataagaaggcaaggctggtgggaatggtacaggggcatatgggctggcacccgggggtaccgagct

SEQ ID NO: 510673 - DNA, 916 bp, Homo sapiens
  misc_feature (49)..(49): n is a, c, g, or t
  misc_feature (61)..(61): n is a, c, g, or t
  misc_feature (64)..(64): n is a, c, g, or t
  misc_feature (68)..(69): n is a, c, g, or t
  misc_feature (72)..(73): n is a, c, g, or t
  misc_feature (76)..(76): n is a, c, g, or t
  misc_feature (80)..(81): n is a, c, g, or t
  misc_feature (89)..(89): n is a, c, g, or t
  misc_feature (93)..(93): n is a, c, g, or t
  misc_feature (101)..(101): n is a, c, g, or t
  misc_feature (107)..(107): n is a, c, g, or t
  misc_feature (117)..(117): n is a, c, g, or t
  misc_feature (134)..(134): n is a, c, g, or t
  misc_feature (149)..(149): n is a, c, g, or t
  misc_feature (155)..(155): n is a, c, g, or t
  misc_feature (167)..(167): n is a, c, g, or t
  misc_feature (229)..(229): n is a, c, g, or t
  misc_feature (257)..(257): n is a, c, g, or t
  misc_feature (313)..(313): n is a, c, g, or t
  misc_feature (409)..(409): n is a, c, g, or t
  misc_feature (420)..(420): n is a, c, g, or t
  misc_feature (437)..(437): n is a, c, g, or t
  misc_feature (447)..(450): n is a, c, g, or t
  misc_feature (456)..(456): n is a, c, g, or t
  misc_feature (460)..(460): n is a, c, g, or t
  misc_feature (471)..(471): n is a, c, g, or t
  misc_feature (478)..(478): n is a, c, g, or t
  misc_feature (487)..(487): n is a, c, g, or t
  misc_feature (554)..(554): n is a, c, g, or t
  misc_feature (577)..(577): n is a, c, g, or t
  misc_feature (581)..(582): n is a, c, g, or t
  misc_feature (589)..(589): n is a, c, g, or t
  misc_feature (594)..(594): n is a, c, g, or t
  misc_feature (607)..(607): n is a, c, g, or t
  misc_feature (620)..(620): n is a, c, g, or t
  misc_feature (634)..(634): n is a, c, g, or t
  misc_feature (654)..(654): n is a, c, g, or t
  misc_feature (657)..(657): n is a, c, g, or t
  misc_feature (671)..(671): n is a, c, g, or t
  misc_feature (697)..(697): n is a, c, g, or t
  misc_feature (801)..(801): n is a, c, g, or t
  misc_feature (841)..(842): n is a, c, g, or t
  misc_feature (851)..(851): n is a, c, g, or t
  misc_feature (899)..(899): n is a, c, g, or t
ttcatttcaggttagttttgtcggtttcttgtaaatcttttgataatcncataaaactcangcntctnnganntgnatgnntgcttatntgtntagatatngctggnaggggaatantttgggggtttgggggngtaggcgagagggtngagagnggagccaaatgngaattcctcatgtcaaaagcactttaatgccctatcctccttcaatcaagagatcaaaaganacggcaagtcctgtacttacaaaaccgntgaaaatcacactgtaataatcagtgaatgtagaactgcacagatctgtgtttccncctttttccaccatgattctacatcaaggtaaaaaaagattcttttatacaaatccaagaagaatgtggacagaggtggcagcaaaacgtcaaggntggtgcacggncttacgactgcagctgngacagggcgnnnncggggngggncgggtcctcgngaaaganccctacggngagggtggctcagtcagtggtcgatttccggtaccaaaaccgcgctctgaggtcatcgctgcacgtnatgaacccggggttggtgggggngtgnnctttgcngcgtncaattttgttgtntcctaacgatagntggttttttcgctnggctgtccttgagttccagnagnaaagattgatggtnctgttgtcggggagggagagatagtnctcggtgtggttaaacacagcctgtgtccggtgcacctggcgtccacttaaacccgcgcccgtgtatctgaccagtgttcgtcccgttgatatttcccaaagtntagctacagagtcttttccacttgagagaatgtatttagnntttttggcnaaaatggcagaacaaacttcagcaccgtcatgtgctttctcaaaagtngtgatgcatcgatttga

SEQ ID NO: 510674 - DNA, 676 bp, Homo sapiens
  misc_feature (461)..(461): n is a, c, g, or t
  misc_feature (486)..(486): n is a, c, g, or t
  misc_feature (492)..(492): n is a, c, g, or t
  misc_feature (503)..(503): n is a, c, g, or t
  misc_feature (509)..(509): n is a, c, g, or t
  misc_feature (514)..(514): n is a, c, g, or t
  misc_feature (521)..(521): n is a, c, g, or t
  misc_feature (534)..(534): n is a, c, g, or t
  misc_feature (543)..(543): n is a, c, g, or t
  misc_feature (551)..(551): n is a, c, g, or t
  misc_feature (564)..(564): n is a, c, g, or t
  misc_feature (619)..(619): n is a, c, g, or t
  misc_feature (627)..(627): n is a, c, g, or t
  misc_feature (645)..(645): n is a, c, g, or t
  misc_feature (662)..(662): n is a, c, g, or t
tagcaacgagcctgtctgtaactgagtccctacatttaataataataaaaggagggccttttagtttctttagttgagagtttcaaagtatgtgtgtgttatattttttcacttgggattgatacattgaatgctttttctaacattgagggagaaattattttctttaagcctttggtgattactatagaactttttttaaaaatttatttaaaatttttttgaaagctaatgtactgttaacaaaattgtttttaaaaaattgtttcttatgtataggattctcaaatggtagtagactccttcaagtctggctttgaacctccaggagactttccatttgaagattacagtcagcacatttacagaaccatttctgacgggaccatcagtgcagccaaacaggagagtggcaagatggattcccagtccacagtggggaaggcccagggcaagctgtngctctttggaaagaagccaaaggtnaaaccnttaaaatcccntatgcnaatcnaactctncttagtaagttgnaaagacgtngatggtanaaatttttgccgnttgagggtaatgccctccgctgaatggtccattaatcttccctattggaaacgtntgtcctgngccttataagtggggatntaccggtttataccagnaattcagttttcca

SEQ ID NO: 510675 - DNA, 242 bp, Homo sapiens
tatctatactgaccctctctggtcatagaggtaggaaactatagctgtcccaactaaatgtcaggacgaattagcccagctggtcacgctcacagtcaccgcctccaccagaactgatgcggacccctgggaactgaggtgtttgctctgtgacttgggaaggacagcggaaggtatttccgtttagctcttgtggtcagatttttttgtgaatgaaaatctgctgtgcgtcagtatagata

SEQ ID NO: 510676 - DNA, 106 bp, Homo sapiens
gggaggttggggattgtgggacaaggtcccttggtgttgatggcatgaaggggcctgagctgtgggcagatgcagttttttgtgggcttggggaacctctcacgtt

SEQ ID NO: 510677 - DNA, 252 bp, Homo sapiens
tataccacggaacagttcatcatcgggaaacacagttgatcctccaacagatatcgtgctgtatgatttcagaggcttactagtatttaactttcatggatagataactgtttactatgagatttgtcattagagtcgtaaaatataactctcttttggaataacacattagaataaattataatttttcacatacaataaaaaatgcttagaatatatcaaatgataaacacaatatactatagatagcat

SEQ ID NO: 510678 - DNA, 425 bp, Homo sapiens
ggaacgtttgaaatgcatcccttcccccaacccccaaaaaaacacacaacacagtggtgtttctgttcagactgtcctctgagaggcagtgtgctccgtatggcaggagcaaagctttgtggttttaccatacttagtttgtagcatatgtctgtgccaaatgcatattattttcgaggcttttgcagtcaaatataataaggcaatacacataaatgcacaaaactacgcaagttgttatcactttgagagaattctaaactacagaaatttgaatattttattataaaagagagtaattgaactataagcatatcatgaaaatgaagttatttagtttgcaaaatgtattatggtattctaagcagtgagttcctctccatataaatacatgatttatttaaaaggtaatatgtagacttttg

SEQ ID NO: 510679 - DNA, 216 bp, Homo sapiens
tttaacccccctaaaaaaattttgtcccccctgggggaagaaccaaaactcttgggaaaatttttagtcccccaaaaacaggggtcccccaaaaatgcaaagttgggatctcccttccaaagttttttgttcctgaggaaataaatttaaagaaaaaaaggggtttttttttaaagttggaaaaaaaacccgattaaaaagtttttccctgtttta

SEQ ID NO: 510680 - DNA, 954 bp, Homo sapiens
gtgcgaggtgcgatcatggctcactgcaaccttcgactactgggctcaagtgatcctcccacctcatctgggaaataggtgcacactaccacactgggctaattttttttttttttttttttttaaaagagacggcggtctgtcccccgggctgaattgccctgggtgtgacctttgactcacgggagcctaaaccccgtgtgggctcacgttgatccttcccaatttcagtctcctgtgagttagcgtcggaccccacggcgcttttgccaccatgtggcccggggtaattttttttttttttaacacaggaggtctcgcttgtgtcgccagggtggggtcgcgggggagggaagacccacagcgactcagtggagaaccccgggccctccggggggtaacaaacgaaggttctctcgggccatacacgcccccgagaggggggggaaatcggcggtgtggccccgccaccatatggccaaggggggatgtgggtgtgtcggggggagacgcggcggtcccatggggtgggcagggggatggtcgcaaaactctttagcccgctagggtagaggaccgggatgaatacgggtggttccggggaaaaacacgccggctctaaaaaatgggcggttcacagaggaagtggtccacggaaacagactcggggcgcaaggagaccaccagaggtggacccctgagaggggcgggggattcacggtttgaagccattattggccgaccggagggttcacactcgggaagcgctggggggtcgcgccggtgctcaaccctgtgcatagaggtctcaacttgggcccagccggtccggggacacccaggggcccccattaagatggttggccgaaaaagacgcaggaatacagggggagaaaactgactgcgcgaaagggacaaacacaggtcgggaaaaaacgccctcgcggtgtcggg

SEQ ID NO: 510681 - DNA, 258 bp, Homo sapiens
tgtacttgtggtcacagcaccttcagtgcatccgcgtcgctcaacgacgctacgctgtacacgcagctactacagtcatggaagctgctgcttctatcgacctgaacggattgggacggttgactagcatgctcctagtactgacgttcgtggattgggaatgcccttgcgcgatcctgatcactgactcttggtcaacctttttttttttttttttttcctttaaaaaacttccagttaaccagtttctggaataca

SEQ ID NO: 510682 - DNA, 312 bp, Homo sapiens
aatcttcaagactggtggggacaggggcgattgcttcaggtggtggggatagaggcgtcgtcaggtgcatgagatgggtgtgagtcttccggtggggacgagggcgattccgtccagtgagataagaaggtgatgattcaggtgggggaagacagaggagactcctcaggcggcggagagaggggcgattcctccagcggccgggacaggtgcaatgcctcaggaagtggggatgcgggcaattcctcaggtggtggtgacaggcgtgatgcctcaggtggtggggacgtgggtcctaagttcagagccagg

SEQ ID NO: 510683 - DNA, 488 bp, Homo sapiens
  misc_feature (57)..(57): n is a, c, g, or t
  misc_feature (75)..(75): n is a, c, g, or t
  misc_feature (108)..(108): n is a, c, g, or t
  misc_feature (122)..(122): n is a, c, g, or t
  misc_feature (320)..(320): n is a, c, g, or t
  misc_feature (337)..(337): n is a, c, g, or t
  misc_feature (345)..(345): n is a, c, g, or t
  misc_feature (400)..(400): n is a, c, g, or t
  misc_feature (416)..(416): n is a, c, g, or t
  misc_feature (458)..(458): n is a, c, g, or t
  misc_feature (488)..(488): n is a, c, g, or t
gtggctgcttctaccagcatctgttggtgctgtgttgccaatccaccaagaagctancaatcgaggaggcgaggncgggtggctgcggcctcagtgactactacatgncgtgggcatgtgcnggcagggccaacaactcccacgtggggatttgaagccgcgccgcagtgcgcgcggagatgagcccctaccaacattagatgccactgtacgagccacgagaagggaaagcaagcggcctcggccccgcacagcccaggattaaatgtatgcgccagggcgccctcctggctacctcgcgtggtggccccgagcggccncggaggccgcgccgtantcctgggngaaggcgtctctcaatcgctcagcgcggcggcacagggagcccacgggcccagcngcgaggacctgcaggnggcgggccgcgtcctggccccgcagctgggcctgcagcagtncgaaggccgtgagcggcgccgcacgtaggn

SEQ ID NO: 510684 - DNA, 411 bp, Homo sapiens
tcctttagttttctttacccagtaagtgtattttgccttcatctaaatgttttacatttatagttcttaactcttgtaattagatgataatcttaagaatacattgctggctaaaacctgtactttaacaaatgtagtttttaagttttatgtgtcttgagtgttttgcctcactctgtatctgtgtgtcatgtgcatacagtgcccacggaggccacatgcagctctcagatcccctgggacttgactttcagatggttgtgagctgctatgtctatgctgggaactaaacatggtcttccgtactgctgtgtcatctctccagcctcctaaaggcatgcttattaaatgtaatgcttatgaggaagtttaaccttgtatggttaaagaattaaaattatagttttgtta

SEQ ID NO: 510685 - DNA, 238 bp, Homo sapiens
  misc_feature (108)..(108): n is a, c, g, or t
aggatccgacacatagaagtgtcatgcagactcgctcaggcataagtatgtgacgtttgcatcactgctcacagcctgctagatttgtatgatgctgaattatatgcngactaattccacccagttgagacacacatgctgtcacttgtattatagaactgtggatcttgcccgtgctgtccttgtattactttaagactgatcacttatcattcattccatatctaatgggttgtcg

SEQ ID NO: 510686 - DNA, 126 bp, Homo sapiens
gggttgatttttaggttagaactggaataaagagctagcactgtttattactaggcctactcatggtaacaaatcagtgtgagcttagcgcagtgttcattgtgcctgcaatgatggtagtgtaga

SEQ ID NO: 510687 - DNA, 136 bp, Homo sapiens
tgcaggtacgactttagagtatccctgtactctgatctagtaccattggcggccaattgatttgatgtaagtttatagatcgttgacctcgtccgttatgtaaaggatgcgtagggatggtagggcgatgaggact

SEQ ID NO: 510688 - DNA, 314 bp, Homo sapiens
  misc_feature (1)..(1): n is a, c, g, or t
  misc_feature (64)..(64): n is a, c, g, or t
  misc_feature (66)..(66): n is a, c, g, or t
  misc_feature (69)..(70): n is a, c, g, or t
  misc_feature (74)..(74): n is a, c, g, or t
  misc_feature (86)..(86): n is a, c, g, or t
  misc_feature (92)..(94): n is a, c, g, or t
  misc_feature (105)..(105): n is a, c, g, or t
  misc_feature (107)..(107): n is a, c, g, or t
  misc_feature (113)..(114): n is a, c, g, or t
  misc_feature (118)..(120): n is a, c, g, or t
  misc_feature (311)..(311): n is a, c, g, or t
nggggggggggctgggggggggggggggggggggcgggggggggggggggggggggggggaatnanttnnggancccatcccatangggctnnngggtccggganancaaaanngacnnnttacttcccctgtgggtaggtgccacagaatgaagagtaaagcaataaaatgcatattcagtgcatgtgaagtagaagggtatatatcctatatatattgttaagtttagcctaaagtctctttacatatctcaagttcagcttaaaggtttctcagtacatagaactgtagcctaactggacgtgtaaanaga

SEQ ID NO: 510689 - DNA, 107 bp, Homo sapiens
agcgactctagaggaccgagaagagacagaggacagtgctcttcaggagtggtgcagcaggggctagaagtcactctgacagtatattatactatgcaatatggata

SEQ ID NO: 510690 - DNA, 370 bp, Homo sapiens
aacatgtgttacataagcacatagtgagtactcgaatcaacctcggactctccgggcgtgaggggtgggtgaggggaccggcaggtggtcacagccccatcaaaagggagttggggctgggggatgtcgcggtcaactgggaaaggagagccaatcagcaagtggcgcgtcccacgccgtctgtcaaatgcatctgggggttagctgtactcatacatcttgtgggtgactaggtgacttccgtgttcaagacacaagcgagctaagcctgggatttcagtttgcacagcgctttgttaagttttgtctctcaatcttgctgtccaagagcgaacctggaggtcgtctgttagcggtaaattctttaccc

SEQ ID NO: 510691 - DNA, 148 bp, Homo sapiens
  misc_feature (148)..(148): n is a, c, g, or t
gacctttacataaagactcaatcatcacatgagtgtggcaaagaactgagcagccagtggtgttctcatacctgtgctacaattctggtaataattccagctccagctcttcagacagtgccctgtggtggaatgtgtggggtgatcn

SEQ ID NO: 510692 - DNA, 329 bp, Homo sapiens
ggtatagacaccgaaaatcagccaaggaaaaggcgatcgccatctacaacgtgataggataccccaagcttcatcatggatcccaaggagctggacaaagtgtttaagtgactacactcgcagttccatgacctactactcttgaaaattggcatgcaggtttttcaactatctcatggcagggtcactgccagatcagctcaggaaagcccccaacagagatcagtggagcatgaccccgcccatagtgaacgcctactactcgccacaccaagaatgagattgttgttccggccgggatcctgcaggcagcattcttaatacgctcc

SEQ ID NO: 510693 - DNA, 214 bp, Homo sapiens
  misc_feature (13)..(13): n is a, c, g, or t
  misc_feature (42)..(42): n is a, c, g, or t
  misc_feature (56)..(56): n is a, c, g, or t
  misc_feature (100)..(100): n is a, c, g, or t
taaggttattttngatgttatttttaagatttatagttattngatttttgattttnggaaggagattgtatttattaagtttttttattaggagtttatngattattttgttaagatttatattagagtttttgtgtagtggatttaggttttagttgtggttataatatagggtttttatataagaaaaataaagtgaattaagtgtgtaata

SEQ ID NO: 510694 - DNA, 1210 bp, Homo sapiens
caaaatggccctgccccagctccccaggcgagtgctcagagccagagaccaagtggtacctccatacgcagcttcgaagaccagcggaggggagacgagctccctacgaaggaccgacagcatcgccccctggacctaggcaggtgtcatctgttcggcagcaggtacctggcagtaagcgcgaggaagcgacctaggcgccccgtggctgcagtatggcagtcgcgggggaaggggtgcagcgaggcgcatcctcgatctggagtagtgacgcccagacgggacccaattgcttgcagcaaatgctggtccttctgtcatggatgaccccgcactttgacgcagcgagggatccagacacacagggcagggcggattgactttcccgtgcgcgatgacccctccggatgtgactgacggaggcatgagtggccctgcccgtgtccgcccgccatgcaccccacggctccctcgtcctccggcctctctggactgcacggaggtgcacgtcgccacgcgactctcgggcgcatgcgtggctgggcagggaaggggcctgtcaaccgccggaggagtcgaggaggagcggaagcgtaagtgaggggcgaaaatactccggtgcataaaagggagcacacgagggcacagagagacgggaaccccccgggcggccgcaacgggcaggacggaagaactccgctgtgcattgcacttggcgaggcgagcataacgagataaccgagcaaaggggacctagagatggaggggcccgggtgggggtaggcgggcgatcgggcgcggcgggggatttgggccgctgcgtggcagcgaggggcgcagtgccagggcgtggcccgaatgggacgttggccggggtatcgcatgcctgggccatggggttcccagtgggcggggcgggcactcttgtatggcttggggaggcctagcgaagggtcgtcaacgggccggggagtagtggcggctgggcctcgccgtcagtcacggggcgcgggggtgtccttgtgtctctggcctggggggtggcattgttggggttttgaatgccagcctccgtttgcgcggtgccccgttttctcgtgcggcatagtcgtgttcccgagctggcggcacttgcctgggtacttggggtgtggcccccggctgtgtccccgtcaggtggggtcgactccgcaccctcgttgtttgcacc

SEQ ID NO: 510695 - DNA, 1475 bp, Homo sapiens
gagatacccccggagctccagacgagcggatcgggcgctcccggcggtctgaccctaaacttctgccgtagctccccgtttcaagccagtgaatctagttctcttagataccagaaaggtgagacgcgtcgtgatatgggaggaggagtccgtcggagggcagaaaaccgcagcatagccagaagacgctccaggagagcagtcattagccggaagcactcaataccggtgatcgtggatgtgcgtaaaagcaacaatgtgaatacgggcgggggcgttaccgcgggtgtcgcagactgtaggtactggcgggcaatgccagagtcgcatgtgagggacgagaacgccggaaggctgccactccgcagagtctgcacggaggcgccctgagttcacccgaaagcggtgacgcactggccaatacgactggacgtgtcatctacgggtatcccgagtattctccagtcggttgccgcccgtgggccttgtatccggcaggcgccttgagggccaagcgaagtgccctatccgtccattagtcccttgagatttgcacaaagccgagggcagtgccatgggggaagccacgccctgagtgcaccttgaggcgtacattcaatgcgggcagtcggccgttggaactcctctgggcatcccactctttgggaggctcatgggtcggggaccgtaggggttcgtcgggggcgagaaggttccaagaaatggccatgaagtttggaccattcattgtagttcacatttaaccattgttaatttttgcaaccaaagagagctccatttgtggagggaacaccgctttacccagaggatagtgtcacccccatagatagagaagtgaattgaagtgaacagataatggtttcgccttggcgagttccttgggccttccggagggaagacttgtagttgcacggtaattggtgagactgaacgtcacaaagtgaaggttgggaagaaagccgttgcctcgtgaaccaaatgttcacaaaggaggggtcactggtgtgggagccttaagtttgacttggttccccagaagctggggggggcgataccaaagtagaggtttgaccagtgttagcggaaaactaatgagcaaacttgagtcgaagagacaataacggttgatccgggcagcgaacaaccggccttaagcacagcaaacaggttggacccctcctctagtgagatccacacaaattgcggctaaattgtggtaaccccaggacgtaaggggagggacacacccaaggtggttgacatacgggcgtaaaaacacagtcaagagagggatgtgtctagcaactcggacaacgaaatgtctcttcaaacgagcaaattgttcagataggcagtggagtagtaccgaacaatgagcactgcctcgatggcgaacacagagagattatcagagggggcgagggcaagacacaggtagacacaagcacacaggt

SEQ ID NO: 510696 - DNA, 368 bp, Homo sapiens
aggagttcaagatcagctacgcagaagcgagacctgtttctacaaaaataaaaaaattagtaggtgtggtgttgtgtacctgtagtcccagctacttggaaggctgaagtgggagaatcatttaagcccaggaagtggaggctgcagtgagccatgatggtggcattgcactccgggcggtcggagtgcaatggttgtgacgagctgatattcagcaatgagtatacccagcgcagaaaaccagaacttggcacctgaaacaacttctggtggtttgacttgtgatagcattctaagctggggagaatatacgtgatggtccatgaccaagcccgtgtgccaagccctggtaatgtgacagaatcacg

SEQ ID NO: 510697 - DNA, 872 bp, Homo sapiens
agaatgtataatattttttccttataatttagcatacaggaaaattatttatttatataacgtagggctatctctaattatgctcatttcttccccgtaaaccacattatctatatgataggaccctttagtgaaattagaaaaataaagtaggcagtgaataaatgttcaggacacacgacatacacgtcacacacatcacagctatcagctctttcagtgagtttgcattaactagataacacatgtaagtacatagatagaatacatttcagaggcagagttcctcggattatttttgtcatggatattcagtgttcagcagcttattatttaaaggggtgccaaatatagcatccttactgtagtcatatctcttgaacatatatttctcaactgaaagagggacttaaacaagtaaacatgattatcgtaagatgcacgttacacaatttctttaaatccttagtcaaagaattctaggaaagttatctagtttaaatttcgaaatgttgtcacacaatttgtaggcatttaataaattatcttctataggaggggtggatgctgcatttcattggaaatgtcatttttccaaaggtttctagctatatactctctttccttcaaataacataagtctgaaagcaatgaaaacgtcaaaggaaaatgtgtatatacatccacatgtttactttaatatgttactcttaacaagctgaaagttgtggtaagaaggacaaaagcagtattcacttccaaaatcatacaacttaggaattcctgggtatctcatgtccagaaaatatggttatgcgcttgccttcttaagtgggtgctgtttgccccattagggcatgacgtgttacaga

SEQ ID NO: 510698 - DNA, 148 bp, Homo sapiens
ggaagagggtggatattgcttttttacggggttggggaagccagaacaccacttggttttatttttttaagggcatgtgatgtgaaaaagtgtgtgggggtttgtgtccttccgtgggagttttttttttagggggccccttttttta

SEQ ID NO: 510699 - DNA, 120 bp, Homo sapiens
gggcaagggcgagatcctggagagcctgcaggacggcgcggagagtccccgtacgcctacagtaacgggatcgactacaatgaccaccaccatcctgcgtggacgtgccggcgctgtgaa

SEQ ID NO: 510700 - DNA, 301 bp, Homo sapiens
atcagtagttcctaagcttcatgaatacagaactagctgccttcacaaggaaccagaatgaccctggttgtcctttagcgcgtgatgaacaaactggacgccaacagtgatggtcagctagatttctcagaatttcttaatctgacttgagtaggctctagctatcgcttgccattactccttcctcaaggctgtctcttcccagaagcggacctgacgaccccttggccctggccttcaaacccatcccctctccttccagcctttctgtcatcatctccacagaccatcctatccccag

SEQ ID NO: 510701 - DNA, 358 bp, Homo sapiens
  misc_feature (218)..(218): n is a, c, g, or t
  misc_feature (261)..(261): n is a, c, g, or t
aggcaaggtctagctgttcccccccggcatacaagcttatagagcagcctcctttgaagatctccaggtggacttcacagagatgccaaagtgtggaggtgttcgagtgtggatcaaggactggaacgtagcctctttgtgcccatggtggaaaggaccccagactgtcgtcctgatcactcccactgctgtgaacgtagagagaatcctagcctggntccatcacaaccgtgtaaaacctgcagcgcctgaatcctgggnggcaagaccaagtctggacaacccctgcagagtgaccctgaagaagatgacaagcccttttccatcacaccagaagttgatggtcaggacagccgag

SEQ ID NO: 510702 - DNA, 424 bp, Homo sapiens
cggcacgaggcgatgtccagttcccagcaatttactcagagatggtaccatcaagcccccatgtttgtccggtagataacacccagagccccctcacctgtcactttgtgatgaatttgaagctcctgcacctggaactgttttcctgtaaccatttgtctttaacttttttgtctgtttttcttccctaagatggctgcagctagaatccccctcccctctccaaaccaaagtataaaagaaaatctagctccttcttcgaggccgagatactttcatgcggtagccgtctctcggtcgccggctaataaaggactcctgaactcgtctccaagtgtggcgtttctaactcgctcaggtacaccacttggaagcagcttgaatacttgctatcatcatgttggagcttcgaactaccaaaacg

SEQ ID NO: 510703 - DNA, 467 bp, Homo sapiens
  misc_feature (376)..(376): n is a, c, g, or t
accctgggggtagaaggtccctggcagttgcctgctgccagtggtgaccagaaaggcagccctgtccccccaaagccccagcaagcagaagtctgggcagagttcatcttcttgacctttggccactcctttccaactgcccgcagggggttccccctgctgaggaaagaccaggtggacccacactgcctgtcacccttcatttgggacttgctgtcaaaccctaggatagtttcataaaggggaggctgggccagcctgctgctgtttgcttcagggccaggcaaaaagttaggctgggggttttcaccccttactcccccgggcacatcccaacctgcactggggccccctcgagtgcttgttttggtttcanccgctcccttggcagctgcagcccccatgcaaaaaaggctcccaggcccaagctttgtgtgacccaaagaaataaaaatgcctcagtgtga

SEQ ID NO: 510704 - DNA, 401 bp, Homo sapiens
agaggaaattgaatacttcgaagcagaacaggcatgtgcacgccctcatttatgagaacaccctcaggaaactcccaggatgatgctaggagaagggggagttgagctgcagctggagaacttcctccagagcacagggcttaagacagaaagaagaactctaagctgggtctgctaacatcactccagtttagatggatcttggcagagagacatgcttgttcctctggattggaaagatgagggactctcgggaatcttctctgtcagcctgtacatctcacggcatgccgcactcaattgggcaattcccattagtgtttcgttctctgctggtatctctgagcatactggttgtaggactggccagtagtgccttcggggctcagtcgaacggactg

SEQ ID NO: 510705 - DNA, 303 bp, Homo sapiens
cctctaacatctggtattcacgcctctagatcatcgtgtcatctggacctttaagccttgttacacaaagtactctttggaaaagattgtcagtgccgtgaaagacatccctgatagaacatgaaagtctggaaggatgataatattgaaaataccatcattgttatagaaaaagccatgaaagttatcaagccccaagcaatacattcctgctggagaaaattgcccagatgttgtgcatgacttcacaggatttacgacaaagctaaccaaggcaaacatgaaagagattgtgaatacggc

SEQ ID NO: 510706 - DNA, 188 bp, Homo sapiens
gtgaagtgagccaaatactatcagattgggaggacgctatgcatgaagcgtgactcactcagactgcgacgagctgaggcggcactgagctgaagagaaggcaggcacgtgatgctggtgcatcgagacacagtgtagagcacaggcattcacctccgagctcaggagagtgctgtcgcgaggagaag

SEQ ID NO: 510707 - DNA, 350 bp, Homo sapiens
cgctctctctctctctctctctctctggctctctctgaaccgcggtgcatgtctcacaggcactgagcccctaacccacgcaaggttgacctaaaccgctatgcaatggcatgagagccttggctaacggggcatacctgggtccctacaaaggcatagatgtggggcttgtagattacccccagctcctgacatacccgcacatgacaatggaacaaaggtgccacacgctcggtcttttttacaaccagtgcctctgacatagtccccatgggccggtgtccaaagctcttttcattggccaaggagggaagggtctgtgcaacagaggttctttgatcaatcaaaaa

SEQ ID NO: 510708 - DNA, 272 bp, Homo sapiens
gccttattcagatttataaaaaaacacataggtaacgacgtcagagcttgggctaggaatgattgggaaaagaccggaaggcttaatcccacaggacatctcacagtggtgtgctaacgacagagaggagcaggaaagtgtttaaaaagctttggggggggacaagggaaggccgggcatcactcgatatccgggtaggcggacccacattcgtgcgtggaaagggtggacagaagaggccaggaagtgagccaccgatctccagaacagag

SEQ ID NO: 510709 - DNA, 231 bp, Homo sapiens
ggagtatctccaatattcaccggtaagtgtggacatttggattggaacggatagtaaccgggacgcgccgtgggatttccgagcttgcgcagggtgtcgatggcgccggcgccaatgacccacaacgggtaggaaacctgtactttctcgacaaatttttgcatgttggcggcagaatccacgccgataccgacaaacttgatttgcgggtattttttctgcaacgcgtcg

SEQ ID NO: 510710 - DNA, 142 bp, Homo sapiens
cggcatggtgtcgctgatctccgttatttctaccattggcattgccctcggcgtggcggtattgatcgtcggcttaagcgcgatgaacggctttgaacgcgaactgaacaaccgtattctggcggtggtgccgcatggtgaa

SEQ ID NO: 510711 - DNA, 390 bp, Homo sapiens
aaaccagacaacgcttacaggttacttcaggatctgcgccttatcaaccaacattgtttaagcctatctaccccgtggctgccaaacccatatactctcctatcctcaatacctccctccacaacccattattctagttctagatctcaaacatgcttagtttgctattcctttgcacccttcatcccagcctctcttcgctttcacttgtactgaccctgacacccatcaggctcagcaaattacttaggctgtactgctgcaaggcttcacagacagcccccattacttcagtcaagcccaaatttcttcctcatctgttacctatctcagcatagttctcataaaaacacacgtgctctccctgattatcgtctccggctaatctcc

SEQ ID NO: 510712 - DNA, 269 bp, Homo sapiens
cccacccagcggcactggaagagcactttctgtttttttttttgagacagagtcgggctctatcgacaaggctgaagcgaatgcttggcagcgaccaaggtgtccctggatcagcaagggctcaaaagaccaggcggaacgatgagacaggccagcctagtctcacactcctgacctggtgaaccacctacctgagccttccaaagtgctgagattacagatgtgagccaccacgcccgtcctgcagagagctttgattggaccactgc

SEQ ID NO: 510713 - DNA, 243 bp, Homo sapiens
ctcaatgaagtggtgtggtcgtttcaactgctactgatgatgggctacttggtacactggctggggtggctggagacgatggcctgatgtacagctgtggttactctgactagcatggagctggaacgagtcggggacgctgcccgggaagatggtttggaccttcgaccccgtgagcggacaggggtcattccctgggatgctccctctggtcggatgactttctctctaagttcactgtta

SEQ ID NO: 510714 - DNA, 353 bp, Homo sapiens
ggcccaaattcccccgttcccccccaaaaaaaaaccttttttatataattttcccaaagttggggaactaaaatttttttaaatttactgggggttccttttaaatgaacaaaattacccaaattttttacccccccttgggaaatgctttccaaaaactaaggaaaaaatttggaataaggggcccaatgttaaaaattttttctaaagttaaaaatgggcccaagtccctttttccccaatccctttttaaaaggggggggcccttggttaccctttttggggggtttaaaaaccccaaaaccaaaaggttattttttcttttttaaaataaaaaaatttaatttgtttta

SEQ ID NO: 510715 - DNA, 253 bp, Homo sapiens
  misc_feature (212)..(212): n is a, c, g, or t
ttcactcttatctatttgtaaaggatgtgctggtttatatttcatttagaaaccaacggtttatagagccaacaactgtgaaattctctttcggaaagaatgaggaaaaccaattaataaatacacaaaacaatcagcagtaaacacttttttaatatatccagcttcccttgctctagaacacatcagtaacccccaaagcaatttacatngtgcaaggcttgccctggggtgggagtgaggaggtcacatg

SEQ ID NO: 510716 - DNA, 674 bp, Homo sapiens
ggccccccgtgacacgaggagcacctgtatgtcaacacccaggtctggactgcccccgagccggaggacagccccaaaaaggatctgtttgacatgcgaccctttgaggatgccctgaagttgcatgagtgctcagtggcggcaggctgtgacatgcatgcccctcttcccttggatggaccagtggcccagcccccctaccctgccggggcccctgtggcccccactggagttgaacatgctgctgtcaggagccctggtaccacggcctggatgatgcctgcctggtgcggcagagatggatgcttcgagctgacggggacttccttgtgcgagacagcgtcaccaacccctgtggcaagtatgtcctcacctggcatgcactgcctgtggacatgcccaagcacctgctgctcgttggaccccctgaagggcgtggtacgtgacgaaaggaacgtgcttgttttgagagcatcagccaactgatcgaccaaacatcttgaagaactgggcagccacatcgttggacgtcgagaagtgagcttgaacttgcgatagcggatggtcatcaagcggagccactgaagcaaagtgaccagtctcagccctggatcatgcctgttctcagacccagacactgactgacatgccttggagggacaagaccaccacat

SEQ ID NO: 510717 - DNA, 106 bp, Homo sapiens
  misc_feature (58)..(58): n is a, c, g, or t
agcctgacctcaagttagcgtgatttaactattttaattgacagccgggggcaaatgnccgcgaattggcgtacgcgacttgggaccttcttggggccggttactg

SEQ ID NO: 510718 - DNA, 533 bp, Homo sapiens
caacgatggtcctcaagctactcaggagtgaggcgggagaatcacttgaacccgggaggcagaggttgcagtgagtagagatggctccactgctctgcaaccggggtgacagagcaagactctgtggggaaaaaaaaaaaaaccaactcttatgataacatagcattaaccataactcgtcaaaggtaaagtcaaccttgaccatacttcagtaaatttaatcttaaaaaaaacaagttcctgcccaacagtagtccgggctaccggaggaggctgaggcaggggtagagatccttggagcttggggagctagtctggagcctaggcaacatagtaagagcgggtaaatatataaccctgggcgggtgtggggggctcacacctggtattcccacgcatcttgggaagagccgagagggggggatcacctggaggtggggatgtcaaaagcagccggacaaattgggagaaaccccatctctattaaaattacaaatttagccgggcgggggggccctggttggtaatcctag

SEQ ID NO: 510719 - DNA, 979 bp, Homo sapiens
  misc_feature (979)..(979): n is a, c, g, or t
tgaggtcaggagttcaagattagaccttgaaaatcatggtgaaaccatgtctctgctagaatgcaaaatattagccaggtgtggtggtcacgcctgtgatccggcagtacttggagaggctgggcgtggagagagttacctgagcccaggaggcagaaggtggtagggagtctaggattgcatactgatctctatcctgcgtgattaccgtgagactctgtctcagtacggacatcgaaagaatgaaggctctcttcccctccacgtagctcaggaggatctcgccaaatcatctggggagaagatttttaacccatgcccttaaacattacttatgagagcccgtcatgggtggaacgcgattttagagatgaaccgaataacacctagggacacgggacaaaccaaaacccatcaacacgatggggacagacagcgagacgaagatattctaaaagcgccggtatatgcccacgcgaagattcataaacgcaacggacactgcgagacaacacaaccgcaacgagccagcataacacccatgcagtcggggcaagggacaagtcacaagtaggcatctaggggctacgaacaggcctgccagaagaaatggtcaacagggaaaaaccaaaagggggcaaaaagaagggatgggagacacgccaactgcaaacgtggaggaggtgggcacgtaggaacactcaagactgagtgcgggacaccccagataaccacctactcatccacgaccaattgggacggacagaccagcggcgaaggtagcggccgagggcacaaacgaacacgacccctacacgctgacacgtcgagcaaacgcaagcgcagcggcacaccagcaagcgaccacacaccaaacctacagagaacaaacaaccaccgcagagacacaacacgacacaacgcaaacacgaccacacacacctcactaacagccagaccaagaacaaagcagagtatn

SEQ ID NO: 510720 - DNA, 110 bp, Homo sapiens
ttgcattgcaaggccaagcatcccctggagttggagagacgaggaagattgaaccacgtgacgaaatgtgcccttgcgccttgccatagtgcaaggcgtatccgagctcg

SEQ ID NO: 510721 - DNA, 431 bp, Homo sapiens
gtgatcacacggagttctccatgtgtctctgtctgtgttcgtctctcttcttggaaagacataggtcatgttgggctagccccactctaaccaagcacaacctcatctcaacttgattatatctgcaaagtccctactttaaataaggttacattcacatttactaggggttaggaccacaaagtgccttttcaggggaatacagttcaacccttaacacactgttctctagcccccaccaaattcatggccttcccatctgcaaaatatatacatcccattccaatatccctacaagtcttaacccatcccagcatcaactcttaagcccaaaatctcatttaaatataatcaactcaagaagtcccaatcttattttctaaatcattaaatcagttttggatgagacttggtatggtccattctgggac

SEQ ID NO: 510722 - DNA, 408 bp, Homo sapiens
  misc_feature (36)..(36): n is a, c, g, or t
  misc_feature (77)..(77): n is a, c, g, or t
  misc_feature (84)..(84): n is a, c, g, or t
  misc_feature (88)..(88): n is a, c, g, or t
  misc_feature (99)..(99): n is a, c, g, or t
  misc_feature (101)..(102): n is a, c, g, or t
  misc_feature (106)..(106): n is a, c, g, or t
  misc_feature (125)..(125): n is a, c, g, or t
  misc_feature (133)..(133): n is a, c, g, or t
  misc_feature (136)..(136): n is a, c, g, or t
  misc_feature (177)..(177): n is a, c, g, or t
  misc_feature (195)..(195): n is a, c, g, or t
  misc_feature (200)..(200): n is a, c, g, or t
  misc_feature (202)..(202): n is a, c, g, or t
  misc_feature (391)..(391): n is a, c, g, or t
aaaaaaaaaaaaaaaaaaatatgatacaagtaacantaaagtaaagaaaatcccagtctgacagcgcagtacctgtntgtaaanaatntaccatctcantnncacnctgcctgtgactgagaacnccgccccnacncccggagggtctgcgagtcaataccttgagaatagtctacngttttccatagtctgtcngagcnanaaaacttgtcacctgtaaaacaaaggacagcattgaggactgaaacttgtctcttttttgaacaactgtgcaagaaaatatatccctttttaaaaaacatcagtcatggctaaactacaatctagtgtctagaattacaaagaataaaatgaaatcaaagatttctcgctagtaaaatgaaatgttagnaaaagtattaaaatata

SEQ ID NO: 510723 - DNA, 237 bp, Homo sapiens
cacagaggggaatgtgccacacgggggatgaccaccaatgccctgagatgaacaggtatttactagagcagttgtattcgagatatgggtcttcatgaatcatgtgtaacaatcagatgaccgcgataggcaagttcctgagctgccggggtgccttgagttaagagctgagaaccggcctgctgggctgttctactgtactctgtttggaagcactggcggacggtcgaaataaga

SEQ ID NO: 510724 - DNA, 362 bp, Homo sapiens
tgttctagaatcagatgccaggtccttgccttttctgaatcttcatttagaaggatttttatgaatgaacattttcaaactatgtgcttcttgggccgttgtttttttcactagaatctggaagcttggattgcagatgtttgtctccaacattggcattatggtaatgaggttctcttggaataagaatgagcatattagtgttttctagggttgaggtgtaaatctattttattttattttattttatttttttggtctccaaactactttaagtcttgtctggtaacacattaacaatcctttctgttctgtaggttagcattgaggaacgtctgggagcaatggatatagacacacac

SEQ ID NO: 510725 - DNA, 201 bp, Homo sapiens
gggcttagtattgagtggcatgtgatgctcatgtatgtatcctagcacttttggagggcaaggcgggtggaccacttgaactcaggagttcgaggctaacttgtgcgacatagtgaaaccccatccctattaaaaatacaaaaactagcccagtgcagtggtacgcacctgtagtgccagctattcaggaggcagaggcag

SEQ ID NO: 510726 - DNA, 385 bp, Homo sapiens
  misc_feature (1)..(1): n is a, c, g, or t
  misc_feature (10)..(10): n is a, c, g, or t
  misc_feature (122)..(122): n is a, c, g, or t
ncaaaactanccatactccctcttggtaagtagaaccgaattcttggacactgatggtagatgatataccaatgcgcatacattcttagtcatagtttggcttgcttaaaagttgtacattnggccagcacagtaggtcacacctgagagctgaggcggcagatcacttgaggtcagttcataacaagcctggccagcatggtgaaaccccatctctactaaaataaataaataaaattagcccaggtataatggcacatgcctgtagtcccagctactcaggaggctgaggcagaatcgcttgaacacaggaggtggaggttgcagtgggccgagatcatgccacttcactgtagcttaggagacagagctagactccatctgc

SEQ ID NO: 510727 - DNA, 142 bp, Homo sapiens
agaagaagcaattcagcctccagactgcagcgtcaaatctccctgggtctccaggctgtttgtctgccctgcagatttcagacttgccagctcccagaataatgtgagccaattccttaaaataaatctctttctgcatata

SEQ ID NO: 510728 - DNA, 318 bp, Homo sapiens
actagtccacggtggctcaacaagacaactactatcccatataaatatacactcaacactggagaacccagattcataaaacaagttctcagagacctatagactcttaagataaccacacaatagtggcggacttcaaaaccccactgacagtattagacagatcactgaagcagaaaactaacaaagatatttgggacctgaactcaacacttgaccaaatggatctaacagatatctacagagcactccacccaacaacagaatatacattctcctcatctgcacaaggcagccaaccgtggactagtgggtacc

SEQ ID NO: 510729 - DNA, 162 bp, Homo sapiens
accatgcttgtatcctaaggacatcaggtgaagtacatgaagcatatacttaatatggagagtacttttctaaccttttaataaagtggggtaaatgaaatggggttctcctattaaatagtggactcctaatccctgcaagtagtaaagcaaaggggtccc

SEQ ID NO: 510730 - DNA, 459 bp, Homo sapiens
  misc_feature (7)..(7): n is a, c, g, or t
  misc_feature (61)..(61): n is a, c, g, or t
  misc_feature (127)..(127): n is a, c, g, or t
  misc_feature (131)..(131): n is a, c, g, or t
  misc_feature (148)..(148): n is a, c, g, or t
  misc_feature (167)..(167): n is a, c, g, or t
  misc_feature (169)..(169): n is a, c, g, or t
  misc_feature (174)..(176): n is a, c, g, or t
  misc_feature (179)..(179): n is a, c, g, or t
  misc_feature (197)..(197): n is a, c, g, or t
  misc_feature (205)..(205): n is a, c, g, or t
  misc_feature (223)..(223): n is a, c, g, or t
  misc_feature (291)..(291): n is a, c, g, or t
  misc_feature (318)..(318): n is a, c, g, or t
  misc_feature (323)..(323): n is a, c, g, or t
  misc_feature (332)..(332): n is a, c, g, or t
  misc_feature (342)..(342): n is a, c, g, or t
  misc_feature (344)..(344): n is a, c, g, or t
  misc_feature (376)..(376): n is a, c, g, or t
  misc_feature (439)..(439): n is a, c, g, or t
gaagatnagctcgaggttcgccgcggccccgggggtgcggaccgtcttcaaggccttcgtntcgccctcgcgcagagctcgaaggtgacgtcggggatgggtccctcgcagcgcaggaaggcatctnggcncgccaggttcgccccantccacgtcgcccggttctnangcctnnnaanggtccgtccacgtgcagntccaagcncttgctgggcgcggagcnccgaaaggtggctttaggtccacgtagacgcagctgtagttggcggagtcagccacggaaatgttgtncagctcgaagacgccctcggtcccagnggggntctggaaanggtgcacgangngcccgcccctgtcctcgcgcaccagggcgaangcggcgccctccaggggcgccaggcaccgcagccgcaaggccctgccggcactccggctccgngggagaactccggcgcgggc

SEQ ID NO: 510731 - DNA, 296 bp, Homo sapiens
tttttgtctggcgtcttcactcttgacttcctcctttctgataagtaataggtgagcacctaataaccttttagggcaaaactgaaaacatgaagtgcctggggccctttagctgttctattggatggactaaggccaggggtgttggctcagccacctactagctctgtgatctagaggagtcagtgaagctccctgccttggtgtcctctgttgtgcaatgggcacctttcatcatagagtttctgagaggattaaataagacacagtggttagccctgtgctcagcatgaaaa

SEQ ID NO: 510732 - DNA, 283 bp, Homo sapiens
gtacatatatccacacgatcactaaataatcatgcgctatgagatatatgaatttgtatttgtacttctccgcttctttgaactacctatagaaatagagactgaaacttaaaagtcgttgctaaacaagtcacttatcgctccctatggtataaccacactgctttataataagttaactatagttactcagtcattagatatgttctctgattgactaaatggatgaatgtaatctttaattaaggaaataattcaagttcttggctgtgtgtcacttctg

SEQ ID NO: 510733 - DNA, 1000 bp, Homo sapiens
agtcgcttcgtgatctggccgctcccggggagaggcggtgtgcctgagcggtggagtggatggagctaaactggttacatctggcacttgatccacgcaccccctgagtgtggcctgagtgtgatattggtagtacacctatcttccacccactgccccgtgtgatgagaaggctatgggcaccagcccagctcctaatgtcctcatgatgtgcacatgtggccctgtgcccgtctgtgaaatggtgggacggtgtgaggtgaatgcgtgtccatctccatacaacaaacaataaactcttcatcatggtgatgcatattcgtgggcttgcaactgctccaggatggaaatgaccctgaccctatgtgaaaatatacctccttcctgaccctcagaacaaccactaagaggacaaccaaagtggcccggaaaacctgctatcctacctacaatgagatgttggtctatgctgggataccccaagggtgacctgcagacagctgggagctccagctgagcgtgctgagtgagcagggatacttgggagaacgtcctcctcgtgatgaggtgaacatccgacctgcgagagctggacctggctcatgagaagaccggctggttcgccctgggatcctcgaggtcatggcacgcatgtagagccccacgagagccacaacccagacatcccatgctggttggcttgagctgtttggagatggattcaccactgtggagatactcccatgtcgacagggcccaggaacagagggcatgcccatcaagcctcggatccagcgagagcctaggccaactgtagaaaggcggcccgaaacgacgcagaacccagacccaagccgcccacacccccgtgccacacgccaccggccgcaccgcacgacacagaccctcaccggcgcacagtccgcaccacgcacacccgcccccgaacagacgacacagcaacgacaaacgacaaacgacaacaaagacccgcgagcga

SEQ ID NO: 510734 - DNA, 196 bp, Homo sapiens
aaaggggcccccccccctttggggggggggccaccctgcttttttgggccgcccttgaaaatttttaaaggttttccccttttcccccccctttttttgggggtttaggggggttggggggtttttttttccttgttttttgggcccccccccccggttttccgggggggccttttttttttttgtttttgtttta

SEQ ID NO: 510735 - DNA, 348 bp, Homo sapiens
tatgtcagtacacatgcatgtacagcatgaggggctgcgaagcccctcacccttgagatgggagccatcttcccagtccaccatccccatcgtgggcattgttgctggcctggctgtcctagctgttctaggagctgtgattgctgttgtgatgtgtatgaggaagagctcaagtgcaagtggagggagctgctctcacgctgagtctacctacagtgcccatggctctgattattctctcatcctcttgtatgcctgagactgctgcctgtgtgtgactgagattcagagatactacacatctttcctttgtgactgcgagagcctctggcttctctttctgttact

SEQ ID NO: 510736 - DNA, 991 bp, Homo sapiens
atatcggtttatggatgaaggagggagcggtcgaatattttaggcgatcaagcacggtctccgctgggctttggtcccttttgtgatacctggcttagtccgggggccttttccccctcttataggcagccaaatctccataggtctatttggtgtgtgtgattgagctaagctgcaaacatctatgtcgggacgatgtacagctagaatacaccgtgttcggtataaggacttatagtatttagcttctgtcgagtctcgatagcgcaagttgtattgagatcggagtctcagtctgtcacccaggctggagtgcacttggattgatcttggctcactgaaacctcggcctcccaggttcaagcaattctcctggcctcagcctcccaagtagctgggacaacaggcacactgccaccacgcccaactgattttttgtatttcttagtagagattggcgctttcaccagtgttggccagtatgtgtctccaagtctcattgaccttgtgatccaccccacctcagcgctcccaaagtgctgggagttacaggcatgagccaccacacccagcgagacggggtttcattatggttggtccaggactggtctccaactcctgacctaaagtgatctgccacgcgttggcctcgcaaagtgctgggattacagacatgagccaccacgacttggccgggtatagtatatgtcgtatattgagcacttcccctactgagttgctgccttctctgtggctacaagggacctcacagaattacagggaagttacagggaagcaggtttcatctcaatattgggagagatttcaaacaatcacacctgcctgagaaggagtgggctgtcactaggaatttttattcacagtccgtcaggtaattttgtagaagggcttcatgtgctggttcatccaataggacaggaagctattaaatcagctttactatctatgttaacttacgaaacctggtagt

SEQ ID NO: 510737 - DNA, 235 bp, Homo sapiens
gagcgctggcctccctagcccctcgccgggctccatcctgacctcggcggccggcgggtgaatcacgcactctatgttcacctgcagccgggcatgagccgggagggcccggctcagccccagtccagccccgtgcaggccacgtttgaggttctgggtttcatcacgcacctctatgctggcgccgacgtccacaggcactgggacgtcagaatcctactgaccaatatccgaa

SEQ ID NO: 510738 - DNA, 541 bp, Homo sapiens
atgagataagcacggtggtcaacttgtcttgtaattgagttgagctaataataagccctttaccagtgtacaagataaaagatttcctttcagttcatgtgctaattaggacaaaactaacttccataaaaaacccaaaaatatcagtggttgaacacaagagaagttgtgggggactgtgatgcagtcatctggtgatccagagacccaggttccttttatcttgtggttccattcgtttcctagggccttgcctttgtttttgtttttgtttttttccttatcagccctttctaactcattgagatgaaattcacttaccataggattcaccctgtttaccacctgttcttgttttttttttttttttcccgatacagagtcttgctctgtggcccaggctagagtgcagtggtgtgatctcggctcactgcagcctttgcctcccgagttcaagcagttctcctgcttcggccccccaagttgctgggattacaggcacccgccattacaccgggcttatctcaatccgggtaccgac

SEQ ID NO: 510739 - DNA, 132 bp, Homo sapiens
ccatacgcgcatacatatcttacgtaatgaacaccatactccataacttttaatgcattattctcatattttatagctgcattactctaatataggccgggcgcggtggctcacgcctgtaatcccaaggtg

SEQ ID NO: 510740 - DNA, 460 bp, Homo sapiens
acgattgacttactactaaacatttgagaacagaacattagtagtgaatgttcaacatgacatctgacatgcgtaccataccatatacattttaatgtatatgcagatttagagaaggtaagtgatgaccacaggatgtctactgtctttgacatctgatgaatatattaatgacacacctctaatatttactacccttctactttaaatgtgacgagagggtgacaactcttactagtggtgtccaccccccccccttaagtagtgtcaactgtattagtagtctaggtattaggtatagaaggacgggaactaggtaatggatttggtgtagtatgctgctaaacttactgtagcagatagttcgcagctgggtaagcctgtagtgtgtacgtgtgtgaaagagagagaaggagagagacagaggcttgcatgatgtcgctaaatactacatttgcca

SEQ ID NO: 510741 - DNA, 312 bp, Homo sapiens
cgaccctgcagaccccttgactgaacggcagggggagggtgggggtgaggccaccaatcgcaactcacaccaattctttggctcaagaggccccctgccaagcacaccctgggcaaagattggaccccacattaaaaaccgaggaaatagccctacttgctggaacaaaggaagaacccctccccactatacctggctcatcctcaaaccctgacctgggcctgagggactgcaggggctgttcagcatggccctgaagctgcgcagaattgttggcaaatagggaggggggtcccagggaggaggggtacc

SEQ ID NO: 510742 - DNA, 419 bp, Homo sapiens
tgtacgacttcctgtaggagttcggcacgcgggcccccgagcgctgttgacattgagacctgtggtgagcctcacacgaacacaacattaccctttcatttgtactggctccttccacacgagtggccctttggcccaagaagattattatcagatattaggagtgcctctaaatgcgcccccgaaagagatcaagaaagcctattattagcttggcaagaagtattaccctgtcacaaataagggtgattccggccaggggaaggtcttccagatggcagaagcctataagggtttgagtgatgaggtgaagaggaagcactaccatgcctaccggtctgtaggcttcgatactgggggcagcgggttccagcataggtactgggggagggcccactgtggaccccgaggagctgttc

SEQ ID NO: 510743 - DNA, 359 bp, Homo sapiens
tcaagttggttgatggcatatgagaatgtggccatatagtgccagatctttcttctggtttggaaagacatgttagactctagatttttatattaaatagtctgtctctctctctctccttttttttctttttctttttttttttggagacagggtctcattctcttacccaggctggcatctaactttttaaacagtaaaaggctggtcatggtggctcatgcctgcaatcccagcactttgggaggctgaggcggccagatcacctgaggtcaggaattcgagaccagcctggccaacacggcaaaaccccatctctactaaaaatacaaaaaatagctgggcgtggtgccggcccc

SEQ ID NO: 510744 - DNA, 170 bp, Homo sapiens
gctactagtcgcacacagggaaaaattaagttgcagatgcaagagttctctggaggtgatacgtttaagaaacatactacaggaaaagatattgtaggtccaccaactatggttaaattccagaaattacttcagttattacgtcttcatttctcgcttttattgcatcc

SEQ ID NO: 510745 - DNA, 242 bp, Homo sapiens
aaaagcttcttacgtggttaaatatgtcaccaaactagttggtagaaaggctgtccaatttatgttcctatcagccatatgcccagttggtccatattttccccagaattaattatgatcattaaaaatacttaaggccaggtgtggaggctcacacctgtaatcccagcacttagggaggccaaggtgggtggactgctggagcccaggagttcaagaccagcctgggcaacattatggag

SEQ ID NO: 510746 - DNA, 1067 bp, Homo sapiens
gacagaagcacttgcagaactcatcagaagccaccccgcttatcagcagatctcaagagagcgtacggtggaggccctgggtctgcacagctcacctcccgtgggaactgctcgcccgagccgtcggagccggcgcatggcccccgtgcagccggaagggtggcaagccgcaggcagccccggcagccccaggacacaggggaaggaacagcacagcagtgtcgtctcctagcacaatctagcactgggaagcaacacgagcgaaccttcttccagcgatggtctcccacctcagagctgacggaagcttttctactcagcagatgctgtgtgtacggattgtggaccagcaaggcacatcagagcaccaaggatccgatgagctagccaaaattctgggggcgtcgaggcaccgcggcgtccgacacatgacacggcgagccatggggcgggcgcagtgcctttcaaagactgctctcacagaagcgcttagccctcatccagcccctccagggacgccaggtgccgagactccatagcaagagcaagccgccacacctggaacccccgggcatacagcgaagctgggcacggccgcctacaggaaccgaacaggacaaggtatccgtaatatccgggctggcccacgacgacaggtcgaacgcaggttggcatccacagcggcccaactatttcccagacatcgcaaagtgacgttggccacacagggcgtgacaaccgaccaacccggggcaccaagcgcgcgatgggatacaacacaccaccaaggtgccactgtgtgccacagcgcacactgccctaccgtgtaacatggacaaacgtacggcagagccaaaacatcgctggtgcacagtgggcccaaactgcaaacggcacacgcgcaagatacaagatgggagccacggtctagccaaagcaacacaccaagcaacccacagagatgtgcgcggacaaccaccgtgtgcaccaacacagcgaaaaactgacggacgacagcactcgcacactcttttctctttgcctgtggtgctcctctgcgagagacg

SEQ ID NO: 510747 - DNA, 901 bp, Homo sapiens
aagctaccaaaaagaaagtggcaatatattgactcaggatctcaaagctgggtgtgtagcattgactgtgtaaagacttgaagggacagaagtgaagaaaataagctgcaatttgtacagataccaacttctgaaaagctggtgtaacaactagcattgaatgcagtccaatttgcagtagtaatcttcaatagacaagcagcttttgttgctgcctttatggacatgggtaccaattgctttgtaatatggtaaaaatgtgagctagcacttctgcgttcctttggattggtgtttaacatgtattcgatggagaaatatgattttaatgctttaatctcatgtagtgggttttaatttcaagcggaaatcttactggtacttgaattgtgccctgtttggtagagcacacctagaagtgtgctggtaacctgtactcatgtcccagtatgtacgtcctttctatgaacagagaaaagcactaatcttaaatgatttccagcaatgtttctggtactcctttcagaaaagtctaagactattatttcgttcccttcctgtgcagcagtcaaaatcacccctagaaaagtgagtggctaacgagacttccttaggaacggcagcactgaaaaccaaacagtatgctgggacaccagatagcgcagggcacacaccctaccagtatcacgcacacttgagcacagacatccacacaacggccgtttgggcaccgcaccaggtcttcgacagtgacaacggggaaaaaccagcgatagcgcacagcttttcggcacagcacgccaccaacggctgggacggtaaccagtgctccaccacatgggcacaccaacggaacgaccagagcgaagctcacaaggccacggcgagcgccgcacgcagg

SEQ ID NO: 510748 - DNA, 228 bp, Homo sapiens
gacaaagactatctacagtgatagagcaaagcatcaaagaatctttaggggaggtttaaaaaaaaaaaaaaaaaaaaagatgggtggcctctgccttggggatcctgagtccagaagggtacacaaggtgatataatgggtagatgtcactcacctagaacaaccagaggcgtggcattgagtgcataacttccaacacaggggcatctcagaatgcctcagataggc

SEQ ID NO: 510749 - DNA, 775 bp, Homo sapiens
caagtgcttgggtaccggcccccctgggtaccggcatatcgcgaccatgtcgtctgccctccacagcgctagacctgggtgtctccgtgaattggtgtgggctgtgcttatactagctcctgacttagtgaagagcctcgtgtcacaacacgtgtccctacagtgcaaagtgtcctggcatttaacaacccagattatccctgggtttggagctgcagtcacctgtgcagaagctggtaggggggggggagggaccctgccggtgttcactggtggattctttcttttggtccttcctggaatgaacaggttccctccctgccacctgtgaggagagttggggcccatgccgtcttcctggcctccttcctttcctcgtggcatgatggcctgcatgtgggtgccagaggccagctctccacactccatcttgggggggcggagcagattgggcccaagctgaccgggagggtgggtgcagacaccaggctgagagaccagccctggaccctgccccgacaatctgctttcaccaagctgtctctcccaccgtggacttcccttaatccactccaggacaaaggtgcttgctgattcccaagtcccttggtatattcgtccttgcccagacggttgcctgtaatgcgttgtgagtggtgggaggggaagctccagtgggccagggaactcggcggatccgatgaggtccgtggaggacgggaaccattttgcccgaccgttccaatcccctcctccatccttaggaatgaattac

SEQ ID NO: 510750 - DNA, 122 bp, Homo sapiens
agtctagcttcaaactcgtacaagacttgcatttcaggactggctgggcaggcttggcgctggagggccgaagggaaacagtgtcctggtatcctaagggtgcttggtaggagcgtgacaga

SEQ ID NO: 510751 - DNA, 411 bp, Homo sapiens
atgtgcatggcctactccggtcgctgcctgctctctggctatatcaacaagcgcgacccgaaccagggcacctgcaccaacgcctgccgctgggagtacaacgtccaggaagggaaagaagattatctcgtagatgattgctttcgctgacggacatgtatccttttgccttcctcagttgcacgtatgcggcgaggtcaacgcgtgcgtcgatcaaccggttcagcagatcgattcgctgtctgtcaacgaacatacttcgatcctcctcttcccagccttgttgcaattaaatagtatggctattttttgagcaaaatgctgtccaggatcaattcttcacgccgaattaacaaaatttacatttccttcgcctccgccagcgaatgagattgcgatacaaattttatc

SEQ ID NO: 510752 - DNA, 84 bp, Homo sapiens
cccactccaccttaatcaccagacaaccctagccaaaccatctaccaaattacaagtatagtgcgatagcaatttaagcctaag

SEQ ID NO: 510753 - DNA, 476 bp, Homo sapiens
aagcagctggtctcgagctcctgacttcagctgatccgcccacctcgacctcccagaaaggctgggataacaagcgtgagccacggcacccagcctatttttaatcttttataccatatttttactgtaccttttctatgtttagataggtttagatacataaatacttgccattatgctacaatggcctacagtatccagcatagtaacatgctatacaggtttatagcctaggagcaatactgtaccatagcaataccgtatagcctaggtgtatagcaggctgtaccatctaggtttgtgtaaatacactctgccctcaccgatgaaatcacctaacatgcatttaaaagagcgtatccttgtcattatgacggtataatctaatgtgggtatctaatagctcctatggtggccgggctcacattgttatacacacatacagatttggtgtcctcggttagattgtatattcc

SEQ ID NO: 510754 - DNA, 119 bp, Homo sapiens
  misc_feature (15)..(15): n is a, c, g, or t
gcattagcataccangcacactttctgataggcagctgcactggtggggtgaattcttgccaaagtgatgggccagcacacagaccagcacgtgcccaggagcctgaagtctcaggatc

SEQ ID NO: 510755 - DNA, 313 bp, Homo sapiens
caagctctgcctcccgggttcaaacgattcccctgcctcagcctcccaagtaggtgggactacaggtgcgtgccaccacgcgcaggtagttttattttttctattttagtagagacggggtttcaccatgttggccagggtggtctcaatcttctgacctcaagtgatctgcctgtcttggcctcccaaagtgctgggattacaggcacaagctactgcactgggccatggccaggatttttatgacttgtaaaaccactgtcttcaaggaggctataagttattatgggagaaaagtaaagggctttgtaaa

SEQ ID NO: 510756 - DNA, 1003 bp, Homo sapiens
cggagccggtcaacgcgaggaacttgcccccgacaggatggtcccagcgagacatccagggagcccgcacgccaacaaggtggccggcccgggcgaccaggggtcgaagcatcccctgggtctcccaacacggcgggggcttgcccaggccccagcgcagcccctcacagctcccagaaaccggtgagaagcagcccatagctgtgacctgttatccgaaggacagattcggtgctcacagaaagctgtctgaacccttggcaagttacgtaacctctctgcatctcgcgaccatgatggaaccaaagtaagggaaatagcgatacaatgttatcttcagcactgtttgaggtctggagacactgttcagcaaagggcttcccgtcgttccgtggacccagcactggttacttccatactgtactggctatcttataggatgtaataaacttagacgctgggaatcacctagtcggaccatctcaggcagcgatgagctacctgtggatgggagtgttcaacacaggaccagaggcaaggccaggtcttaggagagaaacagttgagatgatccaagtatgatggaatgcgtggcgctggatgcgaggctttgcgagaagtaggggcttggatctgattgaccatataaagctcattgcagtcatgacggatctaattcttaacgtagctcgggctagtttcacaggtgcagtaaatgcctgataaacatgtgcaagtggcaactttgtcttaaagacccaagagcgacaatgagatgcgtactttctactcgctggatagtagctaaagtgaaagaaattgggcacttggtatgatgcagggctgagagaatgggacccagtgtagagttgtatgtgtagaggaacaataggcacttccgtgctatgtagtttgctcagagtgatcactgacggtgtgaatgcccaaatgctccaggtaccccaactctaggcgtataacccaaggaatatttacatcataa

SEQ ID NO: 510757 - DNA, 110 bp, Homo sapiens
aatcgatgcgtggtccttgcagaaggtcttggccgtagctaatggattataggtgtccctaggaaccaagtagatggcgcagtgtactcccaatatttcttgggcctgtt

SEQ ID NO: 510758 - DNA, 789 bp, Homo sapiens
cgtggtacgaatcacggctgtggacatctcggtatcaccgttgatgaactcattggtttcacagagtcatgtgtgatgtactgtgtttgataggccaggtcgagtgacggagcacgtgggacagctctccaccctcccccgggggtgatggtgtgcgagtggtgtggtagaaagttagtaaactgagtggtgggccctgttattgtagtggcataaagccacctcagtaagtccaggtttacgcctgtgcctgtcgcaggcttctcgcgctgggagaaaaggtctctacctggttatctctctcctccttccagcctgcaccctccctccatcaggctcaacggctgtctggttgccctgtgtccctcaccgttacctccccctcagggatccctagccccacgcctcttgtgaagaagacaaaggtctggccgtaccatagaaagactttgttttctattttgtaacccgaaagagtctaacgtgtttggttttacctgcttggaccttttggggggcgcaactaaattacgtaggtcataaaaacattggggttttccgcgtagaattggacaaaccaacacgaactgaccgaacgcaaaagccacgaccgaatacctcgcgggagggcgttgactaaagtacgcgtgggggaacgacaacgtggacgaaaaggatcgcgggggatgggcgcaaacccggtgtcgtatgaaccaacttttgggttgaccgaagggagggaaaacaggaggggaccccccaaagggacggcgaaaaaaatccgaaaac

SEQ ID NO: 510759 - DNA, 455 bp, Homo sapiens
tgtggacctgtcgggatgagagcgtggcccacggaacgcatatgacatgtcgatgctttctagtgagacatcgcgcctgtgccataaggtcacctacacggaccgtagtggggctagtcaggtctaagactggatgacctctttgtgacaggccgctaatgtccgctacgttccactatcccagaatgacgtgaaacatcacgcttcgagcgcattgtagtcagtcagactgtcagaattatccatcggtgtgcgtaagacttgtggtggcaaggtgccaaggccgtgtggggaagtttcgccccaaaaaactgctaagtgatggcctctcatgtaagctcctgggcccaaactcggagtcctccaagtgatctcctggagctatttccctggcctcacaccctgtctggttcccgagaagaaagcagggccggccagaggctggtgtcctgcag

SEQ ID NO: 510760 - DNA, 414 bp, Homo sapiens
gccgcagttagagaccattcaacatggcaaaacacctattctcttactaaaatacaaaaacacttagctgggtgtggtggtgtgcgcgtgtggtccctactactctggaggctgaggtggggggatcacttgccacctgggatgttgaaattgcagtgagtcgagattgcaccactgcgctccatcctgggtgacagagcaagactctgcctcaaaaaaaaaaaaaaaaaaacacacacaggaaaaaaaaaggttttttttaatgagaacccagggaagcccttgcccattataatgctctagtactcgaggttctgttacggggttcaaagattccgcattttattttggggcccattttcctggtttttttttaatggcccgattaaaatgttttttttcaaacacaagcac

SEQ ID NO: 510761 - DNA, 409 bp, Homo sapiens
  misc_feature (68)..(68): n is a, c, g, or t
cttttttttaaccccccagaaaattagtgatgaaagtgtaaattgccacaaagtgtttaaaataaatncccagtcacaatggggagtggcagttatcagtataatcacctaatcacatgaaatcaagaaaacacaaatggctgggccacgggtgtcacgccctataatccccaacactttgactttgggaagctcaggtgggcagatcatttgaggtcaggagtttgagaccagcctggccaacatggcaaaagcccatctctactaaaaatacaaaaaaattagctgggcattttggcgggcacctgcaatcccagctactcaggaggctgaggcaggagaatcacttgagcccaggaggcagaggttgcagtgagccgagatcatgccactagtgacagaatgagac

SEQ ID NO: 510762 - DNA, 921 bp, Homo sapiens
ggctgtgtgtgctgcctgagtgccggagacggtcctgctgctgccgaattcctgccagctgtccgacaatgtcgtcccacctagtcgagccgccgccgcccctgacaacaacaacaacaactgcgagggcgccgtgcgcctcaaacagttcctgggtggagctacccatgaacagcagcaattggcactgatacatggcactgggaacactggggggctgaacaacgtaccatccatcatcctccatccacaagtgagaccctgagaagattcttgtgatgcacaacaatgaatcaggaccagagtagttccaggaggcagttctcacttgttgacacgcccttccgccaacaagaaagatgggccagatcattgttcgatggtggaaactgcacaccacagcgagggaccaactagctctcaggtcgcgaacgaagacgttgtacaccgggacgcgaaaggaagtcgaaggctctcgacacgaacaagtgcgggactgggtactcacgacgtgtccaggtaggacccgaaagatttcaccaagggagttccacttccagaacaccctaaacgtgctgtgtcttaagccatgaggcacaagtggagccatgaagaacggcggtattcactccgcagaactctgaaggtgttcaattccatctccttttcctttcctaatgtgggcgttgggctaggcatcaactatgggaaggatggacacacctctgcggcactaatggggaagaaaggccgtgaaatggtgtgcctggacgtgggttcgacagacgtattgactggacctgtagctaccactacacctgttagttcactcggcgcaccattttacctgggggtgaactccttgcggagacacatccagcggcgcaaaggttgcagccgaaagggtttgagaacttatcc

SEQ ID NO: 510763 - DNA, 124 bp, Homo sapiens
tctgtaccacccagcattgtttgaagtgccctcgctcaaactccttgcgtgcctctgcattgtgggacaccaacacatgatcccagagaacgctctagaggagatcaccacaaacatggatact

SEQ ID NO: 510764 - DNA, 624 bp, Homo sapiens
tctctcggccttagcgccattttttgggaaacctctgcgccatgagagccaagtggaggaagaagcgaatggaccaggattaattcctttcatttcttagtaaattaaaacctgcagctggtggattgtgatcacacattcccgaagtaataagtgaggacgaatgcactgctctggaacataacccagtgctaactgggggtttcatttattcagtcaagcacatcttactcacatccagatttattttcctacagtgcaaacacaccagatgaaactttaaaatgttacttttgtaagcttatcataaatgagttgcagtaatttgttgcttgttgtttaaccacaaccactattttaatgatatactaaagataacactatttagttttttcagaaacatctgcattatatgtgtgtcggtgtggattttgtttctaaaattggcttagtccaataaataaagaaaagcattaaggacttaaagcaacaataaccaaataaaaacttgataggatctttgaagtctatttaaatattcattccattacatctagactcaccaagaactacatgttatgatgttaagtcgaagttgaaacatgatgtttgcattaaatttag

SEQ ID NO: 510765 - DNA, 143 bp, Homo sapiens
  misc_feature (15)..(15): n is a, c, g, or t
cccaagcccacctgngctctctccacccttctagagtccagtcaaccagagtccaaccaaggctccatcctctgattctgccaatgaaaatctccctgcagggcctcttcttttcccagagctcaccccaaccaggagctcta

SEQ ID NO: 510766 - DNA, 227 bp, Homo sapiens
atctagtcagggtgcagctctactagctcagcgctgtcgaaccgagaaccgcagatataatcgccctacagtggtgcttggagcatcccgataccatctcagtaaatctcctacaatggcctccttaccctccccgggacccacacccttcaggtccacatcctgagacctaagggtcccatgatctcagagggtccctcctttccccactgagatctttcgggttc

SEQ ID NO: 510767 - DNA, 423 bp, Homo sapiens
aatcttctgccactgataaggactattctgccattcctggtatcgtgttaccgcatgttcttgataaaatgaatcttcttaaaattctttggtctgggtgaacctgagagagttcgacatctccggagaggggcgttctcctcaatatcttccagggtctccaaggaagatctctgggagatgaggcgccgtcgggacctctgcagctgctcgaaggcgctggtgctgccgccctggcctggctgctccagggagcagtagttctgcgaagtcggcctggagaaggcgatgggcaggattccctgagtgaacgagttgaggcgtccccgactgccgctcccactcccgggggtcccggagcccaaaaaggcggccgccggcacctgcacgctgataaaggcatcgtcctcctccaactcctcc

SEQ ID NO: 510768 - DNA, 311 bp, Homo sapiens
ctcttcctgcagtactcccctgctctctcagaggacaacactgacctcccagttgtcaaatcagctgggcacggtggctcatgcctgtaatcccagcactttgggaggccgaggcaggtggatcacgaggtcaggagttcaagaccagcctggctaatatggtgaaactccatctctactaaaaatacaaaaaaaaaaaattagccaggcgtggtggcgggcacctgtagtcctagctactcgggaggctgagacaggagaatggcatgaattcaggaggcagagcttgcagtgagctgagatcacgccac

SEQ ID NO: 510769 - DNA, 535 bp, Homo sapiens
  misc_feature (12)..(12): n is a, c, g, or t
aagtcttcttcnaacttctcctcgaaaacctcgaaactcaaggaacactgcaatcccgaagctaaaaagccctgccctgggaaattcctgaagaggggagagccctctgtagccggtaccccgagtcacccggtttttcttcggctcacagtggcccacgttgttccaaggaccatggcttctagtagcctctcgaaactccaggggcttctcaacgttattcatggattttctccggagaggggcgttctcctcaatatcttccagggtctccaaggaagatctctgggagatgaggcgccgtcgggacctctgcagctgctcgaaggcgctggtgctgccgccctggcctggctgctccagggagcagtagttctgcgaagtcggcctggagaaggcgatgggcaggattccctgagtgaacgagttgaggcgtccccgactgccgctcccactcccgggggtcccggagcccaaaaaggcggccgccggcacctgcacgctgataaaggcatcgtcctcctccaactcctcc

SEQ ID NO: 510770 - DNA, 165 bp, Homo sapiens
  misc_feature (134)..(134): n is a, c, g, or t
cggaggagcaggcaagagatagcatgacattctttcttcctgccatcgcctcacccctgtggcttagagcaagaggtcagtgagtgtgctagccctgcgattcgggcctgtgcctgccaggagctcgcccgttntcgtcggtgtaccgacgctcgaacttcgtaa

SEQ ID NO: 510771 - DNA, 466 bp, Homo sapiens
  misc_feature (36)..(36): n is a, c, g, or t
  misc_feature (103)..(103): n is a, c, g, or t
  misc_feature (124)..(124): n is a, c, g, or t
  misc_feature (173)..(173): n is a, c, g, or t
  misc_feature (232)..(232): n is a, c, g, or t
  misc_feature (365)..(365): n is a, c, g, or t
ttgccctgcccccactttgtagacccagcagatccnaaacttttcccaatgagaaccttaggaaaccaaaataaaattgtacgccccctgcatcagaattttncctgttttattcccctgattnaagaaaagtacaccatgataaaaaagcctaccctgaattccatcccaanagcagctttaagtgacctatcctaaaacttgatattcagggctgagcatggtggctcanacctgtaatcccagcactttggcaggctgaggcagtcggatcacaaggtcaggagtttgagaccggtctagccaatatggtgaaaccccagctctactaaaaatacaaaaattagctgggcatggcggcgcanacctgtagtcccagctgctccagaggctgaggcaagagaatcgcttgaacccacgagggggaggttgcagtgagctgagatcatgccactgcactccaacc

SEQ ID NO: 510772 - DNA, 105 bp, Homo sapiens
ctacttcacatgtttcagttcattgcgttcgcttcccttgccttatgtattcagcacgggatgacccattcgggccgggctttccccattcggctctctgcggat

SEQ ID NO: 510773 - DNA, 863 bp, Homo sapiens
gggaaaattttttaaaaatgctgctttgccatttttcccgtgcaggagaatatgcaaatggcctttctgtggtcgccctgtcacagccttgtaaaggttctgtggggatccatgcatcttgttgagttgagccttgtgccagcttggagggtttgattgtttttgctaatagagacagattttgtcattagagacaccgaagtgtgattctgtctacattcttctcaagtgtatggtcatagaaatccctttggctttaggtgcaattcagtggaaacacacacacacacacacacacacacacacccacaagcacacgagaatttcacgtgtggatattggcaagggatatagatgtgagccaatatttggtctgtagaatattaacatcgtggcaatcttcgtgatgtaaaatattatagtgaaagagcatctctagtgaggggaagggaagaagggaaaaaacaacacatctagggataaccaggtgcaacgagaccatttttcctatccacgagtcgtgtcttctgcggggggtgttgtgtctaaacagctatttgccagtttcttctaaacagtactgcgtggtgtcctcagatcgtgtaatatcgaccgtgactcgggcttatgcggaccatagtgctcgtaggggttacgagagtccctttatttggggccaatttaacacacaaagagcctcagttcttgtccaaatcttgtactacgccaggggccagtaaaaatgccttgtccacaatgggaagatctgcattacaaacattacacatgtgccttaagtggtccccaactcttgggttacacaggaattgagtccaattaaacacataacactaacgaacccc

SEQ ID NO: 510774 - DNA, 214 bp, Homo sapiens
  misc_feature (57)..(57): n is a, c, g, or t
gatcttctcaatgggggggcggctgtgctccagccaccccgaagtcactttctttgntacaactcccattgttgtcatcttaaactgacacagcgtttataacgtgtgcatacatcaccttctgacctcattttggtatttttcgacacaaggccctatcgaagatcctagaaaacttgaagaagcattaaagtcattctgttaaggtgcgtga

SEQ ID NO: 510775 - DNA, 154 bp, Homo sapiens
gggctgacctagagttcccgactagtcaacatacctattttgtccctattttccactcgcatcatatacttaggtacttttgacccatgcaaaaaaaatatctaacgttcagaactaccaataacaggaagaagagaaatttttttatttcttt

SEQ ID NO: 510776 - DNA, 441 bp, Homo sapiens
aaggtaggactgctagatacttcagctaagcaagacaatctcctctaactgaaaaaggacacgagctttgagcagaaattcaagggtcaagtcagtcttcagaaagcatcaggaacttgtaaatatggagactgctccctgtgggacatcagaaaccttctggctgagagggacacggagacacatcctgtgagggatcagacagtggtgatagtgggcacagtgatcatggcattcaattgtaagctatcatgcttccagaataatgtttctcagagaattgctttgtgaccaggacagcacagatacagtatctgaagacttcagagacattggtaatacaggttgagtattccttatccaaaatgcttgggcatgagaagtgttcagatataggcatatttgcctatgtgtgagaatatcctgggatagggcgatcaa

SEQ ID NO: 510777 - DNA, 820 bp, Homo sapiens
  misc_feature (660)..(660): n is a, c, g, or t
  misc_feature (707)..(707): n is a, c, g, or t
  misc_feature (756)..(756): n is a, c, g, or t
  misc_feature (766)..(766): n is a, c, g, or t
  misc_feature (808)..(808): n is a, c, g, or t
tttgacatatgttggttcaacttgtatatactattttgtaaactgtttttcccaattaacaatatacacagatgtcttcattttacacacccctctcctacacaccctcagacaaaaggcaaacctattcaagtttttgatttttgaaaatgtttcaatcagggaagctctgggtacatttcatgaagagaagtgatgaagatatccctctgacataacagaaagtggctgtttagctaggaaaatcatcaaataagtaagtagaaatgcatgcagaaacagaatgagtcaatcccaattaatgtttctgtgtttcctaaaagaaaataaacaccgcacatttgtctttagacagcttagtgtgcaccatggttccagtgtttttgctggaagtgtaaagttgttagcacaggcatatttctcagttagcagaaaacagctgctactggaattagtacccagaaatgaagttatttcctcccatcatcttactgaattgctctgctttacaaacaagaagtgaacattaattacttggaaaataggcctgacccagccaggatgaggctgacgcgtggaaagaggtaaaaataaaatgacaaagctctcttcacttcctatgctagtgtctgaaaacagagctgctcagaccattatggncatttcaaagttttcattcaataaatagttttttagacacctactgngccctacagggacatatatttttggcatacaatcaataactacaaccgnggtaagaaantaaggacctgctgaaccttacccctgcaaaaggacttatcgnccgaatttaaca

SEQ ID NO: 510778 - DNA, 590 bp, Homo sapiens
  misc_feature (21)..(21): n is a, c, g, or t
  misc_feature (75)..(75): n is a, c, g, or t
  misc_feature (79)..(79): n is a, c, g, or t
  misc_feature (81)..(81): n is a, c, g, or t
  misc_feature (84)..(84): n is a, c, g, or t
  misc_feature (86)..(86): n is a, c, g, or t
  misc_feature (88)..(88): n is a, c, g, or t
  misc_feature (93)..(93): n is a, c, g, or t
  misc_feature (97)..(97): n is a, c, g, or t
  misc_feature (104)..(105): n is a, c, g, or t
  misc_feature (108)..(108): n is a, c, g, or t
  misc_feature (111)..(111): n is a, c, g, or t
  misc_feature (162)..(162): n is a, c, g, or t
  misc_feature (204)..(204): n is a, c, g, or t
  misc_feature (273)..(273): n is a, c, g, or t
  misc_feature (285)..(285): n is a, c, g, or t
  misc_feature (482)..(482): n is a, c, g, or t
  misc_feature (497)..(497): n is a, c, g, or t
  misc_feature (503)..(503): n is a, c, g, or t
  misc_feature (588)..(588): n is a, c, g, or t
gggcagggtcagctgtcaggngccttgaacagggaggtctctgtacctaactttaccatcctaaatccttccctncttntnttntntnccctnccanttccttnnctngtnccaagttaatttcaggccttcaatgtactctcccaccatagcacttacccnttctgggtcatagaagagtgtggctgcaccctaacaccacanactcccaggcacaagttgaaggaatgaggggacctgggttagcttttttgttagggaaactctaacctntttctgctctcnccctcttctctatacctggtccgtagggacgctcttccctgtgtttactattactccccacctctccccacttccctgtgtctcctaatatttattgtctgtagtgtttgtatcatgtcactatcacaaagccttcagaaagaaaaaaaagcattctgcccaccactagcaccctgccatggttaaaatatctctanattggtgtctatatntctttnaaagtttataaaaagctttctgttatctgcagcttctaagggtgattggcctggcgagcactcagtgctcagacttggccttcanaa

SEQ ID NO: 510779 - DNA, 3243 bp, Homo sapiens
ggacgccgccttcgccgctggctccgtctgttggggggcgaacacgccgcggtcctcgtcgtggtgagcgcagccactcaggctggtcctgggggtggggctgtaggggaaagtgctaaagccgctgagtgaagtaagaactctgctagagaggaaatggctgcttcatcatcatcctcctcagctggtggggtcagtggaagttctgtcactggatctggtttcagtgtctcagaccttgccccaccacggaaagcccttttcacctaccccaaaggagctggagagatgttagaagatggctctgagagattcctctgcgaatctgtttttagctatcaagtggcatccacgcttaaacaggtgaaacatgatcagcaagttgctcggatggaaaaactagctggtttggtagaagagctggaggctgacgagtggcggtttaagcccatcgagcagctgctgggattcaccccctcttcaggttgatactgcctggatggtcacctctggtgcgcagcaagtgcaaagccagtgggggactttctcacagcttacatagccatccagagatccacagctacgtcactgaattgttaatgcacatttgtacttggtttctctgtatctattcacaggcaacaaatacttatatgtgtgatctttcagggaatgttttgtttatttgtttttaaaagtattgggaatcagattaagacaatcagtttcagagaaccaggaggtttggggttaagagatactcaaaaattttcacaagccaagtagggcatatatcagatttggccaactgaatggcgtctgtcctgtcatccatatggtgcctggaaatatttaccagtcaaggtcaaggtcagcatctgtggttaaaaatatagcattctgacctaaaaaagttattttgcagatgaatgtgttttcaactcaggacctatccaaatgaggaatttttaaatattcttttttttttcctatttttagacatcaattctatagattctgactttttctaacctcttatagacatgccaaatgctggcaaaaagaagtgctttttggatatggcagcacttgtaaaaataaagcagtaagcaaaatccttttaaacacagaaatcctgagttcttctcattggtggactcaagcaattctgtagcaaataaatcctttgaaagagctccaaattggtggcattatcctttcaaaatctcagggatttgggatgaagtgaagaggtcaaattactttttagaagaagggaatctaaaaaccatctctcctaaacaaatggtagactggctttacttaagggatatttgtctttataggagtacataaatttatcttaatgatatttaagtagttttttttttttttttttgggacgaagttttgctcttgttgcccaggctgtatcgcaatggcgcggtctctgctcactgcagcatccgcctcccgggttcgggcggttctcctgcctcagcctcccgagtagctgggattacaggcgcccgccaccacacccagctaattttttgtatatttggtagagacggggtttcaccgtgttgaccaggctggtctcgagcttctggcctcaggtgatccacctgcctcagcctcccaaattgctgggattacaggcgtgagccaccttgcccagccaatttttttttaaagagacatggtcttgctatgttgcccaggttggtcttgaactcctggcctcaagagatccccccaaccttggcctccaaagtgctgggattacaggcatgagccaccgcgcctggcctcaagtaagtttttataccatgataggggaaaacctggaaggctaagagatgtgctgttttccttcatgggaccccactttccacagtaaacaactggtataatcatttattacgttgtatgcaaattttgccttagacaacatttgtctggttccttattaataacttgcatctgatctgcttagagttgcttaattataagtaaatataatcccagtagcatttagccttaatctcaagagttcaaaatgtttaacacattctacctgacgggaggtggtgacctcattcagtcggttaagagcctgagccctgtgaagttaaacacctgctcatggtcacatagcccaggcagaagaaaatctcggacttggaatagatcccagttgcctgataattcatctcattattgcctctaaagcaaattggagactgggcacagtggctcccacctttaatcccagcacctggggaggctgaggtgagtggatcactagaggtcaggagttcaagaccagtctggccgacatggtgaaactcagtctctattgaaaatacaaaaattagcccagtgtggtggcacacacttgtaatcccagctactcaggaggctgaggcatgagaatcgcttaaacccaggaggcggaggttgcagtgagctgagatcacaccattgcactctagtctgggtgacagagcgagactctgtctcaaaaaaaaaaaaataaagccgggcgtggtggctcacgcctgtaatcccggcacttggggaggctgaggcaggcggattgcctgagaatcgggagttcgagaccagcctggccagcatggtgaaaccttgtctctactaaaactacaaaaaaaatgggccgggcgtggtggcgggcgcctgtaatcccagctactcgggaggctgaggcagcagaatcgtttgaacccgggaggcggaggttgcagtgagtggagatcgtgcctgtgtgctccagcctgagcaacaagagcgaaactgtctcaaaaaaaagaagaaaataaataaataaaaatcagagcacaagaagtaccagtccaccaactcacattttctatattaataattcttaactaaaagaagttccatattcgacagcattttagttttttaatagtacttattagcatcaaccatcttgataatcaccaagggaaaaattaaaaatacctagactgcaataaacctttaaattggattttcagtgagaatttagaagcaatcactacctttctcgtttcatttgtgtaaccatgcagcataggcactgtgttacatcatctttacgctttggtatttgaacttattacagaattttttctctaaattggatgtttctttatatgaccttggaaactgaagtgatcttagcattaaacaaaaatgctttttaaagcaaaa

SEQ ID NO: 510780 - DNA, 3195 bp, Homo sapiens
ggacgccgccttcgccgctggctccgtctgttggggggcgaacacgccgcggtcctcgtcgtggtgagcgcagccactcaggctggtcctgggggtggggctgtaggggaaagtgctaaagccgctgagtgaagtaagaactctgctagagaggaaatggctgcttcatcatcatcctcctcagctggtggggtcagtggaagttctgtcactggatctggtttcagtgtctcagaccttgccccaccacggaaagcccttttcacctaccccaaaggagctggagagatgttagaagatggctctgagagattcctctgcgaatctgtttttagctatcaagtggcatccacgcttaaacaggtgaaacatgatcagcaagttgctcggatggaaaaactagctggtttggtagaagagctggaggctgacgagtggcggtttaagcccatcgagcagctgctgggattcaccccctcttcaggttgatactgcctggatggtcacctctggtgcgcagcaagtgcaaagccagtgggggactttctcacagcttacatagccatccagagatccacagctacgtcactgaattgttaatgcacatttgtacttggtttctctgtatctattcacaggcaacaaatacttatatgtgtgatctttcagggaatgttttgtttatttgtttttaaaagtattgggaatcagattaagacaatcagtttcagagaaccaggaggtttggggttaagagatactcaaaaattttcacaagccaagtagggcatatatcagatttggccaactgaatggcgtctgtcctgtcatccatatggtgcctggaaatatttaccagtcaaggtcaaggtcagcatctgtggttaaaaatatagcattctgacctaaaaaagttattttgcagatgaatgtgttttcaactcaggacctatccaaatgaggaatttttaaatattcttttttttttcctatttttagacatcaattctatagattctgactttttctaacctcttatagacatgccaaatgctggcaaaaagaagtgctttttggatatggcagcacttgtaaaaataaagcagtaagcaaaatccttttaaacacagaaatcctgagttcttctcattggtggactcaagcaattctgtagcaaataaatcctttgaaagagctccaaattggtggcattatcctttcaaaatctcagggatttgggatgaagtgaagaggtcaaattactttttagaagaagggaatctaaaaaccatctctcctaaacaaatggtagactggctttacttaagggatatttgtctttataggagtacataaatttatcttaatgatatttaagtagttttttttttttttttttgggacgaagttttgctcttgttgcccaggctgtatcgcaatggcgcggtctctgctcactgcagcatccgcctcccgggttcgggcggttctcctgcctcagcctcccgagtagctgggattacaggcgcccgccaccacacccagctaattttttgtatatttggtagagacggggtttcaccgtgttgaccaggctggtctcgagcttctggcctcaggtgatccacctgcctcagcctcccaaattgctgggattacaggcgtgagccaccttgcccagccaatttttttttaaagagacatggtcttgctatgttgcccaggttggtcttgaactcctggcctcaagagatcccgcctggcctcaagtaagtttttataccatgataggggaaaacctggaaggctaagagatgtgctgttttccttcatgggaccccactttccacagtaaacaactggtataatcatttattacgttgtatgcaaattttgccttagacaacatttgtctggttccttattaataacttgcatctgatctgcttagagttgcttaattataagtaaatataatcccagtagcatttagccttaatctcaagagttcaaaatgtttaacacattctacctgacgggaggtggtgacctcattcagtcggttaagagcctgagccctgtgaagttaaacacctgctcatggtcacatagcccaggcagaagaaaatctcggacttggaatagatcccagttgcctgataattcatctcattattgcctctaaagcaaattggagactgggcacagtggctcccacctttaatcccagcacctggggaggctgaggtgagtggatcactagaggtcaggagttcaagaccagtctggccgacatggtgaaactcagtctctattgaaaatacaaaaattagcccagtgtggtggcacacacttgtaatcccagctactcaggaggctgaggcatgagaatcgcttaaacccaggaggcggaggttgcagtgagctgagatcacaccattgcactctagtctgggtgacagagcgagactctgtctcaaaaaaaaaaaaataaagccgggcgtggtggctcacgcctgtaatcccggcacttggggaggctgaggcaggcggattgcctgagaatcgggagttcgagaccagcctggccagcatggtgaaaccttgtctctactaaaactacaaaaaaaatgggccgggcgtggtggcgggcgcctgtaatcccagctactcgggaggctgaggcagcagaatcgtttgaacccgggaggcggaggttgcagtgagtggagatcgtgcctgtgtgctccagcctgagcaacaagagcgaaactgtctcaaaaaaaagaagaaaataaataaataaaaatcagagcacaagaagtaccagtccaccaactcacattttctatattaataattcttaactaaaagaagttccatattcgacagcattttagttttttaatagtacttattagcatcaaccatcttgataatcaccaagggaaaaattaaaaatacctagactgcaataaacctttaaattggattttcagtgagaatttagaagcaatcactacctttctcgtttcatttgtgtaaccatgcagcataggcactgtgttacatcatctttacgctttggtatttgaacttattacagaattttttctctaaattggatgtttctttatatgaccttggaaactgaagtgatcttagcattaaacaaaaatgctttttaaagcaaaa

SEQ ID NO: 510781 - DNA, 359 bp, Homo sapiens
  misc_feature (41)..(41): n is a, c, g, or t
  misc_feature (58)..(58): n is a, c, g, or t
ttttttgggagtatgaaaagtaagtgcctttcttaaatctnaataataaatgagagtnccagaaaaccagtgcttcaaacaaatttgatttacttgaatttttttttattttaaatcacactttgggaggctgaggcagaaggatcacttgagcccaggagtttgacaccagcctgggcaacatggtgacactctgtctatacaagaaatataaaaattagccaggcatggtggcacacgcctttggtcccagctgctcaaaaggattgcctgagcctgggaggttgaggctgcagtgagctatgattgtgccactgcacaacagcctgggtgacagagtgagaccttgtctaaaaaaa

SEQ ID NO: 510782 - DNA, 2929 bp, Homo sapiens
ggacgccgccttcgccgctggctccgtctgttggggggcgaacacgccgcggtcctcgtcgtggtgagcgcagccactcaggctggtcctgggggtggggctgtaggggaaagtgctaaagccgctgagtgaagtaagaactctgctagagaggaaatggctgcttcatcatcatcctcctcagctggtggggtcagtggaagttctgtcactggatctggtttcagtgtctcagaccttgccccaccacggaaagcccttttcacctaccccaaaggagctggagagatgttagaagatggctctgagagattcctctgcgaatctgtttttagctatcaagtggcatccacgcttaaacaggtgaaacatgatcagcaagttgctcggatggaaaaactagctggtttggtagaagagctggaggctgacgagtggcggtttaagcccatcgagcagctgctgggattcaccccctcttcaggttgatactgcctggatggtcacctctggtgcgcagcaagtgcaaagccagtgggggactttctcacagcttacatagccatccagagatccacagctacgtcactgaattgttaatgcacatttgtacttggtttctctgtatctattcacaggcaacaaatacttatatgtgtgatctttcagggaatgttttgtttatttgtttttaaaagtattgggaatcagattaagacaatcagtttcagagaaccaggaggtttggggttaagagatactcaaaaattttcacaagccaagtagggcatatatcagatttggccaactgaatggcgtctgtcctgtcatccatatggtgcctggaaatatttaccagtcaaggtcaaggtcagcatctgtggttaaaaatatagcattctgacctaaaaaagttattttgcagatgaatgtgttttcaactcaggacctatccaaatgaggaatttttaaatattcttttttttttcctatttttagacatcaattctatagattctgactttttctaacctcttatagacatgccaaatgctggcaaaaagaagtgctttttggatatggcagcacttgtaaaaataaagcagtaagcaaaatccttttaaacacagaaatcctgagttcttctcattggtggactcaagcaattctgtagcaaataaatcctttgaaagagctccaaattggtggcattatcctttcaaaatctcagggatttgggatgaagtgaagaggtcaaattactttttagaagaagggaatctaaaaaccatctctcctaaacaaatggtagactggctttacttaagggatatttgtctttataggagtacataaatttatcttaatgatatttaagtagttttttttttttttttttgggacgaagttttgctcttgttgcccaggctgtatcgcaatggcgcggtctctgctcactgcagcatccgcctcccgggttcgggcggttctcctgcctcagcctcccgagtagctgggattacaggcgcccgccaccacacccagctaattttttgtatatttggtagagacggggtttcaccgtgttgaccaggctggtctcgagcttctggcctcaggtgatccacctgcctcagcctcccaaattgctgggattacaggcgtgagccaccttgcccagccaatttttttttaaagagacatggtcttgctatgttgcccaggttggtcttgaactcctggcctcaagagatccccccaaccttggcctccaaagtgctgggattacaggcatgagccaccgcgcctggcctcaagtaagtttttataccatgataggggaaaacctggaaggctaagagatgtgctgttttccttcatgggaccccactttccacagtaaacaactggtataatcatttattacgttgtatgcaaattttgccttagacaacatttgtctggttccttattaataacttgcatctgatctgcttagagttgcttaattataagtaaatataatcccagtagcatttagccttaatctcaagagttcaaaatgtttaacacattctacctgacgggaggtggtgacctcattcagtcggttaagagcctgagccctgtgaagttaaacacctgctcatggtcacatagcccaggcagaagaaaatctcggacttggaatagatcccagttgcctgataattcatctcattattgcctctaaagcaaattggagactgggcacagtggctcccacctttaatcccagcacctggggaggctgaggtgagtggatcactagaggtcaggagttcaagaccagtctggccgacatggtgaaactcagtctctattgaaaatacaaaaattagcccagtgtggtggcacacacttgttcgggaggctgaggcagcagaatcgtttgaacccgggaggcggaggttgcagtgagtggagatcgtgcctgtgtgctccagcctgagcaacaagagcgaaactgtctcaaaaaaaagaagaaaataaataaataaaaatcagagcacaagaagtaccagtccaccaactcacattttctatattaataattcttaactaaaagaagttccatattcgacagcattttagttttttaatagtacttattagcatcaaccatcttgataatcaccaagggaaaaattaaaaatacctagactgcaataaacctttaaattggattttcagtgagaatttagaagcaatcactacctttctcgtttcatttgtgtaaccatgcagcataggcactgtgttacatcatctttacgctttggtatttgaacttattacagaattttttctctaaattggatgtttctttatatgaccttggaaactgaagtgatcttagcattaaacaaaaatgctttttaaagcaaaa

SEQ ID NO: 510783 - DNA, 2025 bp, Homo sapiens
ggacgccgccttcgccgctggctccgtctgttggggggcgaacacgccgcggtcctcgtcgtggtgagcgcagccactcaggctggtcctgggggtggggctgtaggggaaagtgctaaagccgctgagtgaagtaagaactctgctagagaggaaatggctgcttcatcatcatcctcctcagctggtggggtcagtggaagttctgtcactggatctggtttcagtgtctcagaccttgccccaccacggaaagcccttttcacctaccccaaaggagctggagagatgttagaagatggctctgagagattcctctgcgaatctgtttttagctatcaagtggcatccacgcttaaacaggtgaaacatgatcagcaagttgctcggatggaaaaactagctggtttggtagaagagctggaggctgacgagtggcggtttaagcccatcgagcagctgctgggattcaccccctcttcaggttgatactgcctggatggtcacctctggtgcgcagcaagtgcaaagccagtgggggactttctcacagcttacatagccatccagagatccacagctacgtcactgaattgttaatgcacatttgtacttggtttctctgtatctattcacaggcaacaaatacttatatgtgtgatctttcagggaatgttttgtttatttgtttttaaaagtattgggaatcagattaagacaatcagtttcagagaaccaggaggtttggggttaagagatactcaaaaattttcacaagccaagtagggcatatatcagatttggccaactgaatggcgtctgtcctgtcatccatatggtgcctggaaatatttaccagtcaaggtcaaggtcagcatctgtggttaaaaatatagcattctgacctaaaaaagttattttgcagatgaatgtgttttcaactcaggacctatccaaatgaggaatttttaaatattcttttttttttcctatttttagacatcaattctatagattctgactttttctaacctcttatagacatgccaaatgctggcaaaaagaagtgctttttggatatggcagcacttgtaaaaataaagcagtaagcaaaatccttttaaacacagaaatcctgagttcttctcattggtggactcaagcaattctgtagcaaataaatcctttgaaagagctccaaattggtggcattatcctttcaaaatctcagggatttgggatgaagtgaagaggtcaaattactttttagaagaagggaatctaaaaaccatctctcctaaacaaatggtagactggctttacttaagggatatttgtctttataggagtacataaatttatcttaatgatatttaagtagttttttttttttttttttgggacgaagttttgctcttgttgcccaggctgtatcgcaatggcgcggtctctgctcactgcagcatccgcctcccgggttcgggcggttctcctgcctcagtcgggaggctgaggcagcagaatcgtttgaacccgggaggcggaggttgcagtgagtggagatcgtgcctgtgtgctccagcctgagcaacaagagcgaaactgtctcaaaaaaaagaagaaaataaataaataaaaatcagagcacaagaagtaccagtccaccaactcacattttctatattaataattcttaactaaaagaagttccatattcgacagcattttagttttttaatagtacttattagcatcaaccatcttgataatcaccaagggaaaaattaaaaatacctagactgcaataaacctttaaattggattttcagtgagaatttagaagcaatcactacctttctcgtttcatttgtgtaaccatgcagcataggcactgtgttacatcatctttacgctttggtatttgaacttattacagaattttttctctaaattggatgtttctttatatgaccttggaaactgaagtgatcttagcattaaacaaaaatgctttttaaagcaaaa

SEQ ID NO: 510784 - DNA, 420 bp, Homo sapiens
  misc_feature (303)..(303): n is a, c, g, or t
  misc_feature (308)..(308): n is a, c, g, or t
acgccgtgacacaacggggggagcggaaagctggcctttcacagaaaaccatggttttccagtgaaattggtgggccattccaaaacaaagctaaaggttcccaaacttccagaatggaagctgtttcccccaactccattacctatacaacaggagggatggcttttggtagaaccctttcttccagggtgcaattttggcattatttaccctccccggatctaaaagcaatatggcgtccaggaaagtgcggctgatgcagctgggccatcattgtgatgcagctggagcaaaaggcggcnccgtncacttcagccagatccatttgtctcccacctgggtgttgtcccagggctggtattggggccggcaagtctctgacctggtgtaaaacccgggcagtcgagataagtccaatg

SEQ ID NO: 510785 - DNA, 239 bp, Homo sapiens
gctcaatgccaaggagatctgtgctgctggttgggttcatgtgatgaggtgaaatgagatgcccatgcagcactcatggtcccctgccacagtggcctccaatgaatgtcatcccatgccctgagaacttgtttggcgcccattaatgaagcacgaggtcccagcccaagtctgatgttaactagtgaggtgtgtgaattccatggtgaaggaggtgaccacactgcttgacaacaaca

SEQ ID NO: 510786 - DNA, 1128 bp, Homo sapiens
cggacgcgtgggtcgacccacgcgtccgggcgaacacgccgcggtcctcgtcgtgtgaagtaagaactctgctagagaggaaatggctgcttcatcatcatcctcctcagctggtggggtcagtggaagttctgtcactggatctggtttcagtgtctcagaccttgccccaccacggaaagcccttttcacctaccccaaaggagctggagagatgttagaagatggctctgagagattcctctgcgaatctgtttttagctatcaagtggcatccacgcttaaacaggtgaaacatgatcagcaagttgctcggatggaaaaactagctggtttggtagaagagctggaggctgacgagtggcggtttaagcccatcgagcagctgctgggattcaccccctcttcaggttgatactgcctggatggtcacctctggtgcgcagcaagtgcaaagccagtgggggactttctcacagcttacatagccatccagagatccacagctacgtcactgaattgttaatgcacatttgtacttggtttctctgtatctattcacaggcaacaaatacttatatgtgtgatctttcagggaatgttttgtttatttgtttttaaaagtattgggaatcagattaagacaatcagtttcagagaaccaggaggtttggggttaagagatactcaaaaattttcacaagccaagtagggcatatatcagatttggccaactgaatggcgtctgtcctgtcatccatatggtgcctggaaatatttaccagtcaaggtcaaggtcagcatctgtggttaaaaatatagcattctgacctaaaaaagttattttgcagatgaatgtgttttcaactcaggacctatccaaatgaggaatttttaaatattcttttttttttcctatttttagacatcaattctatagattctgactttttctaacctcttatagacatgccaaatgctggcaaaaagaagtgctttttggatatggcagcacttgtaaaaataaagcagtaagcaaaatccttttaaacacagaaatcctgagttcttctcattggtggactcaagcaattctgtagcaaataaatcctttgaaagagctccaaa

SEQ ID NO: 510787 - DNA, 993 bp, Homo sapiens
tggaaaaaaaaggacaccccttcccccccccttgttctttaacccttttttaaaaaggggggaaaacacccgggggttaaggattgggggtgtccagccgtggtgtttcttgtggcccccattaaactctgtgatttattggggctttctactttctcccacgaaagcctttattattgtggggagattacaccaactggtgttgttttacccaaaggtcgtcgtttattttgttcccttcttttcttactttattgctttcctccccagttttcccgcgcggtggccccacaacgtttttttgtcccccacattgtttgcgccaccgccgtttttgggttttcgtagcccccgttattttgtgaccggcctgtgctaatttatgtcacaacaaaggggtggaccgtccgtgggggtcattaaacgcttggggagattctgccgcgatcatcccacccaatcttagcgagggaaaaaaaagtgtgcatggtctttcgtagttgcacgctagacgcttcatcaaaacagggtgcgccacttattttgaagggacacatatcaaaagcggtttagtaacccctgtgtatttacaacaagggggggccagcaagccccgagagaaaagcgcttctacaagaatacgtgcagcttaacgaaaaaagtcgttcctgatggcccacggttgctcacagaaattatttgcccctgttctcacgggacaaagaaaacacgaccttttggaaggttgtcgaattctaccgcatgaaccaaattttttgacaacacctcccgaggggtgcaaactcaatatcttgaagatgccaaactttcagggatgtgtaacacacgcccccaatgccatgagagatatggccgcaacgaatcagccgcgagaagcaaatggtctcttttggaaatagcatgcgtgtgaataacacgggggaccatcacaggccagcatggacaccaaccacaagggttggaacggttgct

SEQ ID NO: 510788 - DNA, 415 bp, Homo sapiens
gtagattaactacttaatgtaactgggatgactcagtctctatgttattaatctcatcagactaaactaaggcttaaggaaagggtgtaagtatcagtaaccctctgggtttcactggagctttcttcagggctggggaagggcaggtaagtagcctgctgtagggaggatggagcaggacacatgtgttaaggatatattctgatgccaccagtctgtaacctatgaaacttacatcttggctttaggtcctctgaagtataaaactagtgatgtagctgttattaacaagtcagttttgccttcagtcttctaacttgttttctgtttccttcataattaaaatgctcacttgataatactgccttcctgtaatgatagatgttcctcattctaccagcgtcagtatagatag

SEQ ID NO: 510789 - DNA, 1528 bp, Homo sapiens
ggacgccgccttcgccgctggctccgtctgttggggggcgaacacgccgcggtcctcgtcgtggtgagcgcagccactcaggctggtcctgggggtggggctgtaggggaaagtgctaaagccgctgaggtgcagtggctcacgcctgtaatcccagcactttgggaggccaaggcaggtggatcacctgaggtcgggagttcaagaccagcctgaccaacatggagaaaccccatctctactagaaatacaaaattagccaggcatggtggtgcatgcctgtaatcccagctactcgggaggctgaagcaggagaatcgcttgaatccgggaggcagaggttgctgtgagccgagatcgcgccatttccagcctgggcaacaagagggaaactccgtctcaaaaaaaaaaaaaaaaaggaagagaaaagaaaacttaagtttcagccaggcatgtgaagtaagaactctgctagagaggaaatggctgcttcatcatcatcctcctcagctggtggggtcagtggaagttctgtcactggatctggtttcagtgtctcagaccttgccccaccacggaaagcccttttcacctaccccaaaggagctggagagatgttagaagatggctctgagagattcctctgcgaatctgtttttagctatcaagtggcatccacgcttaaacaggtgaaacatgatcagcaagttgctcggatggaaaaactagctggtttggtagaagagctggaggctgacgagtggcggtttaagcccatcgagcagctgctgggattcaccccctcttcaggttgatactgcctggatggtcacctctggtgcgcagcaagtgcaaagccagtgggggactttctcacagcttacatagccatccagagatccacagctacgtcactgaattgttaatgcacatttgtacttggtttctctgtatctattcacaggcaacaaatacttatatgtgtgatctttcagggaatgttttgtttatttgtttttaaaagtattgggaatcagattaagacaatcagtttcagagaaccaggaggtttggggttaagagatactcaaaaattttcacaagccaagtagggcatatatcagatttggccaactgaatggcgtctgtcctgtcatccatatggtgcctggaaatatttaccagtcaaggtcaaggtcagcatctgtggttaaaaatatagcattctgacctaaaaaagttattttgcagatgaatgtgttttcaactcaggacctatccaaatgaggaatttttaaatattcttttttttttcctatttttagacatcaattctatagattctgactttttctaacctcttatagacatgccaaatgctggcaaaaagaagtgctttttggatatggcagcacttgtaaaaataaagcagtaagcaaaatccttttaaacacagaaatcctgagttcttctcattggtggactcaagcaattctgtagcaaataaatcctttgaaagagctccaaa

SEQ ID NO: 510790 - DNA, 169 bp, Homo sapiens
ccatctttggttctttacctaccacacactgctactggaacaccttctacacacacctacggggggactcctctacgacgtcgacccgtgcacggcatgcacacgcttgtggcacctggcccccgtcgttttaccacaccgtcgttgacctggggaccggcctaccgta

SEQ ID NO: 510791 - DNA, 1520 bp, Homo sapiens
cggacgcgtgggtcgacccacgcgtccgggcgaacacgccgcggtcctcgtcgtggtgagcgcagccactcaggctggtcctgggggtggggctgtaggggaaagtgctaaagccgctgaggtgcagtggctcacgcctgtaatcccagcactttgggaggccaaggcaggtggatcacctgaggtcgggagttcaagaccagcctgaccaacatggagaaaccccatctctactagaaatacaaaattagccaggcatggtggtgcatgcctgtaatcccagctactcgggaggctgaagcaggagaatcgcttgaatccgggaggcagaggttgctgtgagccgagatcgcgccatttccagcctgggcaacaagagggaaactccgtctcaaaaaaaaaaaaaaaaaggaagagaaaagaaaacttaagtttcagccaggcatgtgaagtaagaactctgctagagaggaaatggctgcttcatcatcatcctcctcagctggtggggtcagtggaagttctgtcactggatctggtttcagtgtctcagaccttgccccaccacggaaagcccttttcacctaccccaaaggagctggagagatgttagaagatggctctgagagattcctctgcgaatctgtttttagctatcaagtggcatccacgcttaaacaggtgaaacatgatcagcaagttgctcggatggaaaaactagctggtttggtagaagagctggaggctgacgagtggcggtttaagcccatcgagcagctgctgggattcaccccctcttcaggttgatactgcctggatggtcacctctggtgcgcagcaagtgcaaagccagtgggggactttctcacagcttacatagccatccagagatccacagctacgtcactgaattgttaatgcacatttgtacttggtttctctgtatctattcacaggcaacaaatacttatatgtgtgatctttcagggaatgttttgtttatttgtttttaaaagtattgggaatcagattaagacaatcagtttcagagaaccaggaggtttggggttaagagatactcaaaaattttcacaagccaagtagggcatatatcagatttggccaactgaatggcgtctgtcctgtcatccatatggtgcctggaaatatttaccagtcaaggtcaaggtcagcatctgtggttaaaaatatagcattctgacctaaaaaagttattttgcagatgaatgtgttttcaactcaggacctatccaaatgaggaatttttaaatattcttttttttttcctatttttagacatcaattctatagattctgactttttctaacctcttatagacatgccaaatgctggcaaaaagaagtgctttttggatatggcagcacttgtaaaaataaagcagtaagcaaaatccttttaaacacagaaatcctgagttcttctcattggtggactcaagcaattctgtagcaaataaatcctttgaaagagctccaaa

SEQ ID NO: 510792 - DNA, 223 bp, Homo sapiens
acggtagcacgcacgtgttgggccacgcaccgtgatatggaaggattggtgaagagatgtcagaatttctttggtctgctcttaggggaggacgagcttttgatttttgactatccagtccccttgaaaggaggctccttgctgtatagcaaagctttctcggtgggagagttcttgggtaggattgctgggataacaggaaggagacggtgcgttggcccaa

SEQ ID NO: 510793 - DNA, 242 bp, Homo sapiens
  misc_feature (7)..(7): n is a, c, g, or t
  misc_feature (105)..(105): n is a, c, g, or t
  misc_feature (121)..(121): n is a, c, g, or t
  misc_feature (149)..(149): n is a, c, g, or t
  misc_feature (151)..(151): n is a, c, g, or t
aagcgcncagtactgcctcatgactgagttctcacgagatctggttgtttaaaagtgtgtaacccagccgagcaggtggctcctgcctgctatccccgcactttnggaggctgaggcaccntaagtcaggagttccagaccagcttggncnatatgagaaaactttgtatctactgtaaatagcaaaattacccgggtatagtggcacatgcctgtagtcccagctacttagggcgctcgtg

SEQ ID NO: 510794 - DNA, 379 bp, Homo sapiens
gacccgttctgctgctgctgctctcccgcctctgcctggactacgagacggccaccatctactacatcctcactctcactgatgaacaggttctggagcaggatcagctcccagagacgcccgtgagcacgctgagagcagagtccagacaaacggcgcggcggctgctgacccactacgggaagaggcagagcctggtcatatcacagatgctgcgcaagagcatggagactcgcgactggctcagcactctggagccccggaatgtgcgagccgccatgaagcgcatggtgaaggataccaccgtcatcgacgtgcagatgtggctcctgtacgaagagtgtgttcgcaaggcccagagcagcgactccagcaagag

SEQ ID NO: 510795 - DNA, 1462 bp, Homo sapiens
ggacgccgccttcgccgctggctccgtctgttggggggcgaacacgccgcggtcctcgtcgtggtgcagtggctcacgcctgtaatcccagcactttgggaggccaaggcaggtggatcacctgaggtcgggagttcaagaccagcctgaccaacatggagaaaccccatctctactagaaatacaaaattagccaggcatggtggtgcatgcctgtaatcccagctactcgggaggctgaagcaggagaatcgcttgaatccgggaggcagaggttgctgtgagccgagatcgcgccatttccagcctgggcaacaagagggaaactccgtctcaaaaaaaaaaaaaaaaaggaagagaaaagaaaacttaagtttcagccaggcatgtgaagtaagaactctgctagagaggaaatggctgcttcatcatcatcctcctcagctggtggggtcagtggaagttctgtcactggatctggtttcagtgtctcagaccttgccccaccacggaaagcccttttcacctaccccaaaggagctggagagatgttagaagatggctctgagagattcctctgcgaatctgtttttagctatcaagtggcatccacgcttaaacaggtgaaacatgatcagcaagttgctcggatggaaaaactagctggtttggtagaagagctggaggctgacgagtggcggtttaagcccatcgagcagctgctgggattcaccccctcttcaggttgatactgcctggatggtcacctctggtgcgcagcaagtgcaaagccagtgggggactttctcacagcttacatagccatccagagatccacagctacgtcactgaattgttaatgcacatttgtacttggtttctctgtatctattcacaggcaacaaatacttatatgtgtgatctttcagggaatgttttgtttatttgtttttaaaagtattgggaatcagattaagacaatcagtttcagagaaccaggaggtttggggttaagagatactcaaaaattttcacaagccaagtagggcatatatcagatttggccaactgaatggcgtctgtcctgtcatccatatggtgcctggaaatatttaccagtcaaggtcaaggtcagcatctgtggttaaaaatatagcattctgacctaaaaaagttattttgcagatgaatgtgttttcaactcaggacctatccaaatgaggaatttttaaatattcttttttttttcctatttttagacatcaattctatagattctgactttttctaacctcttatagacatgccaaatgctggcaaaaagaagtgctttttggatatggcagcacttgtaaaaataaagcagtaagcaaaatccttttaaacacagaaatcctgagttcttctcattggtggactcaagcaattctgtagcaaataaatcctttgaaagagctccaaa

SEQ ID NO: 510796 - DNA, 835 bp, Homo sapiens
  misc_feature (139)..(139): n is a, c, g, or t
  misc_feature (145)..(145): n is a, c, g, or t
  misc_feature (151)..(151): n is a, c, g, or t
  misc_feature (176)..(176): n is a, c, g, or t
  misc_feature (190)..(190): n is a, c, g, or t
  misc_feature (202)..(202): n is a, c, g, or t
  misc_feature (210)..(210): n is a, c, g, or t
  misc_feature (252)..(252): n is a, c, g, or t
  misc_feature (290)..(290): n is a, c, g, or t
  misc_feature (764)..(764): n is a, c, g, or t
tgtgacgaggagggtgattgtagaggaggtgggtgttagctggagggtggttgatagtggagaccggtttaaggtgctggcgtggtgtcatggggtagcggagtaaaatgggtagctcctcgaaatcctctgtctggangatganataganggctgctccacccaagggggtgagngttaccatggcaancatgcagacgancagcccancccgggctctgcgtgcatgtccatcctggtcccttcatctcnatatcaccagctctgcagtgctccaaactttgggtttntacggtccctagttttgtatgagcctcatcttgatcctaagagccacctctccctaacactcccgatttttctcacctctggaggacgtcccatcctctgataccataggtctcctctgatctctgcattactcctcctccccaagtttagccagagccagtgccccctagacttcctcatctcttccctgccatggcccctggtcctggacagatgattacctgaagcaaagcccaggatgaccacagccatcagccagcagaatcgcatcaggtcgccaaaaatcatctagaaggagcaggaggcagagaacatctgcacacattccccaagcaattgccccatccagcctctaacaggtctcaccccgacaagtctcacagctccacctctgggacagggattggctatctatggcctgtggaccagatctacctgacctgctttggtgtggcctttgaactgaaaaggtntctacatttttaaaaggattgttaaaaaagaagaaaaacatgcagtgaggccatgtgtggcttgcagaacc

SEQ ID NO: 510797 - DNA, 253 bp, Homo sapiens
ctggaacctcatgtgatcgacaccgagcaccattttaaataaggctctctagcaaagtgggagaaattaagaagctatggttccaccgctcagctagcaatgaaagcaaacttcatgaccaggtgaaccctaaaagaatgttgcggagcttgaagaacactgctgaatcaggcggcagacgaagagaaaaacaaagaattgaaggaaaaacaccccacagatctgcaatttcagtgctgaagcaagagccctg

SEQ ID NO: 510798 - DNA, 1548 bp, Homo sapiens
ggacgccgccttcgccgctggctccgtctgttggggggcgaacacgccgcggtcctcgtcgtggtgagcgcagccactcaggctggtcctgggggtggggctgtaggggaaagtgctaaagccgctgaggtaagaggccgaggggtcgagggccctcgggagcttggtgaaaagggagttaacccccaggatcctacctgcagggactagaaaaatggagaaggtaggaggagaaacaggagactgctgcagcagacgtgcgataggaaatttccccaggccgggtttgaccgagtgcgcatgcgggccgagggctggcgcctgcgcagtgggagaatcgcttgaatccgggaggcagaggttgctgtgagccgagatcgcgccatttccagcctgggcaacaagagggaaactccgtctcaaaaaaaaaaaaaaaaaggaagagaaaagaaaacttaagtttcagccaggcatgtgaagtaagaactctgctagagaggaaatggctgcttcatcatcatcctcctcagctggtggggtcagtggaagttctgtcactggatctggtttcagtgtctcagaccttgccccaccacggaaagcccttttcacctaccccaaaggagctggagagatgttagaagatggctctgagagattcctctgcgaatctgtttttagctatcaagtggcatccacgcttaaacaggtgaaacatgatcagcaagttgctcggatggaaaaactagctggtttggtagaagagctggaggctgacgagtggcggtttaagcccatcgagcagctgctgggattcaccccctcttcaggttgatactgcctggatggtcacctctggtgcgcagcaagtgcaaagccagtgggggactttctcacagcttacatagccatccagagatccacagctacgtcactgaattgttaatgcacatttgtacttggtttctctgtatctattcacaggcaacaaatacttatatgtgtgatctttcagggaatgttttgtttatttgtttttaaaagtattgggaatcagattaagacaatcagtttcagagaaccaggaggtttggggttaagagatactcaaaaattttcacaagccaagtagggcatatatcagatttggccaactgaatggcgtctgtcctgtcatccatatggtgcctggaaatatttaccagtcaaggtcaaggtcagcatctgtggttaaaaatatagcattctgacctaaaaaagttattttgcagatgaatgtgttttcaactcaggacctatccaaatgaggaatttttaaatattcttttttttttcctatttttagacatcaattctatagattctgactttttctaacctcttatagacatgccaaatgctggcaaaaagaagtgctttttggatatggcagcacttgtaaaaataaagcagtaagcaaaatccttttaaacacagaaatcctgagttcttctcattggtggactcaagcaattctgtagcaaataaatcctttgaaagagctccaaa

SEQ ID NO: 510799 - DNA, 1782 bp, Homo sapiens
  misc_feature (25)..(25): n is a, c, g, or t
  misc_feature (29)..(29): n is a, c, g, or t
  misc_feature (34)..(34): n is a, c, g, or t
  misc_feature (43)..(43): n is a, c, g, or t
  misc_feature (49)..(49): n is a, c, g, or t
  misc_feature (63)..(63): n is a, c, g, or t
taggggtttaccccagacatatcantaangaatncctcttacnctgctntagcatctcacatntctgctggatctcttcctcactcaaaagcacccaacatcccaatagttagatgaagctttttaggattctggaaaatgctgctgtcaaccccatgatccatggagcacttcgccagtacttcctcctggaatctcaggaatccttcctgaacctcaacttcattgaggaaaaaggcaaggaagtgagtgaagggctgctttcttcgaaaagtgtccaaaagaacatcaatccgtgttcgggctgaaattacaccatttcgatgctggccagtgattacaatttccccgtcttgtccaggtttaggaatgctaatagaagttttggtctccatttctattttcttcctagtgtcccctctctttccaactatatgcttatagagcaagctgggggccctcaaagtagaccggaatccttgtggggtctgctccacctcgtaggcatcacagggctcatcagcacactccatggagccttgatagaagtcctcttcatcttcttcatgttgataggtctgttcttggactggattcttcctgtaattccggccatcaattcttataagctgtggacgcagaacttccatgacactttctccaaatgatattccaattatgccctgcagggactagaaaaatggagaagtgaagtaagaactctgctagagaggaaatggctgcttcatcatcatcctcctcagctggtggggtcagtggaagttctgtcactggatctggtttcagtgtctcagaccttgccccaccacggaaagcccttttcacctaccccaaaggagctggagagatgttagaagatggctctgagagattcctctgcgaatctgtttttagctatcaagtggcatccacgcttaaacaggtgaaacatgatcagcaagttgctcggatggaaaaactagctggtttggtagaagagctggaggctgacgagtggcggtttaagcccatcgagcagctgctgggattcaccccctcttcaggttgatactgcctggatggtcacctctggtgcgcagcaagtgcaaagccagtgggggactttctcacagcttacatagccatccagagatccacagctacgtcactgaattgttaatgcacatttgtacttggtttctctgtatctattcacaggcaacaaatacttatatgtgtgatctttcagggaatgttttgtttatttgtttttaaaagtattgggaatcagattaagacaatcagtttcagagaaccaggaggtttggggttaagagatactcaaaaattttcacaagccaagtagggcatatatcagatttggccaactgaatggcgtctgtcctgtcatccatatggtgcctggaaatatttaccagtcaaggtcaaggtcagcatctgtggttaaaaatatagcattctgacctaaaaaagttattttgcagatgaatgtgttttcaactcaggacctatccaaatgaggaatttttaaatattcttttttttttcctatttttagacatcaattctatagattctgactttttctaacctcttatagacatgccaaatgctggcaaaaagaagtgctttttggatatggcagcacttgtaaaaataaagcagtaagcaaaatccttttaaacacagaaatcctgagttcttctcattggtggactcaagcaattctgtagcaaataaatcctttgaaagagctccaaa

SEQ ID NO: 510800 - DNA, 340 bp, Homo sapiens
acggcacagtatcatgcatgtattccgactactacttccacgttctagcaattggctgagaggagttggccacaggggcaacagcgcaccagctgagggagccgtgggcatagctggcagggctgagggtggcaccacttgcgaacatgtctggttaccgcatttcacgtccctgttaagcaaaacacatcattcacatcaattgttgcatcacagtgcagctttcagttcacctgaagcacaacgtaaaaccttacttgccacatatctttaacacagctgcaaatccccaaatccatccagcactttcctcacatcggttcccacataacacatctcg

SEQ ID NO: 510801 - DNA, 374 bp, Homo sapiens
  misc_feature (3)..(3): n is a, c, g, or t
ttntgagacagtcttgctctgttgtccaggctgcagttcaatggcacaatcacagctcaccacagccttaacctctgaggctcaagtgattatcccaacttcttggttttgtagagatgggggcctccctgtgttgcctgcactggtctcgaattcctaggctcaagcaatcctcccatcttgcctcccaaagtgctgggattacgggtatgagctaccacacccagcctagagaaagaagtttaagttaagcctgcttcctgataaattcgcaatacaccataaatctaactgtaatagcacataaccagaaattcacatgtagttccctttttttttttttttgagacagagtctcactctgtcacccaggc

SEQ ID NO: 510802 - DNA, 348 bp, Homo sapiens
gctctctgcggatggtggagggcttgctgtgtgctggtggttgccagctccaaaatggatgctccacatggattcatggccacacccctgtactcgtggcatgcagttcctctttgccttatatttgtggtactgccctgcccttccctggggatggcgggccgctcatgcgacccactttgcggcctgcagggtgcatctctgctggatggtgtgcgtgcttgctgaatgtacttggtggtttgccaactccaaaaggatgctccacaggattcatggccacacccctgtactcgtgggccatgcagttcctctttgccttataattttgtggtactgcccggcctc

SEQ ID NO: 510803 - DNA, 156 bp, Homo sapiens
agtgaagatagtctgtacaggactcacttattactccctagagcccatgtcgaatgcccccatcggcgtgggtcaagtagtacttgccgcaggacgtctgaagagactgaggcagggtataggtataatactgcctcacacgtcattctcaatccc

SEQ ID NO: 510804 - DNA, 977 bp, Homo sapiens
gctaaaaatacaaaaattagccgggcgtggtggcaagcacctgtaatcccagctactcgggaggctgaggtaggagaatcgcttgaacccggaggcagacgttacagtgatccgagatcgcgccattgcactgcagcccaggcaacagtgagacactccgattcaaaaaaaaaaaaaaaatttgggcctttatttctaaattagttgggaagcaatgggaccgtgttgtttataagggaattgatacgacctgggagtgtccttttcccagaaacaattatctcttttctactttagaaatgtgtcctttaaccaaattttgggtattattataattagttccccttctccttttaatgggaaacccttcagtgacctgtgtattcctggtttctcttttaacgcctgacattctagaaggcaagcctattagcactctgggtagctcccagtgaatggcttcctttttgggtaggctgttggtcccctggttgaccagtgaacctcccgggttaaattagacatagaaaggctgaccttagccaggcatggttggctcaccgcttgtattcccagccactttggggcggatcacagggtcaaaagatcgagaccatcctggtttaaacattggtgaaaccccgtctctactaaaaattcaaaattagctgttgtattgcacgtgctgtaatccagctactcgggaggctgaggcaggagaatcacttgacctgcgagggggatgggtgagccgaaatgagcatggggttaagctgcgaaagagcgaatcctctcaaaaacaagggggggcctaattgtgtcggacgagagaacggcctaccttattttgtttcccaactgtgatataacttagtttagctgggtgagacttcgttagcacaatattttattccaagggcgctcacaaagtaatgggcgggacattggtgtaagttatgagcaaataggcatacaag

SEQ ID NO: 510805 - DNA, 341 bp, Homo sapiens
aggtgaactagaggatcccctctctccacactgggatagactctgagtggaatacctggcacatccactaggatctacgtctgcacgttttcttgcatgactttatacgcagtaagtatgtgaaaacaaacaaaaagaagaaaacactcaacaaaaccaatctacatgttttggactaaaaaaaaaaaaatagaggtggtattctcagggtccgactcggaattatgtggctgcctctcggtgctttgggcctcggtgtggccgtgtttggccagggtgagatacggtcccctcgggaggatttcaggggaggaagagccacgtccccagtgtggagagag

SEQ ID NO: 510806 - DNA, 972 bp, Homo sapiens
cctaattgactgcctcctatcgtttatttcccattctttacctctctttactttggttgttccaatgatctatgtattctctaatatcctgaagttgaagtttgtttctctatcacttgcctgtatcgctcgtgggtgtattatatctacagaaatgtgtcccccctggcctctaaccgttgtcgtcccttgggacctctttcactatccggattcctataggcatcttgcctcgcgcttggttatggcgtccttgggtgaattcctgtctcggtactttgaatgcgtactgctgaccttgactactgtctaactttctataagcttgtaatttgtaaatgtatgtttattcccctaatgtatgccgtgtatgtgttggctccctatgtatctatgctctccagtatatctgagtgggcatttcctcctccaaagtgtatggcccctgtcttagtcatgcttatgtcttgatgccattcgtcacaattggtgaagccaccccgtgcaataccagaacgtgtctccatgaaccattgatgcagccttgcttgtatgtgtattgtgaattaattgcaacgccctaccctcacctgaccttgcaccctgctacctgggcggtgcaccatgagctgggagacatgcagcccttacatgccagctccgtgcgcagacggtggacgcgagacacgtgccctgaggtcctgatcgtcctcaatccaccaggtccgtcgctctccacatccaagaaaccatgcacgtcgtgattccacaggggccaccaaagctctttctggggaatgaaggggtgcacgagcagccacagccaccacataggcctcatagtggctgtaggcccccagcacaacaccacaactacggccaagagaaggcaagaaatgattctctgtcaacctttctctactagtggagacggagtgataaccccccggggggggtcattcaataccatgc

SEQ ID NO: 510807 - DNA, 543 bp, Homo sapiens
tgacatggtactgatgggggtcacgcttgactacatgcagatctgatatatcagagttctgacactcatatagtatatgaaactagtgaattagcaagatgatataacaccatcatataatatgacctattgggtagagtatgctgattcataaacatgggaatttaaaggaggtatattcagtgcaagagtctccatttcagaagcatgaatccatgtggataatcttaatacaactaagaggttacaggataggcttgggttacactgcgctgagaaatccatcataaaataccctcaagatagagactatgtttcaactgacagcttggaataagatgagagtgaagttgttgtgaaataagagaagctagatcctgcttaaaagaggagactccagctgtgtataatgatttagggtaacaaacctgtggctcctctggcccttgttatgaaaggagcacatatatttgctggattctatctttatcacctctgtctactgctatccagacacggtagagccgaggggtagggagctcg

SEQ ID NO: 510808 - DNA, 446 bp, Homo sapiens
cttctctgccctctagcggaggttttccaacgtgtaggaggcgcctttggggctgcccctaagtacagagccaggatggcatgtatctctgcactgatcacctcggtcttgtaactcttttctaggatctgcccacagggtgccttgtgacgtatcccagcaaggattacccaggtgatgtacctctcatcaaggctctgcctacaggcacattgcgatgtatctctgcactgatcacctaggtcatgtaacttttgtctaaggctctgcctacgatggcattgtgaaatatctctgcactaatcatccaagtgacgtaacacttgtctaggatctgtctaaattaactttgtgacagaaccctgtactgatcatccaggtgatggggctttggactaggctctgcctaagggggcattgtgacatatttctgcattgatcaccca

SEQ ID NO: 510809 - DNA, 377 bp, Homo sapiens
tatacagactcctctgagatctagaagaaatcatataccatcctatatacaagccatctccataagaccacctctggaagtatgctatgctcaacttatacacacacatacagatttgcacataggttgaacagtgaagtttacgtcacacccatagcacagacagttccttacatcacagacacacagcaggtgagagtaagatgctatcaaggaactagccactctaggaccaagcgtacatgctcccttccttcttactccatggaaaagactgatccatgggcctctcctggacctgtagccacggggagatttaaggaggccaatccaaggagtgactgagccttggacctcttccatggctacaggaatat

SEQ ID NO: 510810 - DNA, 310 bp, Homo sapiens
aaggacatcaccttgttgctacacctcgggtagtgcccatgggcttcgctctatagaataaagtctctcaactgagtacgcaatatcatgagagtaatgactttcctcctttccatctcaagaaatttctcaaagaaactgaaaacatttcctgattttctttttagactttgaagccacacccccgtggcttgaaaccttcactttatcacttcttcaaaaggaataatcactcattatttatattttctcatttgtaaagaggggatagtaatagtacctaaacatcccagtgtttggggaacaggtg

SEQ ID NO: 510811 - DNA, 410 bp, Homo sapiens
accgtgtttacagtcatacaggctgaagtgcaatggcgtgatctcagcaacctgtgcctcctgagtacaaatgattctcctgcctcagcctccctagaatgctgggattacaggcgcccaccaccatgcccagctaatttttctggtattttcagtagagacgggtttcaccatgtgggccaggcgggtcttgaactcctgaccttgtgatccacccaccttggcctcccaaagtgctgggtttacgggcatgagccaccgcgcccagccttataattttttataaacgtagactaacaggtttggaactcgttaacatgtattggcttgaatatccatataagttaaatatgtataactagggaatcctttcttaagaggtgcttaatatagataccagaaatctcatg

SEQ ID NO: 510812 - DNA, 148 bp, Homo sapiens
tcagggcggagccgcttccgcggtggaacttgccggaggtggggctgtcctgtgcactgtgcgatgtaggcctgcagctcactctcctctgcgcctgcgccgccgggatgcttgatggtgtcgtaggcgccggtgatgagcgcgatga

SEQ ID NO: 510813 - DNA, 98 bp, Homo sapiens
  misc_feature (48)..(48): n is a, c, g, or t
  misc_feature (64)..(64): n is a, c, g, or t
cagaagaagtgaagccaagaggaagaaccatttgcttttctggggagncctggcaggttttatnaaggctgttcatgtgaaagcccaagaagacgaaa

SEQ ID NO: 510814 - DNA, 950 bp, Homo sapiens
tatcgccggagccgaacccagccgagcgaacgccgctgcccgtcgcctctcgcctccgcgccaggccggtccaactccctgaggcgggaaacgcaagaccaggccctgcagcagcaggcggacgaggcggaagaccgcgcgcagggcttcagcgggagctgaacgggagcgcgagcggcgcgagaaatgctgaaggtgatgtgtccgccctttattgacgcattccagcgtcggtgaggaggagttgtacagtgctcatgtaactacatggccacggccctgcagattctgtatgatgcagaaaaagctgcagatgatagtgagagagtaatgaattttatataaacatccggtccatgtaaggatgtaggagcatagaatggattatacattgagtattgcatattcaaaataattgacaatgcacattgctgaagcaggctatacgctgaaaaatacgagtatagtatactcgtaagactgtttcatcctgtgaagtattgaacatggacgagtggcagagagacattgcgtaggtgtcttgaaactacacaatgttgtttacacttggaaataagaaactcaaatgatttgttactaacaatcgtgctacatcttatgagacggccttgctttattgtataaaagtaatatctgtaaataggtcttgaacctactatttgacgaatgacattttaaacctatctttgtctgatcacaacactgcataatgcatgcttatattaacccatatccttgaattttgcagaagatcaaacgtgtttgcataacgtttgcaacactaccaattaatgacctttgcagcgaaacatgtccgagtcccaaacaaaagaaagttgcctatattaggaacagttgtataaacataacgacattatggtatttggacacgtgaagatttgtccacgaattttgacccgtgattacct

SEQ ID NO: 510815 - DNA, 182 bp, Homo sapiens
cagccctcttcccgagtatgtgccctgatttctgggctgtgctgtaatggtgcctgggttgggttcaggccagactctgtggacccattccggttctctatttctggtcacgggtgggcaccggcggccctcatgtcccgtgcctctggccgggcttaccggcagtcagctgcaagggacgg

SEQ ID NO: 510816 - DNA, 490 bp, Homo sapiens
  misc_feature (18)..(18): n is a, c, g, or t
  misc_feature (51)..(51): n is a, c, g, or t
  misc_feature (59)..(59): n is a, c, g, or t
  misc_feature (122)..(122): n is a, c, g, or t
  misc_feature (312)..(312): n is a, c, g, or t
  misc_feature (350)..(350): n is a, c, g, or t
  misc_feature (359)..(359): n is a, c, g, or t
  misc_feature (361)..(361): n is a, c, g, or t
  misc_feature (370)..(370): n is a, c, g, or t
  misc_feature (373)..(373): n is a, c, g, or t
  misc_feature (425)..(425): n is a, c, g, or t
  misc_feature (448)..(448): n is a, c, g, or t
aaaacttaagttgtcaanaagaaagtggctgaatgcttgcccaatggcccnaaaacccnagggcctgtttggttacaagacgaagacaagtgcccgaaacacaattcaaacaagctgcaagnaccccagggcatcgaagtacgacgtcatcacccctggccgatgacttgaaccccgagggcccaacacaagatcatggatttgcgggccagctctccctgggggtagggggccacccaggactcacctccctcttcatttaggatctccagatactggatagccagcatcctctcattcccagggagccanacctgtgctgttggggttaggggcaccattggccccanccaggacantntgggtgccnccnactgcaggcaggctttgggagagaaatttatttttgtttgggtggacccacntggccctgtcagtctcaataaanggaccggagtccagtcctgaacagcttaaaacaaaaaaaaaa

SEQ ID NO: 510817 - DNA, 1288 bp, Homo sapiens
cggacgcgtgggtcgacccacgcgtccgggcgaacacgccgcggtcctcgtcgtggtgagcgcagccactcaggctggtcctgggggtggggctgtaggggaaagtgctaaagccgctgaggtaagaggccgaggggtcgagggccctcgggagcttggtgaaaagggagttaacccccaggatcctacctgcagggactagaaaaatggagaagtgaagtaagaactctgctagagaggaaatggctgcttcatcatcatcctcctcagctggtggggtcagtggaagttctgtcactggatctggtttcagtgtctcagaccttgccccaccacggaaagcccttttcacctaccccaaaggagctggagagatgttagaagatggctctgagagattcctctgcgaatctgtttttagctatcaagtggcatccacgcttaaacaggtgaaacatgatcagcaagttgctcggatggaaaaactagctggtttggtagaagagctggaggctgacgagtggcggtttaagcccatcgagcagctgctgggattcaccccctcttcaggttgatactgcctggatggtcacctctggtgcgcagcaagtgcaaagccagtgggggactttctcacagcttacatagccatccagagatccacagctacgtcactgaattgttaatgcacatttgtacttggtttctctgtatctattcacaggcaacaaatacttatatgtgtgatctttcagggaatgttttgtttatttgtttttaaaagtattgggaatcagattaagacaatcagtttcagagaaccaggaggtttggggttaagagatactcaaaaattttcacaagccaagtagggcatatatcagatttggccaactgaatggcgtctgtcctgtcatccatatggtgcctggaaatatttaccagtcaaggtcaaggtcagcatctgtggttaaaaatatagcattctgacctaaaaaagttattttgcagatgaatgtgttttcaactcaggacctatccaaatgaggaatttttaaatattcttttttttttcctatttttagacatcaattctatagattctgactttttctaacctcttatagacatgccaaatgctggcaaaaagaagtgctttttggatatggcagcacttgtaaaaataaagcagtaagcaaaatccttttaaacacagaaatcctgagttcttctcattggtggactcaagcaattctgtagcaaataaatcctttgaaagagctccaaa

SEQ ID NO: 510818 - DNA, 3189 bp, Homo sapiens
ggacgccgccttcgccgctggctccgtctgttggggggcgaacacgccgcggtcctcgtcgtggtgagcgcagccactcaggctggtcctgggggtggggctgtaggggaaagtgctaaagccgctgagtgaagtaagaactctgctagagaggaaatggctgcttcatcatcatcctcctcagctggtggggtcagtggaagttctgtcactggatctggtttcagtgtctcagaccttgccccaccacggaaagcccttttcacctaccccaaaggagctggagagatgttagaagatggctctgagagattcctctgcgaatctgtttttagctatcaagtggcatccacgcttaaacaggtgaaacatgatcagcaagttgctcggatggaaaaactagctggtttggtagaagagctggaggctgacgagtggcggtttaagcccatcgagcagctgctgggattcaccccctcttcaggttgatactgcctggatggtcacctctggtgcgcagcaagtgcaaagccagtgggggactttctcacagcttacatagccatccagagatccacagctacgtcactgaattgttaatgcacatttgtacttggtttctctgtatctattcacaggcaacaaatacttatatgtgtgatctttcagggaatgttttgtttatttgtttttaaaagtattgggaatcagattaagacaatcagtttcagagaaccaggaggtttggggttaagagatactcaaaaattttcacaagccaagtagggcatatatcagatttggccaactgaatggcgtctgtcctgtcatccatatggtgcctggaaatatttaccagtcaaggtcaaggtcagcatctgtggttaaaaatatagcattctgacctaaaatttttaaatattcttttttttttcctatttttagacatcaattctatagattctgactttttctaacctcttatagacatgccaaatgctggcaaaaagaagtgctttttggatatggcagcacttgtaaaaataaagcagtaagcaaaatccttttaaacacagaaatcctgagttcttctcattggtggactcaagcaattctgtagcaaataaatcctttgaaagagctccaaattggtggcattatcctttcaaaatctcagggatttgggatgaagtgaagaggtcaaattactttttagaagaagggaatctaaaaaccatctctcctaaacaaatggtagactggctttacttaagggatatttgtctttataggagtacataaatttatcttaatgatatttaagtagttttttttttttttttttgggacgaagttttgctcttgttgcccaggctgtatcgcaatggcgcggtctctgctcactgcagcatccgcctcccgggttcgggcggttctcctgcctcagcctcccgagtagctgggattacaggcgcccgccaccacacccagctaattttttgtatatttggtagagacggggtttcaccgtgttgaccaggctggtctcgagcttctggcctcaggtgatccacctgcctcagcctcccaaattgctgggattacaggcgtgagccaccttgcccagccaatttttttttaaagagacatggtcttgctatgttgcccaggttggtcttgaactcctggcctcaagagatccccccaaccttggcctccaaagtgctgggattacaggcatgagccaccgcgcctggcctcaagtaagtttttataccatgataggggaaaacctggaaggctaagagatgtgctgttttccttcatgggaccccactttccacagtaaacaactggtataatcatttattacgttgtatgcaaattttgccttagacaacatttgtctggttccttattaataacttgcatctgatctgcttagagttgcttaattataagtaaatataatcccagtagcatttagccttaatctcaagagttcaaaatgtttaacacattctacctgacgggaggtggtgacctcattcagtcggttaagagcctgagccctgtgaagttaaacacctgctcatggtcacatagcccaggcagaagaaaatctcggacttggaatagatcccagttgcctgataattcatctcattattgcctctaaagcaaattggagactgggcacagtggctcccacctttaatcccagcacctggggaggctgaggtgagtggatcactagaggtcaggagttcaagaccagtctggccgacatggtgaaactcagtctctattgaaaatacaaaaattagcccagtgtggtggcacacacttgtaatcccagctactcaggaggctgaggcatgagaatcgcttaaacccaggaggcggaggttgcagtgagctgagatcacaccattgcactctagtctgggtgacagagcgagactctgtctcaaaaaaaaaaaaataaagccgggcgtggtggctcacgcctgtaatcccggcacttggggaggctgaggcaggcggattgcctgagaatcgggagttcgagaccagcctggccagcatggtgaaaccttgtctctactaaaactacaaaaaaaatgggccgggcgtggtggcgggcgcctgtaatcccagctactcgggaggctgaggcagcagaatcgtttgaacccgggaggcggaggttgcagtgagtggagatcgtgcctgtgtgctccagcctgagcaacaagagcgaaactgtctcaaaaaaaagaagaaaataaataaataaaaatcagagcacaagaagtaccagtccaccaactcacattttctatattaataattcttaactaaaagaagttccatattcgacagcattttagttttttaatagtacttattagcatcaaccatcttgataatcaccaagggaaaaattaaaaatacctagactgcaataaacctttaaattggattttcagtgagaatttagaagcaatcactacctttctcgtttcatttgtgtaaccatgcagcataggcactgtgttacatcatctttacgctttggtatttgaacttattacagaattttttctctaaattggatgtttctttatatgaccttggaaactgaagtgatcttagcattaaacaaaaatgctttttaaagcaaaa

SEQ ID NO: 510819 - DNA, 1022 bp, Homo sapiens
cggacgcgtgggtcgacccacgcgtccgggcgaacacgccgcggtcctcgtcgtggtgagcgcagccactcaggctggtcctgggggtggggctgtaggggaaagtgctaaagccgctgaggctctgagagattcctctgcgaatctgtttttagctatcaagtggcatccacgcttaaacaggtgaaacatgatcagcaagttgctcggatggaaaaactagctggtttggtagaagagctggaggctgacgagtggcggtttaagcccatcgagcagctgctgggattcaccccctcttcaggttgatactgcctggatggtcacctctggtgcgcagcaagtgcaaagccagtgggggactttctcacagcttacatagccatccagagatccacagctacgtcactgaattgttaatgcacatttgtacttggtttctctgtatctattcacaggcaacaaatacttatatgtgtgatctttcagggaatgttttgtttatttgtttttaaaagtattgggaatcagattaagacaatcagtttcagagaaccaggaggtttggggttaagagatactcaaaaattttcacaagccaagtagggcatatatcagatttggccaactgaatggcgtctgtcctgtcatccatatggtgcctggaaatatttaccagtcaaggtcaaggtcagcatctgtggttaaaaatatagcattctgacctaaaaaagttattttgcagatgaatgtgttttcaactcaggacctatccaaatgaggaatttttaaatattcttttttttttcctatttttagacatcaattctatagattctgactttttctaacctcttatagacatgccaaatgctggcaaaaagaagtgctttttggatatggcagcacttgtaaaaataaagcagtaagcaaaatccttttaaacacagaaatcctgagttcttctcattggtggactcaagcaattctgtagcaaataaatcctttgaaagagctccaaa

SEQ ID NO: 510820 - DNA, 964 bp, Homo sapiens
ggacgccgccttcgccgctggctccgtctgttggggggcgaacacgccgcggtcctcgtcgtggctctgagagattcctctgcgaatctgtttttagctatcaagtggcatccacgcttaaacaggtgaaacatgatcagcaagttgctcggatggaaaaactagctggtttggtagaagagctggaggctgacgagtggcggtttaagcccatcgagcagctgctgggattcaccccctcttcaggttgatactgcctggatggtcacctctggtgcgcagcaagtgcaaagccagtgggggactttctcacagcttacatagccatccagagatccacagctacgtcactgaattgttaatgcacatttgtacttggtttctctgtatctattcacaggcaacaaatacttatatgtgtgatctttcagggaatgttttgtttatttgtttttaaaagtattgggaatcagattaagacaatcagtttcagagaaccaggaggtttggggttaagagatactcaaaaattttcacaagccaagtagggcatatatcagatttggccaactgaatggcgtctgtcctgtcatccatatggtgcctggaaatatttaccagtcaaggtcaaggtcagcatctgtggttaaaaatatagcattctgacctaaaaaagttattttgcagatgaatgtgttttcaactcaggacctatccaaatgaggaatttttaaatattcttttttttttcctatttttagacatcaattctatagattctgactttttctaacctcttatagacatgccaaatgctggcaaaaagaagtgctttttggatatggcagcacttgtaaaaataaagcagtaagcaaaatccttttaaacacagaaatcctgagttcttctcattggtggactcaagcaattctgtagcaaataaatcctttgaaagagctccaaa

SEQ ID NO: 510821 - DNA, 438 bp, Homo sapiens
cagatggcaggcttcgctgaaagagctctagcagtctcagtaatgtactggagacagattgagattgcaggagtgctgtgaaatggaatgggaggggcagcaagctcagggatgatggggaacatttcttctgaatgctcgcgtgggtggagggagggaacgagagactgggctgacgggtgggtgacggggagagatgtctaaaggaacggaaggtgttctttgaaaagacggggtggacttgactaacactgtggtctgaaagcgataagcacagggatggtgacgaagttcaggggagagcatggagggaatctctggtggaggaagggcagtgaggaggtagcccggagtgggaacaacagcagaggaggagttagcctccaggaggacgcggagcttctgagagcggtgacgaggtgaggatggctgaaatca

SEQ ID NO: 510822 - DNA, 1348 bp, Homo sapiens
cggacgcgtgggtcgacccacgcgtccgggcgaacacgccgcggtcctcgtcgtggtgagcgcagccactcaggctggtcctgggggtggggctgtaggggaaagtgctaaagccgctgaggtgcagtggctcacgcctgtaatcccagcactttgggaggccaaggcaggtggatcacctgaggtcgggagttcaagaccagcctgaccaacatggagaaaccccatctctactagaaatacaaaattagccaggcatggtggtgcatgcctgtaatcccagctactcgggaggctgaagcaggagaatcgcttgaatccgggaggcagaggttgctgtgagccgagatcgcgccatttccagcctgggcaacaagagggaaactccgtctcaaaaaaaaaaaaaaaaaggaagagaaaagaaaacttaagtttcagccaggcatggctctgagagattcctctgcgaatctgtttttagctatcaagtggcatccacgcttaaacaggtgaaacatgatcagcaagttgctcggatggaaaaactagctggtttggtagaagagctggaggctgacgagtggcggtttaagcccatcgagcagctgctgggattcaccccctcttcaggttgatactgcctggatggtcacctctggtgcgcagcaagtgcaaagccagtgggggactttctcacagcttacatagccatccagagatccacagctacgtcactgaattgttaatgcacatttgtacttggtttctctgtatctattcacaggcaacaaatacttatatgtgtgatctttcagggaatgttttgtttatttgtttttaaaagtattgggaatcagattaagacaatcagtttcagagaaccaggaggtttggggttaagagatactcaaaaattttcacaagccaagtagggcatatatcagatttggccaactgaatggcgtctgtcctgtcatccatatggtgcctggaaatatttaccagtcaaggtcaaggtcagcatctgtggttaaaaatatagcattctgacctaaaaaagttattttgcagatgaatgtgttttcaactcaggacctatccaaatgaggaatttttaaatattcttttttttttcctatttttagacatcaattctatagattctgactttttctaacctcttatagacatgccaaatgctggcaaaaagaagtgctttttggatatggcagcacttgtaaaaataaagcagtaagcaaaatccttttaaacacagaaatcctgagttcttctcattggtggactcaagcaattctgtagcaaataaatcctttgaaagagctccaaa

SEQ ID NO: 510823 - DNA, 411 bp, Homo sapiens
ggttatgtacaaaaagttgtttagttctagcttcatccttctggtataagtataaccatgtcagtcatatccccccggctaccgtagcatcacctttgcaagacgcttccctggcgaggtctcagaccacagaatttcggtctgctcacctgctttccatattgtccccactggcaaaaaagctaaaagtctgcacgacgttagatcctgctctcaagaattccatgtgaagttggcgaactgcatctgggtgtactatcgctacctctgaagtccagagcccagccttcacataacctctcatctgcagagtaatcacaaacctgccatctccaatctcaggctccccactgtgcaggcgctacaaaatccccttatcggcccctgggtgtccaacacgtaccatggtgc

SEQ ID NO: 510824 - DNA, 1073 bp, Homo sapiens
cggacgcgtgggtcgacccacgcgtccgggcgaacacgccgcggtcctcgtcgtggtgagcgcagccactcaggctggtcctgggggtggggctgtaggggaaagtgctaaagccgctgagtgaagtaagaactctgctagagaggaaatggctgcttcatcatcatcctcggctctgagagattcctctgcgaatctgtttttagctatcaagtggcatccacgcttaaacaggtgaaacatgatcagcaagttgctcggatggaaaaactagctggtttggtagaagagctggaggctgacgagtggcggtttaagcccatcgagcagctgctgggattcaccccctcttcaggttgatactgcctggatggtcacctctggtgcgcagcaagtgcaaagccagtgggggactttctcacagcttacatagccatccagagatccacagctacgtcactgaattgttaatgcacatttgtacttggtttctctgtatctattcacaggcaacaaatacttatatgtgtgatctttcagggaatgttttgtttatttgtttttaaaagtattgggaatcagattaagacaatcagtttcagagaaccaggaggtttggggttaagagatactcaaaaattttcacaagccaagtagggcatatatcagatttggccaactgaatggcgtctgtcctgtcatccatatggtgcctggaaatatttaccagtcaaggtcaaggtcagcatctgtggttaaaaatatagcattctgacctaaaaaagttattttgcagatgaatgtgttttcaactcaggacctatccaaatgaggaatttttaaatattcttttttttttcctatttttagacatcaattctatagattctgactttttctaacctcttatagacatgccaaatgctggcaaaaagaagtgctttttggatatggcagcacttgtaaaaataaagcagtaagcaaaatccttttaaacacagaaatcctgagttcttctcattggtggactcaagcaattctgtagcaaataaatcctttgaaagagctccaaa

SEQ ID NO: 510825 - DNA, 1446 bp, Homo sapiens
cggacgcgtgggtcgacccacgcgtccgggcgaacacgccgcggtcctcgtcgtggtgagcgcagccactcaggctggtcctgggggtggggctgtaggggaaagtgctaaagccgctgaggtgcagtggctcacgcctgtaatcccagcactttgggaggccaaggcaggtggatcacctgaggtcgggagttcaagaccagcctgaccaacatggagaaaccccatctctactagaaatacaaaattagccaggcatggtggtgcatgcctgtaatcccagctactcgggaggctgaagcaggagaatcgcttgaatccgggaggcagaggttgctgtgagccgagatcgcgccatttccagcctgggcaacaagagggaaactccgtctcaaaaaaaaaaaaaaaaaggaagagaaaagaaaacttaagtttcagccaggcatgtgaagtaagaactctgctagagaggaaatggctgcttcatcatcatcctcctcagctggtggggtcagtggaagttctgtcactggatctggtttcagtgtctcagaccttgccccaccacggaaagcccttttcacctaccccaaaggagctggagagatgttagaagattcagcaagttgctcggatggaaaaactagctggtttggtagaagagctggaggctgacgagtggcggtttaagcccatcgagcagctgctgggattcaccccctcttcaggttgatactgcctggatggtcacctctggtgcgcagcaagtgcaaagccagtgggggactttctcacagcttacatagccatccagagatccacagctacgtcactgaattgttaatgcacatttgtacttggtttctctgtatctattcacaggcaacaaatacttatatgtgtgatctttcagggaatgttttgtttatttgtttttaaaagtattgggaatcagattaagacaatcagtttcagagaaccaggaggtttggggttaagagatactcaaaaattttcacaagccaagtagggcatatatcagatttggccaactgaatggcgtctgtcctgtcatccatatggtgcctggaaatatttaccagtcaaggtcaaggtcagcatctgtggttaaaaatatagcattctgacctaaaaaagttattttgcagatgaatgtgttttcaactcaggacctatccaaatgaggaatttttaaatattcttttttttttcctatttttagacatcaattctatagattctgactttttctaacctcttatagacatgccaaatgctggcaaaaagaagtgctttttggatatggcagcacttgtaaaaataaagcagtaagcaaaatccttttaaacacagaaatcctgagttcttctcattggtggactcaagcaattctgtagcaaataaatcctttgaaagagctccaaa

SEQ ID NO: 510826 - DNA, 181 bp, Homo sapiens
tggcatctaagatctcagtagtcggacgcagtggacgagtctttagattggtgtggggatgggatatacagacagctcggtaggtcactcctggtcagggtgcagttgctggacttggagcatggatgaagagatgtcagagatagagatcattaggttgctgaactcccctaaggcagtg

SEQ ID NO: 510827 - DNA, 1062 bp, Homo sapiens
ggacgccgccttcgccgctggctccgtctgttggggggcgaacacgccgcggtcctcgtcgtgtgaagtaagaactctgctagagaggaaatggctgcttcatcatcatcctcctcagctggtggggtcagtggaagttctgtcactggatctggtttcagtgtctcagaccttgccccaccacggaaagcccttttcacctaccccaaaggagctggagagatgttagaagattcagcaagttgctcggatggaaaaactagctggtttggtagaagagctggaggctgacgagtggcggtttaagcccatcgagcagctgctgggattcaccccctcttcaggttgatactgcctggatggtcacctctggtgcgcagcaagtgcaaagccagtgggggactttctcacagcttacatagccatccagagatccacagctacgtcactgaattgttaatgcacatttgtacttggtttctctgtatctattcacaggcaacaaatacttatatgtgtgatctttcagggaatgttttgtttatttgtttttaaaagtattgggaatcagattaagacaatcagtttcagagaaccaggaggtttggggttaagagatactcaaaaattttcacaagccaagtagggcatatatcagatttggccaactgaatggcgtctgtcctgtcatccatatggtgcctggaaatatttaccagtcaaggtcaaggtcagcatctgtggttaaaaatatagcattctgacctaaaaaagttattttgcagatgaatgtgttttcaactcaggacctatccaaatgaggaatttttaaatattcttttttttttcctatttttagacatcaattctatagattctgactttttctaacctcttatagacatgccaaatgctggcaaaaagaagtgctttttggatatggcagcacttgtaaaaataaagcagtaagcaaaatccttttaaacacagaaatcctgagttcttctcattggtggactcaagcaattctgtagcaaataaatcctttgaaagagctccaaa

SEQ ID NO: 510828 - DNA, 1499 bp, Homo sapiens
ggacgccgccttcgccgctggctccgtctgttggggggcgaacacgccgcggtcctcgtcgtggtgagcgcagccactcaggctggtcctgggggtggggctgtaggggaaagtgctaaagccgctgaggtgcagtggctcacgcctgtaatcccagcactttgggaggccaaggcaggtggatcacctgaggtcgggagttcaagaccagcctgaccaacatggagaaaccccatctctactagaaatacaaaattagccaggcatggtggtgcatgcctgtaatcccagctactcgggaggctgaagcaggagaatcgcttgaatccgggaggcagaggttgctgtgagccgagatcgcgccatttccagcctgggcaacaagagggaaactccgtctcaaaaaaaaaaaaaaaaaggaagagaaaagaaaacttaagtttcagccaggcatgtgaagtaagaactctgctagagaggaaatggctgcttcatcatcatcctcctcagctggtggggtcagtggaagttctgtcactggatctggtttcagtgtctcagaccttgccccaccacggaaagcccttttcacctaccccaaaggagctggagagatgttagaagatggctctgagagattcctctgcgaatctgtttttagctatcaagtggcatccacgcttaaacaggtgaaacatgatcagcaagttgctcggatggaaaaactagctggtttggtagaagagctggaggctgacgagtggcggtttaagcccatcgagcagctgctgggattcaccccctcttcaggttgatactgcctggatggtcacctctggtgcgcagcaagtgcaaagccagtgggggactttctcacagctgtcactgaattgttaatgcacatttgtacttggtttctctgtatctattcacaggcaacaaatacttatatgtgtgatctttcagggaatgttttgtttatttgtttttaaaagtattgggaatcagattaagacaatcagtttcagagaaccaggaggtttggggttaagagatactcaaaaattttcacaagccaagtagggcatatatcagatttggccaactgaatggcgtctgtcctgtcatccatatggtgcctggaaatatttaccagtcaaggtcaaggtcagcatctgtggttaaaaatatagcattctgacctaaaaaagttattttgcagatgaatgtgttttcaactcaggacctatccaaatgaggaatttttaaatattcttttttttttcctatttttagacatcaattctatagattctgactttttctaacctcttatagacatgccaaatgctggcaaaaagaagtgctttttggatatggcagcacttgtaaaaataaagcagtaagcaaaatccttttaaacacagaaatcctgagttcttctcattggtggactcaagcaattctgtagcaaataaatcctttgaaagagctccaaa

SEQ ID NO: 510829 - DNA, 1161 bp, Homo sapiens
ggacgccgccttcgccgctggctccgtctgttggggggcgaacacgccgcggtcctcgtcgtggtgagcgcagccactcaggctggtcctgggggtggggctgtaggggaaagtgctaaagccgctgagtgaagtaagaactctgctagagaggaaatggctgcttcatcatcatcctcctcagctggtggggtcagtggaagttctgtcactggatctggtttcagtgtctcagaccttgccccaccacggaaagcccttttcacctaccccaaaggagctggagagatgttagaagatggctctgagagattcctctgcgaatctgtttttagctatcaagtggcatccacgcttaaacaggtgaaacatgatcagcaagttgctcggatggaaaaactagctggtcatcgagcagctgctgggattcaccccctcttcaggttgatactgcctggatggtcacctctggtgcgcagcaagtgcaaagccagtgggggactttctcacagcttacatagccatccagagatccacagctacgtcactgaattgttaatgcacatttgtacttggtttctctgtatctattcacaggcaacaaatacttatatgtgtgatctttcagggaatgttttgtttatttgtttttaaaagtattgggaatcagattaagacaatcagtttcagagaaccaggaggtttggggttaagagatactcaaaaattttcacaagccaagtagggcatatatcagatttggccaactgaatggcgtctgtcctgtcatccatatggtgcctggaaatatttaccagtcaaggtcaaggtcagcatctgtggttaaaaatatagcattctgacctaaaaaagttattttgcagatgaatgtgttttcaactcaggacctatccaaatgaggaatttttaaatattcttttttttttcctatttttagacatcaattctatagattctgactttttctaacctcttatagacatgccaaatgctggcaaaaagaagtgctttttggatatggcagcacttgtaaaaataaagcagtaagcaaaatccttttaaacacagaaatcctgagttcttctcattggtggactcaagcaattctgtagcaaataaatcctttgaaagagctccaaa

SEQ ID NO: 510830 - DNA, 169 bp, Homo sapiens
gatgggccggggcttgaaacattctccagagaagtaatataaatggccaataaaaaaatgaaagatgctcggtagccatggttgttagggagatggaaattaatacccaggagataccccttcataccctactaggatggctgtaattaaacacaacaccaccaacagc

SEQ ID NO: 510831 - DNA, 256 bp, Homo sapiens
  misc_feature (154)..(154): n is a, c, g, or t
  misc_feature (170)..(170): n is a, c, g, or t
  misc_feature (174)..(174): n is a, c, g, or t
  misc_feature (210)..(210): n is a, c, g, or t
  misc_feature (246)..(246): n is a, c, g, or t
gaattcggcacgagttcacaatgtcagttaaaaaaaaaaaaaaaaaaaaaaagtgtagtatttatatcttgggcacaggtccagatccctatgggaataaagcattcagctggaaatccttgtcattggtcgtggggcaggtgcccagccagtntcactctgcagccccntctncactgaaaggggctcttcaggctcgttgtacctggnggatgcccaccttaaccccaaccggggcccatcggnagagaagccc

SEQ ID NO: 510832 - DNA, 413 bp, Homo sapiens
  misc_feature (3)..(3): n is a, c, g, or t
aanaagggggccactgtgacaggacatgagcttaacagtcatagaagtccacatgggctccagactggaaggtgtccttttgcagcaagcccagcagtttctgggctgaagtcccacagtccaccagcgccccatccgacttcaacttctgcagtttgctccttaactctgggtccttggaggtttcccgagccaactgctgcatgtcattgtccaggggacctggagcatagctcagcacccgcacactcggttcctcagcagccaggacctggtagagcatgtctcgggcagccttccccgcacagtacagaccccagcctttgtagggctgcagggcacacagagatgagatgttaaccacagtcttgctcaggccagggctatcctggaaggcattcaaggtgccggaa

SEQ ID NO: 510833 - DNA, 258 bp, Homo sapiens
  misc_feature (40)..(40): n is a, c, g, or t
tgggttcaagcaattctcctgcctccgcctcccaagtagntgggattacacaggcatatactatcatgcccagctaatttttgtatttttagtagagacagagtttcaccattttggccaggctggtctcaaactcctgacttcaggtgatcagcccacctcagcctcccaaaatgctggggttacaggcgtgagccacagcgcccagcccagaatttgcattttaaccagcctcccccaggttactgcccaactgca

SEQ ID NO: 510834 - DNA, 189 bp, Homo sapiens
agaggatccccagtcacaagcagataggaagccgcgagatcattcacgcatcccagactacacgacgatggatcagttaccaggtcatcaccgatagcagtgcacaatgttcctgacaagagttggtacagcagaaagcgatcgcgataagcatccagttcctgcaggccagatgctccgcactgccac

SEQ ID NO: 510835 - DNA, 652 bp, Homo sapiens
agcgtgggatggcgaatgagcggtatagaaccacccacagacctgccacctgaatgcgaatcttgaggctccgcttgacaggcccccaaggtggctccgtgtattcatggggctctctcaggccccacattccatcccagctcgcaacctgcagctgactccaagtcgttccctgaactaacctgcgttggtaaaaacggcgagacctgtgctagcccatttgctcaaaccatcgaatcattgggcaaaagacaatactccagcgaaccattaccacagaagaatcacgaggcgaacgtggagagaagaccgagagcacaaaacaaccaagaaaccaaagaacataaacacagaagggaacagcaaagagcaagcgaaagaagcaatagaaaagatacaatagacaaacaaagataagaagagaagaccacaaaccaaaagtcaacccgagaacaaacacaggacaaccaaaccacaagcagaacgggcggaagaaccaatgaggagactgagaaaccagcacacaacgagccaacaggagaggaatgcaggacggccgaaactaccgcaggagcgcaacagaaaaggcaatcaaaagcagaacacacacagacgtaaaaatcagccgagaacacaaatcgagaacagaagg

SEQ ID NO: 510836 - DNA, 148 bp, Homo sapiens
gatcccattcaatttgctgagccatcgtgccttgcccccagcttgtgtcttggaaaagcatgatgggacatgagaggatgggagggtgtctgagcctttcccggactgacggaacctgtgtcttctctcttttgatggacaggatggt

SEQ ID NO: 510837 - DNA, 821 bp, Homo sapiens
gccttctcctcactctctcaatcttatccatcatagcaggcaggttgaggtggattaaaccaaacgccagctatgcagaaatcttagcatacgtcctcgaagttacccagcgataggatgaataatagctagttctaccgttacaaggcctaactataaccattcttaagttataactatttatacttgatcctaactacgtaccggaattcctacatacgtcaagcttaaacgtccagcaacacgaccctactactatctcgcacctgaaacaagctaacatgagctagacacccttaaatgtccattctcacacctccatctacccgtatggaggaccgtgccacccgtgtgaaccggacatgtattgtgcccaacactggagccacttatcgaaggaagattcaacaaaataatcaattagcgcgtcatcaatccccagccagtcatagccacgcagtgcagccatccttaagccgtcgtacttcgtaacctacgcgctaatctacatccacctcaaatcagcactaactcacccagtatgctaagcgaacgtaagcatctaacatgacagttggaacatccaagaagcgcaacccgattcctgcgccagagtcatcacccttaccacgcctactcctcaccatatctcccccgcttacgatacctaaagtgatccttcattgcaacactcccagagagacaaccacacacttaacaccaaacagaataccaagcagtccggacacgaagaccaccgccccacacacgagagcacctggaacaaagaccacgtccaggcgaggtcccgagcggccaat

SEQ ID NO: 510838 - DNA, 391 bp, Homo sapiens
ccggctgaggagtatgagacccccgagagcccgggcccgcagtcgaagccctcgcccgcctcccaaggtggtagatgtacccaggcatgccgagtcgagcaggcaggtctaaaacacctggatcgagaggtgtcaaacttttgcgcagagcagcagagctgatacctgcgatgccagatggcacgggcgtccgaaactatggcctaaaacagcggggcccgatccttggtggcagaacgcgtgctgcgctgaggccgaggcagcgcggcgcgcgacagaaagaggaggcgcgatgcgcgcaggcgggaactgcgacgcaaagacgctgcgagtcgcagagacaggatgcgcgatgcttgaaacgccagcgtgaaggttggctcaggagggc

SEQ ID NO: 510839 - DNA, 599 bp, Homo sapiens
gactctagaggttcacttttgacgcgttctcctccggctccatggtcatctaaacatgtctagacattcagtcaacatttgcaagacataccaaaaaaaaagggaataaggggggaaaaaactatggtcaagagataaagcaatcattagacccagattcagaaataattcagatgtgggacctagtgacaggaacttaaaacagttatgatggatgtactaaaggacctagtgaaaacgacaatatgcacaaacaagcgggaactttcatgaacacgtttcagcagagagatggaaccttcatgaccacgtcaattggaaaacctaggggcaaaacacacaaaagaaacccctgggcagcagaaatgaggacttgagtacatggacaggctccacagcagccggggcagaactgaggggatcggcgggggtggaaacgggcacaggaaccacccagaggtacacacagagaaatgcgccagcatgggaaagccggggggcggcagcccccaggggtctgaggctcgtgccgccagagtccaggagaggggaggatgcggcagaagacatgcttgaggagaaaatgggtaagaattttc

SEQ ID NO: 510840 - DNA, 923 bp, Homo sapiens
  misc_feature (908)..(908): n is a, c, g, or t
  misc_feature (914)..(914): n is a, c, g, or t
gttaaattaatttgtaccggccgggcgcggtggcttacgcctgtaatcccaacactttgggaggccgaggcgggcgaatcacaaggtcatgagttcgaaaccagcctggccaatatggtgaaacccccgtctctactaaaaatacagaaattagccgggagtggtggcgtacgcctgtagtcccagctactctggaggctaaggcaggagaatcgcttgaatccgggaggtggaggtcgcagtgagccgagaccgggccactgcactccagcctgggagacagagcgagactctgtctcaagaaaaaaaaaaaatcaatttgtaccattccttgccccaccctgccgaacttattgaaagagcatcgctttcctcacttttctcctctaacagaaaagcacttagatgaagctacagggagccagaattcttttgacttggtgggtaccggaggattggaagaatctagattgagtattccttggcctttggggagcttgctctatgcaaagtcacccaggaaatgatactccccccactgtgaaacactagctagagatgatagacaaaaagcacatttgttgtaatctccctttgacgggattcaggttgggatagatgtcgaagcagctgcttctaggtagtcaacgaagatgtcaactagtaaatgacaacagacaaggatgagcacagcagagctgtaagattctagatatcaaaaagagcaagcagtctgttgtactcaccatcgcatcctcagcagctgcccagtgcccggttttaacttagtgctcagtgtatgtgtcaggtttgaatcccaattctgatactacctgtgctactctcttcacctctctgagtctgtaaaggattatttaagaattaaatgaaacaacatacagaaaatnaaaaanattaaaaaa

SEQ ID NO: 510841 - DNA, 572 bp, Homo sapiens
  misc_feature (557)..(557): n is a, c, g, or t
  misc_feature (563)..(563): n is a, c, g, or t
cggcacgagcggcacgagcggcacgagtttctcctctaacagaaaagcacttagatgaagctacagggagccagaattcttttgacttggtgggtaccggaggattggaagaatctagattgagtattccttggcctttggggagcttgctctatgcaaagtcacccaggaaatgatactccccccactgtgaaacactagctagagatgatagacaaaaagcacatttgttgtaatctccctttgacgggattcaggttgggatagatgtcgaagcagctgcttctaggtagtcaacgaagatgtcaactagtaaatgacaacagacaaggatgagcacagcagagctgtaagattctagatatcaaaaagagcaagcagtctgttgtactcaccatcgcatcctcagcagctgcccagtgcccggttttaacttagtgctcagtgtatgtgtcaggtttgaatcccaattctgatactacctgtgctactctcttcacctctctgagtctgtaaaggattatttaagaattaaatgaaacaacatacagaaaatnaaaaanattaaaaaa

SEQ ID NO: 510842 - DNA, 395 bp, Homo sapiens
gcacataactattctgtaatacatatgcacccaatacagggaacacctagattcataaggcaagttcttagacacctatgaagagacttaagtaggcatacaataataatgggggacttcaataccccactgacagtattagacaaatcatcgtagcagaaaactaacaaacacattcaggacctgaacttgacatttgaccaaataggcctaacagacatatacataattctctaccttaaatcatcagaatatacattcttcccatctgcatgtggcatacactctaaaaatgatcacacaatcagccataaaacaaccctcagcaaaatcaaaaaacccccaaatgtactaaacacactcttggacaacaggggcaacacgaataaggggac

SEQ ID NO: 510843 - DNA, 1232 bp, Homo sapiens
ggagctgccgacggacggagcgcccccgcccccgcccgtggcgcccgcccgccgccgtcatgcccttctccaagcagtccacaagcgcactgaagctgcgcttcccgagccgaggacgagttccccgaccgtgagcgctcatcaacaagccacatggaccaaggtgctgacccccgagcatgtacgcggagctgcgcgccaagagcacgccgagcgagtttcacgctggacgacgtcatccagacaggcgtggacaacccgggccacccgtacatcatgaccgatgggcatgcgatggcgggcgacagaggagtcctacgaagctgtacaacggatctcttcgaaacccatcatcgaggaccaggcacggcggcatacaagcccagccgatgagcacaagaccgagctcaaaccccgagcaacctgcagggcggcgacagaccatggaaccccaacatacgtgctgagctcgcgggtgcgcacaggccgcagcatccgtggcattctgacatcaccaccgcactgcagccgcagcaaagccgccgagccatccgacgaaacgactcagcgggcggacagccctgagccacaccatggacccggagaaccatggacaggacaacagaacaccaaagacgcatcaagacgccatgaccggccgcaggagccagcaagcacgaccaacaaagaaacacatacctcatacgaaaccaacacacccagaaggatagccacctgcactacactgagacaacgagagcactaaacccaggcacaatgcacaccaacaacccacgagaaacacggaacaaagcaaacaaaagacacatacaagactagcacaaacgaaagaacgaccaaacaagaaacacacaacgaatacagcaacgacaacaaaaagccaagaaggctaccaaacgacaaacaacagcgcacaccaaaagacgacgacactacaacatagcagaccaacgacataagaaacacctaactggcagcacaccaacgtgcaccccacaagaaccccaacaaaggaacaacagaaatacgcagacaaaaccaggcgaaacacaaaacacagacgaccaaaaaaaaaaaacaaaacaaacacaaagacacaaagcgccaccaaaaagaacacataaaagcacgaaacaagaaaaaacaacacaagcgacaaacacaaaacgagaaaaacacaacaaacgaacgaacaaaaagcaaaacacatg

SEQ ID NO: 510844 - DNA, 126 bp, Homo sapiens
tggtgttctagaggtcccctcatactggtgtgccagaacggcagatacatatcagctgggcacttgttaagaaactcaaaagtcctggatcggttgcggtgggtcacgcgtgtaatcccagcactt

SEQ ID NO: 510845 - DNA, 421 bp, Homo sapiens
tgcgacggatccgcatctgtcgcccaggctggagtgcagtggcgccatctcggctcactgcaagctctgccacacggtatcacaatgatctttacacctcagcctccggagtagctgggactacaggcgtctgcaaccgtgcccagctaattttttgtatttttagtagagacagggtttcaccgtggtctcgatctcctgacctcgaggtccgctcaacatagcctaccaggtcacattgtttacaatgtgtgagccaccacgcccggccggaacatatttcttcccaaatttcatctccatttctttttttgatacaggatctcgctctgtctcccaggccagtctggaatgcagtggacaatctcggctcactgcaactccacctcccgggttcaaggaatctccagcctaacctttc

SEQ ID NO: 510846 - DNA, 200 bp, Homo sapiens
aggactccccacaccctctgagtccacaccacctgagtcatggggattatgtcgtacagcttatttcatcactctgctatgatggataagattgagagagtgcggagaagtgctatacgtttagttgagggagagatttggtatatgcaaagagatgggggctagttttgtgtcatgtgcagaagcaagccaggcctggc

SEQ ID NO: 510847 - DNA, 172 bp, Homo sapiens
aggatctagggagcgttcttggtgggtcacgtagaacaacgatgcagctggtgcttccaggaacttctgcaagttcttggtgacctcctcgagggaggtcaggccctcccgcagctgcagcgccgtgtgcctcgtccatgcacctgcgagcgcaccacgctcctccactggt

SEQ ID NO: 510848 - DNA, 402 bp, Homo sapiens
tcaaccgtggggaccatcaaccttcgagaaattccagttgtttttttcccaaccgcatcctgcctgtaaatggccggggaaggctttaaaaaaggggggcattgcgatccaaccatcggcaaccgattccgtgttttgatcccggggtgggagggaaccgtggggtccctgggtggggcccatgggtgagaccctccagtactgagacctaaagtccaaatgcttgtaggagccaagtcgtgttttaagtattttttttaaacaaaaaaatcccgttttcccctttgtacttcagcgctagcccctgttttgcccaaccgagtactggggagtatgttttatgttgggcctcctgctgcaaaacaataaacaaagggcgcaaaggtcctcctgcctggccca

SEQ ID NO: 510849 - DNA, 357 bp, Homo sapiens
cccttccctatatgagcatgcctgtgttgggttcacattgagggtaataataatctgacccaggcttatgcgaagaagaatgtttccatgttccttatcctacctttagttcttcatatagggtatatagattggtccaattggtgtgtgagaagtccagttatatgtttggtatttttttagatagtgggtgttaagcttacccgctttcttaattggtgcctgcttttaggcctactatgggtgttaaattttttactctctccacaagtgttttctcatatgtgtccaaagacctgctcctctgtgctctcacagttatattcacaagggtatttagagggctccgctcgtgcc

SEQ ID NO: 510850 - DNA, 383 bp, Homo sapiens
  misc_feature (281)..(281): n is a, c, g, or t
  misc_feature (338)..(338): n is a, c, g, or t
  misc_feature (380)..(380): n is a, c, g, or t
tgggtattgttgctggttattcagggcccaagggctcttcagttagtaggtgatgaatgctgccagaacttagtccttcccttcaaggcagcaggttctcttctggcccagggtgtgtctagtattatcatccagaagttaggacctggaaagtggggcccagaactctgaccagtgccttatcttgctgtggctaagctggtatcttaagatataagacaaagacctctgcacttttccctctcctctcctcaagtggagggaatgggagtctctcacanctgtgagctgtgcaacctggggtgaagggggaggggtgatgcccttagccaccccanctgggttcaaagtaaggtcaatgtccccaacaacctctcaantca

SEQ ID NO: 510851 - DNA, 297 bp, Homo sapiens
  misc_feature (13)..(13): n is a, c, g, or t
  misc_feature (25)..(25): n is a, c, g, or t
  misc_feature (274)..(274): n is a, c, g, or t
  misc_feature (281)..(281): n is a, c, g, or t
acggcataatgtngccagatccttngttttccaggagaagctggaaattcagatttttaaatcttatctcattgggaagtaatttaaagaaaatttaatgcaatgttagccaaataaaacctatctagaagccatgttttgtcccccagtttgtgattcgaatttgagtcgagtgtatagtatattggtgttagatagtctgtttcttcatgctactaacaacaagccattgtaatgtatttctacattttgtgacttatagagttaccacccncttattntagaaacgtggcccag

SEQ ID NO: 510852 - DNA, 845 bp, Homo sapiens
gtgagtgtttacaccggcggcagtgcggcgggttccttccgcgggacggggagaaagagagagcgcgaaagacgagaggatgtctctcgtcagactggcacctggcggtgatagctggctgaccagtccacttactccaaagtctattcgttcggcttgccagcaggacagaacctgggcagcaactacgtcgcctagggggcctactagctactctcactctctcctgacagcagcttcacttgcctggcaacactccagcgagctctcgttccagcacccctgcagctgaccttgactctgacctcttaccgtgctggctccggacacgcctaccacagactgaccccacgcacaactcagcacctctctactagcgccactcacacacccctgcgagcctcccacctgcttccactgctcacctcgccgaaaacgctcgcctggcccttgacaccacctgcacttcaagagaacgaccccgcggcgaaaccctggtcgccgacaaccgcacgcctgggcgcctcgcccccacctgcaccaccgaacgctctccccgcacagctagctccagcaccacccaacccatgtaccccacactggccccacccacccccccagatacttccccgttccttattcaacaacaacgcgcaaacgacgcccgcccgcccacaccttccaccacgagccaaatacgccttccaacgcacaacatcctacaacctgtcaaacaacccctacaactcgacatacttaccacacaaacatccaaatctagcatgggctccacaacccccccccaacgagccccaatctcaaaccacagcttgtaaccccactta

SEQ ID NO: 510853 - DNA, 550 bp, Homo sapiens
  misc_feature (2)..(2): n is a, c, g, or t
  misc_feature (4)..(4): n is a, c, g, or t
  misc_feature (42)..(42): n is a, c, g, or t
  misc_feature (60)..(60): n is a, c, g, or t
  misc_feature (83)..(83): n is a, c, g, or t
  misc_feature (91)..(91): n is a, c, g, or t
  misc_feature (115)..(115): n is a, c, g, or t
  misc_feature (133)..(133): n is a, c, g, or t
  misc_feature (185)..(185): n is a, c, g, or t
  misc_feature (192)..(192): n is a, c, g, or t
  misc_feature (247)..(247): n is a, c, g, or t
tnanaccccggttccctttgggggttgcaccttttccagtgntgctgcttgcacctcttntggaagcctactttgacttgagnccagtggntacccaccgttgggacggcagttncagtcaagcccaaggaanggccagttccaacaccattgtccaagtcaagcaccccaagcccaagcttaanggcttgntcaccgaagtaggctctggcttctgcccacagggcacctgtctgccgctgccgcntcagctgctttggcccagccagcttcagatctggtcttggcgagctctcgccaggaccccaaggctgttggtctgtctggcccttgccccacccccttgccagatccctggtgtctggagctgagtggccgggcatcggtcccaagcatcaaagcctttggcctttctcctcccaggcctccacaaaggcctggcagacagaggtctcattccagcctgactcttgtcccctgggggacccagacaaagcacagcagccgctcagagacaggaatagaaatttcattaaaatctatggacttt

SEQ ID NO: 510854 - DNA, 696 bp, Homo sapiens
gcaagatggcggcgcccagaggctgctgaggcgcggaacggacgatggcgctggctgtgcgttggtgtgcatggtgtgctctggctggcggctgtgcgtgcttgatgctggtgccgtgtggctggggcgaggtgcactgtgactgtgctgtgcctggtgcgctcccggagcctggcgcgaagcggcagaagccgacggctggacgtgtgccctgtggtaccaagtaacagtaggtagcgaagcagcgctagcccagcagccgatctgcagtacatatacgtagtagaggggctatacagctatactacggggaggtgcgcttagggctgtatgctctatcactataatgttggtagcacccaagacgtacacgtgggacccagggtgcccccagcggcccagtgctgccccagaaccagacgccctgcacggggattcccgtgccctgttgcccactaatacagcctgcggagctagggacgcgagacagacgaatcttccactccttgccttggatatagctgcggcctaactggggactatccaacacccctggcctaggctcccctcgatagacgaacatagccagggcagttggttacccgaaacacgcttctgggagagggctagggcgaaccatcagaacaaaaggagaattccatccaggccctctgggactttctcaccagggaaggc

SEQ ID NO: 510855 - DNA, 1422 bp, Homo sapiens
ggacgccgccttcgccgctggctccgtctgttggggggcgaacacgccgcggtcctcgtcgtggtgagcgcagccactcaggctggtcctgggggtggggctgtaggggaaagtgctaaagccgctgaggtgcagtggctcacgcctgtaatcccagcactttgggaggccaaggcaggtggatcacctgaggtcgggagttcaagaccagcctgaccaacatggagaaaccccatctctactagaaatacaaaattagccaggcatggtggtgcatgcctgtaatcccagctactcgggaggctgaagcaggagaatcgcttgaatccgggaggcagaggttgctgtgagccgagatcgcgccatttccagcctgggcaacaagagggaaactccgtctcaaaaaaaaaaaaaaaaaggaagagaaaagaaaacttaagtttcagccaggcatgtgaagtaagaactctgctagagaggaaatggctgcttcatcatcatcctcctcagctggtggggtcagtggaagttctgtcactggatctggtttcagtgtctcagaccttgccccaccacggaaagcccttttcacctaccccaaaggagctggagagatgttagaagatggctctgagagattcctctgcgaatctgtttttagctatcaagtggcatccacgcttaaacaggtgaaacatgatcagcaagttgctcggatggaaaaactagctggtgcgcagcaagtgcaaagccagtgggggactttctcacagcttacatagccatccagagatccacagctacgtcactgaattgttaatgcacatttgtacttggtttctctgtatctattcacaggcaacaaatacttatatgtgtgatctttcagggaatgttttgtttatttgtttttaaaagtattgggaatcagattaagacaatcagtttcagagaaccaggaggtttggggttaagagatactcaaaaattttcacaagccaagtagggcatatatcagatttggccaactgaatggcgtctgtcctgtcatccatatggtgcctggaaatatttaccagtcaaggtcaaggtcagcatctgtggttaaaaatatagcattctgacctaaaaaagttattttgcagatgaatgtgttttcaactcaggacctatccaaatgaggaatttttaaatattcttttttttttcctatttttagacatcaattctatagattctgactttttctaacctcttatagacatgccaaatgctggcaaaaagaagtgctttttggatatggcagcacttgtaaaaataaagcagtaagcaaaatccttttaaacacagaaatcctgagttcttctcattggtggactcaagcaattctgtagcaaataaatcctttgaaagagctccaaa

SEQ ID NO: 510856 - DNA, 229 bp, Homo sapiens
acagtaacagtgagctcagacgtctctaaaaaaatgttgccttaatgaacgcacatggcggttgaatcttaaggttaaattgaatatgaaagatcctcatgaattaagtagtcgatgcaattttgaacgttaattgatataaaaaacaaccaccaaaattaggcttataaaactgactttttcattacggtggttatgaaatctagccccagactttatgtaaaagata

SEQ ID NO: 510857 - DNA, 1062 bp, Homo sapiens
ggacgccgccttcgccgctggctccgtctgttggggggcgaacacgccgcggtcctcgtcgtgtgaagtaagaactctgctagagaggaaatggctgcttcatcatcatcctcctcagctggtggggtcagtggaagttctgtcactggatctggtttcagtgtctcagaccttgccccaccacggaaagcccttttcacctaccccaaaggagctggagagatgttagaagatggctctgagagattcctctgcgaatctgtttttagctatcaagtggcatccacgcttaaacaggtgaaacatgatcagcaagttgctcggatggaaaaactagctggttgtggtagaagagctggatggtcacctctgtggcgcagcaagtgcaaagccagtgggggactttctcacagcttacatagccatccagagatccacagctacgtcactgaattgttaatgcacatttgtacttggtttctctgtatctattcacaggcaacaaatacttatatgtgtgatctttcagggaatgttttgtttatttgtttttaaaagtattgggaatcagattaagacaatcagtttcagagaaccaggaggtttggggttaagagatactcaaaaattttcacaagccaagtagggcatatatcagatttggccaactgaatggcgtctgtcctgtcatccatatggtgcctggaaatatttaccagtcaaggtcaaggtcagcatctgtggttaaaaatatagcattctgacctaaaaaagttattttgcagatgaatgtgttttcaactcaggacctatccaaatgaggaatttttaaatattcttttttttttcctatttttagacatcaattctatagattctgactttttctaacctcttatagacatgccaaatgctggcaaaaagaagtgctttttggatatggcagcacttgtaaaaataaagcagtaagcaaaatccttttaaacacagaaatcctgagttcttctcattggtggactcaagcaattctgtagcaaataaatcctttgaaagagctccaaa

SEQ ID NO: 510858 - DNA, 379 bp, Homo sapiens
atcacagcagcagaagtttcaacggtgacctggtgaagatgggataagaggctcggtcagactcacagtcgggcttcccacaatccaggcatcgggatatgtgaaaatgatagagaaagtacatttcgggcactgattagttggtaaagacaaatcttacagtccctatgggacagccagttaaaagcaggcagtatcacccagcggtcaagaggagagaccttcggaactgccggttatggggcttaaattctagctctcctctatcaaatgtgtaacctttggccagtcactttacctctccatgcctcagtttcctcacttgaaaaatggaaggcatagtccctatctggtaaggtacttgagaggattaaatgag

SEQ ID NO: 510859 - DNA, 3009 bp, Homo sapiens
cggacgcgtgggtcgacccacgcgtccgggcgaacacgccgcggtcctcgtcgtggtgagcgcagccactcaggctggtcctgggggtggggctgtaggggaaagtgctaaagccgctgaggctctgagagattcctctgcgaatctgtttttagctatcaagtggcatccacgcttaaacaggtgaaacatgatcagcaagttgctcggatggaaaaactagctggtttggtagaagagctggaggctgacgagtggcggtttaagcccatcgagcagctgctgggattcaccccctcttcaggttgatactgcctggatggtcacctctggtgcgcagcaagtgcaaagccagtgggggactttctcacagcttacatagccatccagagatccacagctacgtcactgaattgttaatgcacatttgtacttggtttctctgtatctattcacaggcaacaaatacttatatgtgtgatctttcagggaatgttttgtttatttgtttttaaaagtattgggaatcagattaagacaatcagtttcagagaaccaggaggtttggggttaagagatactcatctgtcctgtcatccatatggtgcctggaaatatttaccagtcaaggtcaaggtcagcatctgtggttaaaaatatagcattctgacctaaaaaagttattttgcagatgaatgtgttttcaactcaggacctatccaaatgaggaatttttaaatattcttttttttttcctatttttagacatcaattctatagattctgactttttctaacctcttatagacatgccaaatgctggcaaaaagaagtgctttttggatatggcagcacttgtaaaaataaagcagtaagcaaaatccttttaaacacagaaatcctgagttcttctcattggtggactcaagcaattctgtagcaaataaatcctttgaaagagctccaaattggtggcattatcctttcaaaatctcagggatttgggatgaagtgaagaggtcaaattactttttagaagaagggaatctaaaaaccatctctcctaaacaaatggtagactggctttacttaagggatatttgtctttataggagtacataaatttatcttaatgatatttaagtagttttttttttttttttttgggacgaagttttgctcttgttgcccaggctgtatcgcaatggcgcggtctctgctcactgcagcatccgcctcccgggttcgggcggttctcctgcctcagcctcccgagtagctgggattacaggcgcccgccaccacacccagctaattttttgtatatttggtagagacggggtttcaccgtgttgaccaggctggtctcgagcttctggcctcaggtgatccacctgcctcagcctcccaaattgctgggattacaggcgtgagccaccttgcccagccaatttttttttaaagagacatggtcttgctatgttgcccaggttggtcttgaactcctggcctcaagagatccccccaaccttggcctccaaagtgctgggattacaggcatgagccaccgcgcctggcctcaagtaagtttttataccatgataggggaaaacctggaaggctaagagatgtgctgttttccttcatgggaccccactttccacagtaaacaactggtataatcatttattacgttgtatgcaaattttgccttagacaacatttgtctggttccttattaataacttgcatctgatctgcttagagttgcttaattataagtaaatataatcccagtagcatttagccttaatctcaagagttcaaaatgtttaacacattctacctgacgggaggtggtgacctcattcagtcggttaagagcctgagccctgtgaagttaaacacctgctcatggtcacatagcccaggcagaagaaaatctcggacttggaatagatcccagttgcctgataattcatctcattattgcctctaaagcaaattggagactgggcacagtggctcccacctttaatcccagcacctggggaggctgaggtgagtggatcactagaggtcaggagttcaagaccagtctggccgacatggtgaaactcagtctctattgaaaatacaaaaattagcccagtgtggtggcacacacttgtaatcccagctactcaggaggctgaggcatgagaatcgcttaaacccaggaggcggaggttgcagtgagctgagatcacaccattgcactctagtctgggtgacagagcgagactctgtctcaaaaaaaaaaaaataaagccgggcgtggtggctcacgcctgtaatcccggcacttggggaggctgaggcaggcggattgcctgagaatcgggagttcgagaccagcctggccagcatggtgaaaccttgtctctactaaaactacaaaaaaaatgggccgggcgtggtggcgggcgcctgtaatcccagctactcgggaggctgaggcagcagaatcgtttgaacccgggaggcggaggttgcagtgagtggagatcgtgcctgtgtgctccagcctgagcaacaagagcgaaactgtctcaaaaaaaagaagaaaataaataaataaaaatcagagcacaagaagtaccagtccaccaactcacattttctatattaataattcttaactaaaagaagttccatattcgacagcattttagttttttaatagtacttattagcatcaaccatcttgataatcaccaagggaaaaattaaaaatacctagactgcaataaacctttaaattggattttcagtgagaatttagaagcaatcactacctttctcgtttcatttgtgtaaccatgcagcataggcactgtgttacatcatctttacgctttggtatttgaacttattacagaattttttctctaaattggatgtttctttatatgaccttggaaactgaagtgatcttagcattaaacaaaaatgctttttaaagcaaaa

SEQ ID NO: 510860 - DNA, 1108 bp, Homo sapiens
ggacgccgccttcgccgctggctccgtctgttggggggcgaacacgccgcggtcctcgtcgtggtgagcgcagccactcaggctggtcctgggggtggggctgtaggggaaagtgctaaagccgctgagtgaagtaagaactctgctagagaggaaatggctgcttcatcatcatcctcctcagctggtggggtcagtggaagttctgtcactggatctggtttcagtgtctcagaccttgccccaccacggaaagcccttttcacctaccccaaaggagctggagagatgttagaagatggctctgagagattcctctgcgaatctgtttttagctatcaagtggcatccacgcttaaacaggtgaaacatgatcagcaagttgctcggatggaaaaactagctggtttggtagaagagctggaggctgacgagtggcggtttaagcccatcgagcagctgctgggattcaccccctcttcaggttgatactgcctggatggtcacctctggtgcgcagcaagtgcaaagccagtgggggactttctcacagcttacatagccatccagagatccacagctactcgggaggctgaggcagcagaatcgtttgaacccgggaggcggaggttgcagtgagtggagatcgtgcctgtgtgctccagcctgagcaacaagagcgaaactgtctcaaaaaaaagaagaaaataaataaataaaaatcagagcacaagaagtaccagtccaccaactcacattttctatattaataattcttaactaaaagaagttccatattcgacagcattttagttttttaatagtacttattagcatcaaccatcttgataatcaccaagggaaaaattaaaaatacctagactgcaataaacctttaaattggattttcagtgagaatttagaagcaatcactacctttctcgtttcatttgtgtaaccatgcagcataggcactgtgttacatcatctttacgctttggtatttgaacttattacagaattttttctctaaattggatgtttctttatatgaccttggaaactgaagtgatcttagcattaaacaaaaatgctttttaaagcaaaa

SEQ ID NO: 510861 - DNA, 353 bp, Homo sapiens
aatagccacatttttttactggccacaaattacaattgcagaatatttatggccatacaagacacttccaccaagcctgaaaaatgtataaatgtcctaggagtgcagcattttttcttaaaagataatattaatgagctagcttaggtcaacgggttaatggtcattgttaaaacgaatagccccgactttaatgagtacatctgcaccttccaagtttaattataactctttctctttatagttagagtacagacactaacaaaagacaatgcattcctgctcttgttttctgaggatgtccaactctgtaatggagtcatttctaataaacttgcttctttaactttgca

SEQ ID NO: 510862 - DNA, 723 bp, Homo sapiens
cggacgcgtgggtcgacccacgcgtccgggcgaacacgccgcggtcctcgtcgtggtgagcgcagccactcaggctggtcctgggggtggggctgtaggggaaagtgctaaagccgctgaggtgcagtggctcacgcctgtaatcccagcactttgggaggccaaggcaggtggatcacctgaggtcgggagttcaagaccagcctgaccaacatggagaaaccccatctctactagaaatacaaaattagccaggcatggtggtgcatgcctgtaatcccagctactcgggaggctgaagcaggagaatcgcttgaatccgggaggcagaggttgctgtgagccgagatcgcgccatttccagcctgggcaacaagagggaaactccgtctcaaaaaaaaaaaaaaaaaggaagagaaaagaaaacttaagtttcagccaggcatgtgaagtaagaactctgctagagaggaaatggctgcttcatcatcatcctcctcagctggtggggtcagtggaagttctgtcactggatctggtttcagtgtctcagaccttgccccaccacggaaagcccttttcacctaccccaaaggagctggagagatgttagaagatgatctcatgctgctttctgaataattggattcagatctgcaatgcatattaattgtaaagaagctattaagtggattaaagatgagtttgccctgaaaaaaaaaa

SEQ ID NO: 510863 - DNA, 422 bp, Homo sapiens
  misc_feature (182)..(182): n is a, c, g, or t
  misc_feature (196)..(196): n is a, c, g, or t
ccaccctagcccaggaaagaactggcctgtgtaaagcaaaaccccagtcatccccctccagaaatttttttggcagccaagcctgaccctaagggttccactttgctttaaaagctaggagtggcctttagagccaggaccacattaatcccacagttcaacctcagccccaagtcaggcangaagcgcttgatangcggcatttttctctatatcacagtttaaatttccgcaaacagcctttggttgccaacgaccattccagccataccacagtccgtaatctcagcaacaggcgaaacgtatttaacacacattcagttttaataaacagataaaactctattacagaaataactgagacagagcaaatctcttactcatttctcttcaccaataaaacattttatcccgtaaacaaa

SEQ ID NO: 510864 - DNA, 405 bp, Homo sapiens
ggacgccgccttcgccgctggctccgtctgttggggggcgaacacgccgcggtcctcgtcgtggtgagcgcagccactcaggctggtcctgggggtggggctgtaggggaaagtgctaaagccgctgagtgaagtaagaactctgctagagaggaaatggctgcttcatcatcatcctcctcagctggtggggtcagtggaagttctgtcactggatctggtttcagtgtctcagaccttgccccaccacggaaagcccttttcacctaccccaaaggagctggagagatgttagaagatgatctcatgctgctttctgaataattggattcagatctgcaatgcatattaattgtaaagaagctattaagtggattaaagatgagtttgccctgaaaaaaaaaa

SEQ ID NO: 510865 - DNA, 237 bp, Homo sapiens
acattgccaggatcttttttcctttccaggaagtggaataatggcccccccccccctgtttcccctcgttaaaatcctatgacttttggccgggggcagtggctcacgcctgtagtcccagccctttgggaggtcgaaatgggcagatcccctgaggccaggagttcgagaccagcctggacgacagagtgagaccctgactcaataaataaataaataaatataaataaagaaata

SEQ ID NO: 510866 - DNA, 734 bp, Homo sapiens
  misc_feature (373)..(373): n is a, c, g, or t
  misc_feature (413)..(415): n is a, c, g, or t
  misc_feature (437)..(437): n is a, c, g, or t
  misc_feature (442)..(444): n is a, c, g, or t
  misc_feature (448)..(448): n is a, c, g, or t
  misc_feature (482)..(484): n is a, c, g, or t
  misc_feature (487)..(487): n is a, c, g, or t
  misc_feature (494)..(494): n is a, c, g, or t
  misc_feature (500)..(500): n is a, c, g, or t
  misc_feature (502)..(502): n is a, c, g, or t
  misc_feature (523)..(523): n is a, c, g, or t
  misc_feature (544)..(544): n is a, c, g, or t
  misc_feature (561)..(561): n is a, c, g, or t
  misc_feature (570)..(570): n is a, c, g, or t
  misc_feature (576)..(576): n is a, c, g, or t
  misc_feature (582)..(582): n is a, c, g, or t
  misc_feature (590)..(590): n is a, c, g, or t
  misc_feature (602)..(602): n is a, c, g, or t
  misc_feature (605)..(605): n is a, c, g, or t
  misc_feature (616)..(616): n is a, c, g, or t
  misc_feature (626)..(626): n is a, c, g, or t
  misc_feature (631)..(631): n is a, c, g, or t
  misc_feature (633)..(633): n is a, c, g, or t
  misc_feature (636)..(637): n is a, c, g, or t
  misc_feature (645)..(645): n is a, c, g, or t
  misc_feature (647)..(647): n is a, c, g, or t
  misc_feature (652)..(652): n is a, c, g, or t
  misc_feature (660)..(660): n is a, c, g, or t
  misc_feature (667)..(667): n is a, c, g, or t
  misc_feature (673)..(673): n is a, c, g, or t
  misc_feature (676)..(676): n is a, c, g, or t
  misc_feature (686)..(686): n is a, c, g, or t
  misc_feature (696)..(696): n is a, c, g, or t
  misc_feature (700)..(700): n is a, c, g, or t
  misc_feature (710)..(710): n is a, c, g, or t
  misc_feature (722)..(724): n is a, c, g, or t
cggacgcgtgggtcgacccacgcgtccgggcgaacacgccgcggtcctcgtcgtggtgagcgcagccactcaggctggtcctgggggtggggctgtaggggaaagtgctaaagccgctgaggtaagaggccgaggggtcgagggccctcgggagcttggtgaaaagggagttaacccccaggatcctacctgcagggactagaaaaatggagaaggtaggaggagaaacaggagactgctgcagcagacgtgcgataggaaatttccccaggccgggtttgaccgagtgcgcatgcgggccgagggctggcgcctgcgcagtgggacagcgccgatggcgtagtttcctggggacccagctgggtgggaaaantggctaagagttagcttgggagccgctggtgttctgagcnnncccctctctggccactttttcnccacnnnaaanaaaaaaaaaaaaaaaaaaaaaaaaaaaaaagggnnnggnggggggnagaagnangggagggggggaaaaaaaggngaaaaaaaggaaaaaaaaaangaaaaaagggaaaaaanaagaaaggngaaggnaggggngaaaaaanaaggagaaaganganagaaaacaaanagagggaganacaangnagnngaaaaaangnagaanagaagggngagacgngagaanaanagaaaaaccnaaacgcaaangaangaaaaaagancacaaaagaaannnaaagagaagg

SEQ ID NO: 510867 - DNA, 613 bp, Homo sapiens
  misc_feature (9)..(9): n is a, c, g, or t
  misc_feature (169)..(169): n is a, c, g, or t
  misc_feature (180)..(180): n is a, c, g, or t
  misc_feature (223)..(223): n is a, c, g, or t
  misc_feature (248)..(249): n is a, c, g, or t
  misc_feature (256)..(256): n is a, c, g, or t
  misc_feature (274)..(274): n is a, c, g, or t
  misc_feature (278)..(279): n is a, c, g, or t
  misc_feature (286)..(286): n is a, c, g, or t
  misc_feature (288)..(288): n is a, c, g, or t
  misc_feature (292)..(293): n is a, c, g, or t
  misc_feature (310)..(310): n is a, c, g, or t
  misc_feature (328)..(328): n is a, c, g, or t
  misc_feature (347)..(348): n is a, c, g, or t
  misc_feature (354)..(354): n is a, c, g, or t
  misc_feature (360)..(360): n is a, c, g, or t
  misc_feature (408)..(408): n is a, c, g, or t
  misc_feature (612)..(612): n is a, c, g, or t
gtaaaatanaaaggatggtaacacacacagtggaaagggatgtgagggtatgggcaggagcaataccagaaatgggaaaaaatatagatatcattatatacacacagtggactggaaagaagtaaagatgggggtgtaaggtagggcaggggcaggtgaggaaagcagntgggggggccnaataaattacattcttgagagagcatagtgtgtgggggggtgngtgggtgtaggtgagagctggtagnnaggacantccaaaatgtgccaggcntggnntcttgancncatnnaagggaggaggaaggancagattctgcacggtgcntggcttagtgctggaattnncatttngtggcntggaggcaggtggagggccaggatagtgtgtaggcggcatctccaacntaagcacaggcttctggggaagaagcaggctggagaaaaaggcttggaagataggggtttgcgagcggaggtcagggcaagctgaagtggaggggtgaaatcctgcaggagtgagctggggcatgttcccactagagtaagaggagcaggaagatgcagtgcaggaaagctgtaaggagtgagtatgggagggctgggtgggcna

SEQ ID NO: 510868 - DNA, 280 bp, Homo sapiens
catgaggcggaaattgcacagttaattcagcatattcatgataaggggccggtacgttcagccgattttgagcatcctcgtaaaggtgcaagcggctggtgggaatggaagccgcataaacggcatctggaaggtttatttactgccggaaaggtgatggtgattgaacggcgcaacttccagcgcgtttatgatttaacccaccgtgtcatgcctcactgggatgatgagcgcgatctcgtttcgaaacagaagcagaaatcatcatgctggataacag

SEQ ID NO: 510869 - DNA, 403 bp, Homo sapiens
cctgaagaaagtaaggaagcaagcttgaggcaacctggcagaaaactgtgcccattagaagggtcgctcttaggccaggcgtgatgactcacgcctgtaatcccagcactttgggaggctgagacaggcggatcacttgaggtcaggagttcgagaccagcctggccaacatggtgcaacctcgtctctactaaaaatacaaaaattagccgggcatggtggcaggcacctgtgatcccagctactcgggaggctgaggcaggagaatagcttgaacccgggaggcagaggttgcagtgggccaagatcgcaccattgtactccagcctgggggacaagagtgagacttcgtttcaaaaaaaagaaaaaaggaaagacaacacaataggagacattttgcaaa

SEQ ID NO: 510870 - DNA, 583 bp, Homo sapiens
cttcttacgcccaaactcacaaacattctatagaagtagcaaaaatagacagatctgcaacatggtgaggtaactccagtctatttatgggagaatcacacgatgaactcttaagtcatattcacagtttacttatttactttatggggctgcctatggtgggcggggtggaaaggctagctagttagggggggtgcacgctaatagtgtttcagtcggtgacgtcactcactctgagacggtgacgtcactcactctgagacctagaagtagttgttccccttgctctggaggggccacggcttttgtggagtgatgggtaaacgatgcttcgtgagtggctgtggttgatgtgtgcagagggtccctaagttcaagcccaggttggagcgaggagagggacggaagctatactgttacacctactccagattacttgtatttatataagcaaaaaatatttcactttattttgtatagtgtacagccaaggccgcagctactcttcatggtgtccacacaggaataacacaatacctcataaaaagacatatatctacaagaacttatacataatactcca

SEQ ID NO: 510871 - DNA, 339 bp, Homo sapiens
  misc_feature (205)..(205): n is a, c, g, or t
  misc_feature (300)..(300): n is a, c, g, or t
cacaggtccctcagctctgttctccacgtttccttctcctgcctggctttgcttcctgtatcctctgcagccctgacctccagatgctggaggtgatgatggcaggcatgctgtctctgcttcttttcaagggctggaactgaaagctcctttgactcccacagcttacctgtgacctttccagttgctctgagggtagccacgncccttcgttggaccattactggccgagttatgggttgccgttgtagtgaggggcaaaattaatatccttgataccctgggagaggttcctgggancttctggggtgagaccagggacgttggggcaggaaggca

SEQ ID NO: 510872 - DNA, 106 bp, Homo sapiens
cagttataatatgatgatctgatgaatcgcctgacttaccatgtgtgtgctattgttttttatatatacacaccacactgccagtttacacactaaaatataatct

SEQ ID NO: 510873 - DNA, 540 bp, Homo sapiens
  misc_feature (503)..(503): n is a, c, g, or t
catcccagggagcctgggagtcagcgggcctggatgcacctcccagttctgcctcttattagccagctgtgtgttaacccctcatctggtttgctcaaggtaacatgaccatcacaaaagcaacagaaacagattatttactttcagattaacttgtgaaaatgacaagttgaatattgtcatttcagtattcaagttgaatactatcaattcaatattcaagttgaatattgtcacaagttgaaagattaacttgtgaaaatgacagttggttgaatattggtattttctgcctccaattgttgcatttgttatttgcaacttttaatgcaccataaaagcatttttgttttgttttaaaagcatttgttttaacgcaccttacaagcatttttgttttgttttaaaagcgtttgtttacaaatttgtgttttgtgacttctgggatgatttaacaacttttaatgtaccttaatacttctctgttagcttttgagattaanaactattctaatgcaatttagccattatgaaaattga

SEQ ID NO: 510874 - DNA, 1206 bp, Homo sapiens
  misc_feature (71)..(71): n is a, c, g, or t
  misc_feature (476)..(476): n is a, c, g, or t
caagaaggcctagtgttgaaaggtgtacagcagctcacaaagacagaagaagatccgcacgtgacccaccnttctcggcggtccgaacgacactcgcagcactctccggagaacatgtcccatacatatcctacggtagagagcgctcccaggagaaacaagcttgaccgactatgctatcatcaagttgccgctgaccagcatgagtctgcgcatagaagaagatagaagacaatgaatcacactatgtgttcacttgtcggatgtagaatagctcagactaagctaccgagatgtaaacaggctgtgaagtaagctgtagtgacaattgagtgtggccaaggatctaaaatgccttgaattcggccttgaatggatgagaatgaatggtactattgtgcgagcatggcctgcgctgattacgagtagcttgtggaatgtggccatcaaagagtagggggatagatcttaatacntggagatcacagatctgccgtcaatgtgcgtgtaattatgatgagtcattattgattattagtgttcttctcacactcatcatcaaataatagataatagcaaacatagaataagataaaaaaatagaggacacacatagaaacattataaagagacacaaaaactgtagtatacaccagcatttgactcattctgttgagttccacaaggaaacacatcacgaggcggacacctggcacaaacacccaagagaatgctaaagatgaccgtgggacagcgttggagccagggcctggagcaacgtcttttccagaggtccccccgccatgaacggtgctggaagccgtatcacgaactggccgttgtaaaagcaacggccggggcaggcagcagcgccagcggggaaaggcaggggaacagtttccccctaaattctgtttccggtaacgacacgtagcagggtagcgaacacgcgaaagggagagagggccatgggccaaatatagtggtgagttcgttcaaggagaaatggcggtcgcaaagagcccgaatgggtacacgaggcgattacgcccgccgcgatacaaggacccctggataaggcagataggacccacgggaaacagaacagtgggaacagtgggaagagagtccagcggccaacctcaggggcaacgggcactcaggcacaaggagatatgggcacgtggaacgaaacacaggcaaaga

SEQ ID NO: 510875 - DNA, 156 bp, Homo sapiens
aaggttgatatcatagctctatacatctcagtaaagtacttacgatattgctcaccgatatcaaaaaatcatttatatctggacctcgctttgtgcacagtggcattgtcacgctggaacaggagactgccttcccgttactggtacggcggggac

SEQ ID NO: 510876 - DNA, 715 bp, Homo sapiens
ataatatacccttaaaatgtcatctattctatcctacttgtattattcagggttccctagaggaacagaactaataggatagatagatgtatatatgaaagggagtttattaaggagtattgactcacacaatcacaaggtgaagtcccacaataggctgtctgcaagctgaagagcaaggaagccagtccaagtcccaaaacctcaaaagtaaggaagctgatagagcagccttcggtctatggccgaaggccctagaacccctggcaaatcactggtgtaagtccaagagtccaaagctgaagaacttggagtctggatgttcaagggcaggaagcatccagcacaggcagaatgatgaagaccagaagactcagccagtctagtccttccacattcttctgcctgctctattttagccacgctggcagctgattagatggtgcccacccagactgggggtgggtcagcctctcccagtccacttgactcaaatgttaatttccttgtggcaacagcttcacagacacacccaggaacaattactttgcatccttcaatccaatcaagtggaccctcaatattaaccatcacactactcaacacaggaattcaatttacaacatgatgggatggaaaataccagtgaacctgggttggggaggccagatttggtttcactttttaaaatttactatggttgttgaccttgaag

SEQ ID NO: 510877 - DNA, 262 bp, Homo sapiens
tggacagggaccaggaattgggggaagggagcccaggaagaggtggatacaggagacacttctcatttcttctccagacctaggggggtccacagatggggacaaaagacccagccagcccactgggtggcccgggcaagtaaaaacctctttgtgcttcatttgagggcacggtgagagttacccgccgcctcccagggcctaacacgagtttcatgtgagtggacaggtgtgagctaataaaggtgctttgcaaagttta

SEQ ID NO: 510878 - DNA, 563 bp, Homo sapiens
  misc_feature (362)..(362): n is a, c, g, or t
  misc_feature (472)..(472): n is a, c, g, or t
  misc_feature (497)..(497): n is a, c, g, or t
ccagcgtctcaattcttcaatctctacaatgatgctgttgtgtaggagatctcatgtattctccttactgacaatgtagtcaaatcagtcaacagacaggcataagggtgattatccatttatattgtttatttattcacatatcttggtatatagcacattatgtaaatatttttccttcaaatgtcaaattacatttagaagtaatagtacgatggtgggtgctctggcttaagcccgtaattgagcagcttgggaggtttaggcaggcagatttcttcagcgcaattagtggagaccaacctgggaagaacggcgaagcccagtctctagtaaaaatacaacaattagccaggtgtggnggcatccatctgtagtcctagctatttgggaggctaatgtgggaggatagcttgaggctggaactgtagacagcagtgagccaatctcaaaccactgcactccatttggngctacagagtgagaacgtgtctcanaaaatgaaaaatagaggggagtaataataccaaaaatctaaggagaaagatggagtatcaataata

SEQ ID NO: 510879 - DNA, 83 bp, Homo sapiens
accccccaaaggttttaaaagaagttttttggaattttttggaaaggccggtataaggtaaaaaataaggttttttaaaatta

SEQ ID NO: 510880 - DNA, 1545 bp, Homo sapiens
cccttttttttttattattttgttggcccaaatttattttaattttggcacacataggaaacaggatcctatcaaaagaaaacaaaaaagagaaacgagccaattgtgtttgcaaaggaaaacgcattgcacagactctgtgctttcaagttttacctcttgacaccacggacgctctccgggaatttctacaccaccaggagcgtgtctcacatctccagagaagtgtgggcccaaccccacccattccacacaatgtggaaacaaaaagtggccaggaaagtgtccccaaagtgtgggactttccattattgcaggaatcaggcgtttcaacagatagcaacaattatttaaacgcagagttttcaggggcacaaaccaaaatatcgtggtcttacacagacaaaacatttgggaaatttaacaacacagtgtgtttagagccacaatagacacattcgaagtgaatctcttataaacattaatatgggacatattcgaaaaaacagaaacaaaaagggacaacctttatagcctctaagagggaacaatgtttaggagagcgtgcacataattttcaagatagtgtacacacgcgaaatattccacagggggggcacaagatataatcgagtgtctgacttataaatcgcaattttcaccaaacaacaacatttaaagagacaacatctttacaagaaaaaagttgcaaaaaacaaaaaacaaccatttgacaccctgttgcggagagaaaaaagaaacgggcagcagttgattataggcgaaaccccccaagagaccaaaaatatagataacatgatggagcatgtggataacaaaacaacggttgcgcaacaaccaattcagtcaatgaccaactaagggaaataggacataatacaacatataacaaacatattggagaaggaggcccaatgtagacaacaacagaatgggcagatacggatacacaccaagcacgacagtggaacaagcaaaccacgagaacgaagcgacgcaaccaaccaccaaagagagggagtggaaacaaagaaaagacaccacaatgatgagagtggcaacaaagaaacaatcgaagaagggcaccataagaacccaaaacgatcgacaacaatctactaccaaacagagagtgagatacacacgagaaaatagaagaaccccaccaaaagagtgagaatacacatcacccaaccaacaactaatatcgcccaacaaagaaggacgaggaatctactcccggacattaatagcaagaggtactcattaaacaatgttgtacacaaagaggtagtggagacactgaccacagactaatacgagctccgaagtagttaacagaatgtacacagatgcaagaatagtgatatgtccgaaagatcaccaaagataaactaagtgaagatatacaaaacgatatgttaacaagacgagaggaacatcacaatgaggatcaaatattaagaaaaaagtagtgagcaccaccaccaagataataacacgagaaagaaagacaaatatgaa

SEQ ID NO: 510881 - DNA, 198 bp, Homo sapiens
gagcctatgatacccttcaaaagtgaaggagaagtaaagcctttcttatactaatgaaaactgagggaattttttgcctagtagacctgccttgctaaaaaatgctgaaaaggccgagagaaggaatatgatataggtcagaaacttatatctattaatacacaaagaaaagcatcagagaaggcagaagcacggaag

SEQ ID NO: 510882 - DNA, 354 bp, Homo sapiens
ctagagcatccccccccttccccgggtaaccactgacctatttactgtcattttagattattttgcatttttctagaattttatatgggggaaatcatggaatgtactgtttttcggccaggccctttttcaccaatataattattttgagatccatccaaaattctggatattttgcaaatatccataagctactcctttttattggagagtattgttccattacgtgcatatgccacaatttctttacccattcagctgttaatcgacattggaattttttactgtcttggactatttcaaataacgttgatatgaacatttatgctttcatttatcttgaataaatacccg

SEQ ID NO: 510883 - DNA, 980 bp, Homo sapiens
  misc_feature (29)..(29): n is a, c, g, or t
  misc_feature (69)..(69): n is a, c, g, or t
  misc_feature (80)..(80): n is a, c, g, or t
  misc_feature (108)..(108): n is a, c, g, or t
  misc_feature (127)..(127): n is a, c, g, or t
  misc_feature (137)..(137): n is a, c, g, or t
  misc_feature (168)..(168): n is a, c, g, or t
  misc_feature (174)..(175): n is a, c, g, or t
  misc_feature (187)..(187): n is a, c, g, or t
  misc_feature (192)..(192): n is a, c, g, or t
  misc_feature (212)..(212): n is a, c, g, or t
  misc_feature (235)..(235): n is a, c, g, or t
  misc_feature (238)..(238): n is a, c, g, or t
  misc_feature (261)..(261): n is a, c, g, or t
  misc_feature (295)..(295): n is a, c, g, or t
  misc_feature (317)..(317): n is a, c, g, or t
  misc_feature (320)..(320): n is a, c, g, or t
  misc_feature (324)..(324): n is a, c, g, or t
  misc_feature (329)..(329): n is a, c, g, or t
  misc_feature (332)..(332): n is a, c, g, or t
  misc_feature (335)..(336): n is a, c, g, or t
  misc_feature (338)..(338): n is a, c, g, or t
  misc_feature (340)..(340): n is a, c, g, or t
  misc_feature (342)..(342): n is a, c, g, or t
  misc_feature (345)..(346): n is a, c, g, or t
  misc_feature (348)..(348): n is a, c, g, or t
  misc_feature (351)..(351): n is a, c, g, or t
  misc_feature (357)..(357): n is a, c, g, or t
  misc_feature (360)..(361): n is a, c, g, or t
  misc_feature (385)..(386): n is a, c, g, or t
  misc_feature (395)..(395): n is a, c, g, or t
  misc_feature (414)..(414): n is a, c, g, or t
  misc_feature (422)..(424): n is a, c, g, or t
  misc_feature (426)..(427): n is a, c, g, or t
  misc_feature (432)..(432): n is a, c, g, or t
  misc_feature (447)..(447): n is a, c, g, or t
  misc_feature (455)..(455): n is a, c, g, or t
  misc_feature (457)..(457): n is a, c, g, or t
  misc_feature (464)..(464): n is a, c, g, or t
  misc_feature (467)..(467): n is a, c, g, or t
  misc_feature (482)..(484): n is a, c, g, or t
  misc_feature (496)..(496): n is a, c, g, or t
  misc_feature (506)..(506): n is a, c, g, or t
tttaagaggatgccattgtacacccagtncgaaccaatcagattccacgtcagatacctgaacagtcgntctacacgaancccttgcctggtattatcatgggagggnttttgccctttggctgcanctttataccncttttcttcattctgaatagtattggtcacnccaganntattacatgttnggctncctatctctggtctctcccnttttggttattacctgttctgangcnactatacctctttgctatttccncctatgtgcagaggcaccattggcttctttgcangcttttggtttgttaccccaanatncagngtggnganggnngncngnggnngnccngtgtgnccnngtaaaacagaaattaattaaatcnntcatcaacnaagacccgtttttgtgacncctgagtnnnannagaantattggcctagtaancctccagnanccccgtnatnctagataaacccccnnncccatacccctnttcccccacnaagatgtgtcttcaacactataaagcatttgtattgtgatttgattaagtatatatttggttgttctcaatgaagagcaaatttaaatattatgtgcatttgtaaatacagtagctataaaattttccatacttctaatggcagaatagaggaggccatattaaataatactgatgaaaggcaggacactgcattgtaaataggattttctaggctcggtaggcagaaagaattatttttctttgaaggaaataactttttatcatggtaattttgaaggatgattcctatgatgtgttcaccaggggaatgtggcttttaaagaaaatcttctattggttgtaactgttcataatcttcttacttttctgtgttgacttcattattcccctggtattggccttttaaactatgtgcctctgagtctttccatttataaatttgttatcttaataaatattataaaaatgtcca

SEQ ID NO: 510884 - DNA, 274 bp, Homo sapiens
gcggccttgtggggcggagctttttgcccagcaaatatggagcgcgcccaaaagagcccccccggaagggtccccgcattttccttcttttcaataggggttgaaaattaacccaggcggatcgtggcatgatgggaactttagttgacgaacccccccccgcccctgaggggcagtaaaagtcgccaggtccggctccatttctggcaaaaaacttgcagcaccgaggggttgtggagagcccttgcaggggaagagggcagggtcatcccga

SEQ ID NO: 510885 - DNA, 927 bp, Homo sapiens
  misc_feature (29)..(29): n is a, c, g, or t
  misc_feature (69)..(69): n is a, c, g, or t
  misc_feature (80)..(80): n is a, c, g, or t
  misc_feature (108)..(108): n is a, c, g, or t
  misc_feature (127)..(127): n is a, c, g, or t
  misc_feature (137)..(137): n is a, c, g, or t
  misc_feature (168)..(168): n is a, c, g, or t
  misc_feature (174)..(175): n is a, c, g, or t
  misc_feature (187)..(187): n is a, c, g, or t
  misc_feature (192)..(192): n is a, c, g, or t
  misc_feature (212)..(212): n is a, c, g, or t
  misc_feature (235)..(235): n is a, c, g, or t
  misc_feature (238)..(238): n is a, c, g, or t
  misc_feature (261)..(261): n is a, c, g, or t
  misc_feature (295)..(295): n is a, c, g, or t
  misc_feature (317)..(317): n is a, c, g, or t
  misc_feature (320)..(320): n is a, c, g, or t
  misc_feature (324)..(324): n is a, c, g, or t
  misc_feature (329)..(329): n is a, c, g, or t
  misc_feature (332)..(332): n is a, c, g, or t
  misc_feature (335)..(336): n is a, c, g, or t
  misc_feature (338)..(338): n is a, c, g, or t
  misc_feature (340)..(340): n is a, c, g, or t
  misc_feature (342)..(342): n is a, c, g, or t
  misc_feature (345)..(346): n is a, c, g, or t
  misc_feature (348)..(348): n is a, c, g, or t
  misc_feature (351)..(351): n is a, c, g, or t
  misc_feature (357)..(357): n is a, c, g, or t
  misc_feature (360)..(361): n is a, c, g, or t
  misc_feature (385)..(386): n is a, c, g, or t
  misc_feature (395)..(395): n is a, c, g, or t
  misc_feature (414)..(414): n is a, c, g, or t
  misc_feature (422)..(424): n is a, c, g, or t
  misc_feature (426)..(427): n is a, c, g, or t
  misc_feature (432)..(432): n is a, c, g, or t
  misc_feature (447)..(447): n is a, c, g, or t
  misc_feature (455)..(455): n is a, c, g, or t
  misc_feature (457)..(457): n is a, c, g, or t
  misc_feature (464)..(464): n is a, c, g, or t
  misc_feature (467)..(467): n is a, c, g, or t
  misc_feature (482)..(484): n is a, c, g, or t
  misc_feature (496)..(496): n is a, c, g, or t
  misc_feature (506)..(506): n is a, c, g, or t
tttaagaggatgccattgtacacccagtncgaaccaatcagattccacgtcagatacctgaacagtcgntctacacgaancccttgcctggtattatcatgggagggnttttgccctttggctgcanctttataccncttttcttcattctgaatagtattggtcacnccaganntattacatgttnggctncctatctctggtctctcccnttttggttattacctgttctgangcnactatacctctttgctatttccncctatgtgcagaggcaccattggcttctttgcangcttttggtttgttaccccaanatncagngtggnganggnngncngnggnngnccngtgtgnccnngtaaaacagaaattaattaaatcnntcatcaacnaagacccgtttttgtgacncctgagtnnnannagaantattggcctagtaancctccagnanccccgtnatnctagataaacccccnnncccatacccctnttcccccacnaagatgtgtcttcaacactataaagcatttgtattgtgatttgattaagtatatatttggttgttctcaatgaagagcaaatttaaatattatgtgcatttgtaaatacagtagctataaaattttccatacttctaatggcagaatagaggaggccatattaaataatactgatgaaaggcaggacactgcattgtaaataggattttctaggctcggtaggcagaaagaattatttttctttgaaggaaataacttgtgactcactgataatgaggtagtattagacgacaaatatattacaggaggggaatatggctcattaaatgacaaatcttgctattcggtagcacactgttatagtgcgttctaactaatctgtatagacgttcattatacccatggtattggcccaaatgcg

SEQ ID NO: 510886 - DNA, 419 bp, Homo sapiens
agcatacacgtaaatgagccaataggcagagcaagcagccattctaaccagccgagtgtgttttccagtgccttgtttttattctctgctggcacatacttatttcccatcagttataaacaatattgaccaacatatgttacctaaattaatcaactactttgtatccagtcctgcatatgaaaatccaaactgtaggaagagcgtctacactttgtactagatatctggtttttatttttacttatcgtaagtgatttcacacattaaattttaatttgattttgaataggtctatgtacaaggttgtcggtttctgtttatcacatagattcaagattgtgtatataaggtagcttctggtcatttctgatcagtttttggtgtgtttcttccagcatgtgcagtctttgccaaca

SEQ ID NO: 510887 - DNA, 278 bp, Homo sapiens
agtgtttaagctcctccacctccaaattgatcatttacctcagcatgttttcatcttgaccactgatcataggtgacagctgggggtgttttcaaaaggcagctcccagaagctcgttttgtgccctttctgagatgggccctaggtgggtccctcccgaggaggcgaagggtggggtgctgggaccagtgcacacaaggccttttcagaccccatccgtcttctccctgaaggagagcacgtttggaggtgttttccattcagttgcaaattcaagg

SEQ ID NO: 510888 - DNA, 118 bp, Homo sapiens
ggggagtcttgagatctatacaggatcctgacaggagatgaaggacagatgggtcaccaggaaaggtagctggaagatccaatgtcagagctcctccctgtgcccacttgctttagcg

SEQ ID NO: 510889 - DNA, 412 bp, Homo sapiens
  misc_feature (58)..(58): n is a, c, g, or t
ggggaacaaaaagttggagttccaacccggttgccgcccgttcttagaacttagttgnatcccccggggcttccaggaatttcggccacggagagcctttctgtatttaagaaacttaagcagccgggcattggttgtcacgcctgtaatcccagcactttgggaggccgaggcggatcataaggtcaggagatcaagaccatcctggctaacacggtgaaaccccgtctctactaaaagtacaaaaaattagctgggtgtggtggtgggcgcctgtagtcccagctactcgggaggctgaggcaggagaatcgcttgaacctgagaggcggaggttgcagtgagccaaaattgcaccactgcacactgcactccatcctgggcgacagtctgagactctgtctcaaaaaaa

SEQ ID NO: 510890 - DNA, 373 bp, Homo sapiens
cctggttttgcgtctgttcccctgagggccatcgtcatcctggagcttcaatgggccttggctcctttcttcctctcattcagaatcagggcttacaaaggactcagcttccttagcatctcagcagaaaactttcttttaagacccaaggcgaaagggacagaaaacggaattccttcttcttttccaaggccattgggaattcaagcaaatcccttaaagtcaacaattctgggttcttcatatcccaacagggcccttcttaacactttccttcatttttccacccaacaccctggttctcaggggatcttgaggggtagaacatgtctggttggggcttgggaataaacatgatctattgaaaaaaaaa

SEQ ID NO: 510891 - DNA, 811 bp, Homo sapiens
  misc_feature (148)..(151): n is a, c, g, or t
  misc_feature (154)..(154): n is a, c, g, or t
  misc_feature (156)..(159): n is a, c, g, or t
  misc_feature (162)..(162): n is a, c, g, or t
  misc_feature (164)..(164): n is a, c, g, or t
  misc_feature (251)..(251): n is a, c, g, or t
ccgccatgaatggctgtcgctgagtgagctctgctgtctcttctgctgcccgccctggccccggccgcatcgctgccaagctcgccttcctgcacgccggaggccatctactccctggatgcctgagcccgagccgggggcctaggtnnnnccngnnnngancncttgggacctgagagcctcctcgggcgcacgggcgctggaagctgcacctgacggagcgtgcgacttccagtacagccagcgcgagntggacaccatcgaggttcttccccaccaagtatcgccctgcggcaaacacgtcgtgtccgtgcatgatatgttcgcctgcagtgccatggttgccaggatagcacggatccatctatctcagcacggtcaagtgccgtgcgacctgggccaggatgagcagcttactacgattggacctggagcgtccctgccgtccacatgtcatacatcgttcgtccgtacggactacataccggattatcagggttgcacagcatctggtgcagcgctcttccgagaaggatacctctactgccagatcaatctgacgtccgacactggtcaaagccctgtcggcatcctagagtacaggcatcaagcccgggacagcgatcagtcctggtacagggcaggagcatcaggcacgtgtgcccacacgtggacactggcctcagcgctaacgagtgtgccgacggtggtagctagcactcagccggtcacctcgggcaatgcgcgtcgccattccccagacaccaagtaagacctactgcttcagacgcgcttccctaaacatcgagga

SEQ ID NO: 510892 - DNA, 486 bp, Homo sapiens
tatgtgacctgccttccatgttggtaaataaagttttacttggaacatgaccatgtccatttgtacatgaatagtctggctgctttcggtttactgtggctgggttaagtagttgtgacaaaggactgtcttgcaaagcctaaaaaatttaataattggcccttttagaattttaatcaaaatttgtttaaatttaaaactttttttttagagacaagttcttgctctcttgcccaggctggagtgcagcggtgcaatcatagctcactgcagtctcaaactcctgagcttaatccatccttacgcctcaggatcctgagtagctgggactaaaggtatgcaccaccatgcctggcgaatttttaaattttttgtggagacagagtcttgctatgttgtccaggccggtctggaactcctggtctcaagcaatcctccctcctccacctcccaaagtgctgggattataggcacaaaccaacacac

SEQ ID NO: 510893 - DNA, 158 bp, Homo sapiens
tcgaccggattggggattaattctaggacgatgggcattataccgtggtttgctccacagatttcagagcattgaccgtagtaacccccggtcgtgtaggcgataaagtggtttggtttagatgtccgggaattgcatctgtttttaagcctaatgtg

SEQ ID NO: 510894 - DNA, 233 bp, Homo sapiens
ctgtggctatgtaccattatctcagcatctaggatagtatttcattatcaccttggtataaagatgagaggtaaagaaacttgctcaaggtcacgactaagctaaatgagtgaccaacccaggtactgagactcaggcagtctggctgggagcccggagccccatcccttctattgtgtaaggcttctgtattctagtgtcaacttccaagcttgccaaagtcccctgcaggg

SEQ ID NO: 510895 - DNA, 239 bp, Homo sapiens
tactcaggttaaaagtatttaagaatacagttaactaattgtaaatatgctgttaaccaaaagagctttccctccctcactttttcctttgtaaacactcatgactgcttttttgtctcgagtcatctttgcattaactccccttggtggtcactaaagggctttttgatgccttttaaaagaacaactgcttttttacaatgccccccacccccccacccacccaagaacagggttta

SEQ ID NO: 510896 - DNA, 171 bp, Homo sapiens
atagagctatgattgaggaggaggaggaggaagaagaggctgaagaagaggaggaggaggaggattccgaggtgcaggtggagcagcccctcccagcatccagataaagcgggtgatgacctaccgtgacctggacaatgacctcatgaagtactcagccattcagcctct

SEQ ID NO: 510897 - DNA, 244 bp, Homo sapiens
tgttaataaatttcccccagtaagccctgtaaaggcagggaattggaaccggagggtatctagcttccgtatacataattggtcatagcatcttttaaaattgtaattcgttttgcagtattggctgaaatgtattacataaaataatgtacatttagacatctgggttcatttgctagttgtctgttaatttataacagcttaatcttgtacaggcttcacatatggacgtccatgcatagtt

SEQ ID NO: 510898 - DNA, 229 bp, Homo sapiens
caggcagtggagacagaatgccgaaggtgtttggccaccgagcatatcaaaaatggtgacctcaaaatatgtacaacaatcataaaatgtacatcacaaatcaaaaaaatttccttttcaaagtattttaagaaaaaaaagcagggccttggaagttttggttctttttttctcccctgttgcaaattctcatggtttgggttgggtggtggagagcgcgtgtcatctg

SEQ ID NO: 510899 - DNA, 588 bp, Homo sapiens
agccgcgtgggagggggggcgcggagggaggaggggggagagggggggcggcgcaccagggggcgaagagcggtagggggggggcgacgggggggggaggggggggtggtgggggccgcgggagggggggccgccagccggaggggagagggggggggaggggagggggggggggggggggggcccccggggtggacgcaggcggcgcagggtggggaggagagggcggggaggggcgcggggggggggaggggacggggtgggggcggggacgcccgtcgtggcgccggcggaggaagagggtgggcggcgccggcctcgccggagaagcggaggaaaggggcagccggaaaagggagagtcgtcgaatgcttctaaatcccccccaaaatctccgtgagacatgggggaacatgggggaataccgccgccaaagcgtctcctgctgttgggaaacgctgtgtctcccgcatgtgcttgttgtccgtcgccttttgggagccccttttttccgagatcgtaaaagccaataagaagttgacccccgaatatagtgggatctcccggtcgtcggccgcaaataacaaa

SEQ ID NO: 510900 - DNA, 140 bp, Homo sapiens
caggagctgtctctccaccctaggttatccacgttactttctgtactgtgtatgtgacgagagaaataaagcttctatcttccttttgagaaaaaaatgtcatcaggaggatccaagagaagaggacatagggcgggacc

SEQ ID NO: 510901 - DNA, 972 bp, Homo sapiens
  misc_feature (4)..(4): n is a, c, g, or t
  misc_feature (112)..(112): n is a, c, g, or t
  misc_feature (147)..(147): n is a, c, g, or t
  misc_feature (335)..(335): n is a, c, g, or t
  misc_feature (411)..(411): n is a, c, g, or t
  misc_feature (418)..(418): n is a, c, g, or t
  misc_feature (424)..(424): n is a, c, g, or t
  misc_feature (426)..(426): n is a, c, g, or t
  misc_feature (530)..(530): n is a, c, g, or t
  misc_feature (533)..(533): n is a, c, g, or t
  misc_feature (558)..(558): n is a, c, g, or t
  misc_feature (578)..(578): n is a, c, g, or t
  misc_feature (596)..(596): n is a, c, g, or t
  misc_feature (628)..(628): n is a, c, g, or t
  misc_feature (642)..(642): n is a, c, g, or t
  misc_feature (664)..(664): n is a, c, g, or t
  misc_feature (689)..(689): n is a, c, g, or t
  misc_feature (694)..(694): n is a, c, g, or t
  misc_feature (716)..(716): n is a, c, g, or t
  misc_feature (725)..(726): n is a, c, g, or t
  misc_feature (732)..(732): n is a, c, g, or t
  misc_feature (750)..(750): n is a, c, g, or t
  misc_feature (755)..(755): n is a, c, g, or t
  misc_feature (777)..(778): n is a, c, g, or t
  misc_feature (795)..(795): n is a, c, g, or t
  misc_feature (803)..(803): n is a, c, g, or t
  misc_feature (813)..(813): n is a, c, g, or t
  misc_feature (817)..(817): n is a, c, g, or t
  misc_feature (843)..(843): n is a, c, g, or t
  misc_feature (852)..(852): n is a, c, g, or t
  misc_feature (865)..(865): n is a, c, g, or t
  misc_feature (889)..(889): n is a, c, g, or t
  misc_feature (892)..(892): n is a, c, g, or t
  misc_feature (896)..(896): n is a, c, g, or t
  misc_feature (900)..(900): n is a, c, g, or t
  misc_feature (928)..(928): n is a, c, g, or t
tgtntgtcgaaatgaaaactgaaaacaagtatacaaaacatgtcgattagctaatcgtgtatggaaagcagatgagaggttccacgacaccaaatagaccagttctgaggtntccccaagataaatttaacagctccagcttcagtntttatcaaaatacaaaagaaaagaagtgagaggttgtcttttatcgatggcaaatcgagacccttgcaggctgaagggagagagagctactatcactacacagaggtaggggtgctcccgaggggctgttgtggatctaggtggacctgcctgcccggcttgctatcgtcgcttcctgctggtgaggncccatgacatcctgaccgaaagtgtctgagcgagctcagagtgtgggggacgacggacccactctggccacacggngaccganggacananggggccctgcgtcccataggctgcctgaaggtgggtagggcggcctgcggcatagtggggtggctgtgggctcccagcctggcccctgggaaccgtgggtagcncanggcactaagtcacatggctatgtgnaatggcaggggtgtacccanagggacaaagcgatgttngcgggggatctcatacgtgtcgacccatgcangaaattgtatcgcnagtactgcatgcgcctacccancaacctcaatggtaccccgcagggngcaanagctgtggctgggcggactggncataccagnnccgtcnactagcaaaatcttatanctacngcgggggtctcccttcctagtnntgttccaaagatgttcntcgacatnggtattcatnaacntagttttaaaaaaatggcacttgagntatggggtnaaaaaaccaaccnaccaaaaatgggatttccaacaanagntctnaaanccgaagggcgtgggcaggctctccccancatagcgtactcctgggaggccaaggtgcccatggggcctaaca

SEQ ID NO: 510902 - DNA, 195 bp, Homo sapiens
ctctctctctctctctctcttcctgtgtgtgtgtgtgtgtgtgtgtgtgtgtgtgtgtgtgtgtcgtgcgctcacacacacctctctcgcttgtgagctggggggcctgctctctatatctctgcgaacctgtctgcgtgtgtctctttcactacacactctgtggccttctgtctagagctgagactgctctct

SEQ ID NO: 510903 - DNA, 956 bp, Homo sapiens
gtctaagtttttaaactttttattgcagtattaaaaaaatgtgcattccaataattaaaatcatttgaacaaaaaaaaaaatggcactctgattacactgcattacagcctgacaggacacctggggccagctgggttttactctaggatttcactgtcgtcccaccccacttcttccaccccacttcttccttcaccaacatgcaagttctttccttccctgccagccagatagatagacagatgggaaaggcaggcgcggcctatcgtggtcagtagtctcttgatgtgaacaggggcagcacagtcattataaacttgatccaacctctttgcatcttacaaagttcaccagctcacagacgtacccctcagacaggcactgctggtggaatgtacagtgcatctgggcggagcacgcctcattaacagattcgccgggtctgctctctccggttcaatcgtctccttgggaaggcagtggatcattcctctggaagtctctgtcttctaccagctttcgccttatcgaattcatcgatactcagcatatcgggttctgtcagacatggtatgcggaggaaacagcgaagcgaggcgcacgagtacgagcgagtctggtctgcgcaggggatgccggaccggacagacggcacgggaacgacggtggccggccccaggatgtcgtgacaagcccggacggtacagaacgggggaatccccggtcggggacagggctcacaattcggccatgggacaggacatgcagcccaaagaacctccaaccgctagcgacgaggccgatattaccgtgcacggagcgaagccaccccaaacgatgaaggcacgggaatacagtcaccagcctgacggcaagacacgatgcaatgccagaggaccaccacggaaacaacggccgcacacagggacggcccaacactgcgcagacgccggaa

SEQ ID NO: 510904 - DNA, 405 bp, Homo sapiens
gtttggtgcagcaagattggctttcccagtcctgtattctgaatgtctaaaatctctgcatcttgctgaagtaaacaactgtctccagaggttggccaggcagcagctctcaaaagtacccaaagcttagcagaatcttagatctggaatcaaagaattcaagcccgaatggtgagaaccagatattactcaacagaatgctcttcctaaaggaatctagagctgttcatgggtggacagtggtggggctggagtgctccttgttaataggatgggccatgcgccctctcgggatatccagcagggcctctacagaatagggttggtcctggctagaagcgtggtctagaggatggctcagctcttggccagctctcatggggagttaaatgatggcacaaaatc

SEQ ID NO: 510905 - DNA, 107 bp, Homo sapiens
  misc_feature (94)..(94): n is a, c, g, or t
gtcatggagcgcccgccttgtttctgctcctgttgcttggacttgggcccggcggccggcaggccttccttcccgggaacccccttgatcaatnaggacgtgaaggc

SEQ ID NO: 510906 - DNA, 223 bp, Homo sapiens
cccgagtgatgcatgtggtcggttcgcaatccatcatataagaatttatcttaatgaaacaattttatctctaattgattcgttgacttttaaataggacccttaacatttacagttacattcatgtactcaaaagcacttgcatattgtggcctgcagtattctctactgcgtaaagtttcacatactaatcctcttatttagattgtgataacaatcagac

SEQ ID NO: 510907 - DNA, 352 bp, Homo sapiens
taagatccccaaagatctttgagcatcacctagtatttacattgtattttatttttctgaggcagggtctcactctgtcacccaggctggagtgcagtggcacagtctcggctcactgcaacctcacctcccaggctcttgcagttctcctgtctcagcctcccaagtagctgggattacaggcacacaccaccatgcctggctagtttttgcatttttagtagaaatgaggtttcaccatgttggccaggctggtgtcaaactcctgaccttaagtgatccgcccgcctctgcctcccaaagtgctgggattacagggtgtgagccattgcacccagcccaaaagaggggt

SEQ ID NO: 510908 - DNA, 536 bp, Homo sapiens
ttttaaaaaaaaaacccccccttttaaatttttttttgccccccccccccaaaaaatttggtttttttttaaaaggaagggtttttttttccccgggtttaaaaaaaaaaaccaaaatttttttgggggaaaatttttttaaaatttttcccgggggggttcccccggttttttgttttaaggtttttttgggggggttagggggggggcccaaaaattttttcccccggggatggggccccccccctttttaaaaggtccccttttaaatgccccccccgttttaattttccccgggccccccggggtttttttggggcttttgggtttaaaaacttgggggggttaaacaaaaaccgggggttaattttggttaaagggggttccccccccattttgggaattaagttttctttggggttaaaaaaggggggtgggtttttttttaaagaaaaaaaacggggggccaaaggtaaaaaaacccggggggccaccccccaaggggggttttttaaaaaaaaaaaagggttttttta

SEQ ID NO: 510909 - DNA, 147 bp, Homo sapiens
  misc_feature (34)..(35): n is a, c, g, or t
  misc_feature (44)..(44): n is a, c, g, or t
  misc_feature (47)..(47): n is a, c, g, or t
  misc_feature (60)..(61): n is a, c, g, or t
  misc_feature (67)..(67): n is a, c, g, or t
tggtaccagctctccatcagaggcatcttaggtnntctctctgntgnacctcatcaccanngttggncaaaaggcggagaatgtgcttatctccaagaagccatgacaggtatcatgtcacaatcctgatgtggacgcaagatgtgt

SEQ ID NO: 510910 - DNA, 766 bp, Homo sapiens
  misc_feature (212)..(212): n is a, c, g, or t
  misc_feature (254)..(254): n is a, c, g, or t
  misc_feature (460)..(460): n is a, c, g, or t
  misc_feature (630)..(630): n is a, c, g, or t
gggctctcgtggcgtaagggtacacgcatgcttgaagatcttagactgaaaagatagtctatgatattgtataatataaatcatgttagactttacctgataagaaactattttgagtcttcgtgatctcattatgccatcaaataggtgttactgtatacatcgtgattcacattagaagagatcaagcattgttcagcccttaagtaggntcattcttgctcgtttagttgaaaatcttggatctctggttnatactagtaatgcgtgccacaataaaagctcatcgcgagtggaagatatattacatttcatcattagagtgtcttgggggaacgtccctctatattagtaagtccccggcatgtcatagaattcttcatcgagtgatggtggatcgtggagtacctctatattgagatttgttctagacacagtactagtggatttggtctagacngagtcctttgtagtggggatacatcccataggtaaggaacaaaagggatacctttagagattgtcgggattgtgatcaggcgttttagtggtgtaatccgcatgccatagagagtagatgacatcgcgaagatccgataagctttaactcttcaactttgcgattagcantttttagcggcatcatcaacttggggatagcgtcagtattttgtgctgagctaaaaacctaacacattgttaaataaaccttccaattaacaaaagttgccggcttgtgagcttcctttaaatggttcttacttaa

SEQ ID NO: 510911 - DNA, 112 bp, Homo sapiens
atataatcaacatgatcgtccaaaccccatgagatgagataactctgatgatatgacaggatgatagagatgaaaaggaacccgatgaaaggacaatgaatttaatattcat

SEQ ID NO: 510912 - DNA, 361 bp, Homo sapiens
tttgtgggttaaaaaaattttaaaaaaaaaaaaaaaaataaaaaaaaaaaagaaaaaaaaaaaaaaaaaaaaaccaaaaaaaaaaaaaaaaaaaaaatggggccgaatttggggttaattgggccaattggccttatggggggtggatttacaattaatgggccggggtttaaaaacgtcgggattggaaaaacctgggggttcccaaattaaatcgcttggaagaaaatccccttttggccggttggggaaatagcaaaggggcccgaacggatggcctttccaaaaagttgcgcagcctgaagggcaatgggaaattgaaggcggaaatatttggttaaaattcgggtttttggttgtt

SEQ ID NO: 510913 - DNA, 221 bp, Homo sapiens
agtagaggcaacggattatccgtatagaaagtggagacggcaaagtttcaaccggagagacagagagtagagagtaacgcatacaacagtttcgcaaggccgggcgtgacagcgtacgaacgtaggtaggtttgaaagtagggatgagcgcgtgacgggtatggccggagcggtttggcccaggaggaagagtcgcgagcggcgatttcatcgagtagaag

SEQ ID NO: 510914 - DNA, 274 bp, Homo sapiens
gtgagtcagtactgggtcgcagtattcaaccattattgtggactgctgttttactttaatttacacaaacacaaacactgctcacatttgaggtacactttaccctgcaaatttttttgtttgttttttgtttgtacgtttgagacacagtctcactctcactcaggctggcgtgcagcgaagtgatctccagattactgcaaactctgtctcccaagttcaagtgattctcttgtcttagcctccggagttagctgggactataggtgtgcgt

SEQ ID NO: 510915 - DNA, 132 bp, Homo sapiens
actcgcggacggtcttcctaacgtactgactgtgcctctgggccttgactgacggtgcttgttgacccacttggtgaaggtttacttctgcacacgatcccgctcatctttgagggagctgatctcgttctg

SEQ ID NO: 510916 - DNA, 267 bp, Homo sapiens
aagagcgtactctcatttggtcaggctggttcgaactcccgacctcagcgtgatccgcccgcctcggcctcccaaagtgctgggattacaggcgtgagccaccaagcccggtcggtaactagattttctaatagactgtgagggggaagaggagcggttggtcttgctgtctcaggagtgtcaaaggcagaaggcgtgaaggaggtggaaaggaatgcagacatacgtcatgtaacttttactgaaaaatattcacatagaggtgga

SEQ ID NO: 510917 - DNA, 701 bp, Homo sapiens
gggactctaagggtcatggtcaagttgggatgcgtgtgtgcgtgtgccgggcaggggagaggaagagtgggtggactccggtgagctagtgcccggagactgcctggtgctgccccaggagggtgggctgatgccctgtgatgccgccctggtggccggcgagtgcatggtgaatgagagctctctgacaggagagagccttccagtgctgaagaggcactgcccgagggctgggccctactgtggcgaacacagcggcgtgaccacactcttctgcgggaccctcatcttgcaggcccgggctatgtggaccgcacgtctgggcagttgggtgacccggcacagggttctgcacgaggaaaaggcgggcctggtgagctccatcttgcacccccggagccaatcaacttcgaagttctataaatgacaaggcgttgaagttttgtggcttgcccgtctactgtgctggactctccttcggagccagtcttacaggcgttctttcatcctctagccggaaacgcggggcttgccttcttgcaatgacgacttgtaagctcccgggctcattcgaagcattgggtgacaccgttggatgggagaccaccctgtcaccatggccttgctcgggctggacttggtgtagcccggtctataggcgccgaagccgcactgcgggaggaacgaggttatacggagtc

SEQ ID NO: 510918 - DNA, 276 bp, Homo sapiens
ggggggggaccccccccccggtttttttccctccctgggggggggggggacttttcccccctcgggctttttgcctcggcggggggttgggttgccttttttccccgggtttggttttaacccttgggcgtttttgggtggccttttccgggaatttttttccccccgcgggcggggcccgttttgtttttcccgggacttttttttttcccggggtccgttttttcttttttttttagaaaaacccttaaattttaataaaaagttatatatgta

SEQ ID NO: 510919 - DNA, 122 bp, Homo sapiens
atgaaactggaggcatgataatggaaaatgatgagggaggggagaggtgacgttacactgctgctccccagtgcagtgcttcctgagctaacagcaggtggagttgccctcctccctcgctg

SEQ ID NO: 510920 - DNA, 291 bp, Homo sapiens
catccctattctggccacgctttttcgagtcacttcggtcggtctcgcggggcaatcgcgcacggtgctggagacggtctatgcccgtgtagaggagggcggccgcgtcaggtttcgacgggtcttatggcggcaacttcaataaggagcaatcggatgggcaaggagagccagggttttaccctgattgagttactgatcgtcgtggcgatcatcgctgttgctgtgccggcgattggcgtatcccggtgtacctcacagccaggtgcagaaggcgtatcgggcgcagat

SEQ ID NO: 510921 - DNA, 101 bp, Homo sapiens
tgagtactgttgcatctgtcacacattgtttggactgatagtgtaaaggactatgctctgatagagaagaaacatgatcgtaggatggttgacacttttat

SEQ ID NO: 510922 - DNA, 1672 bp, Homo sapiens
  misc_feature (1494)..(1494): n is a, c, g, or t
ctctcctctcctgtacgtagatgttgtcttgtcggcgggtcgttgtctttcgtctcgacgatgtaattatatcgcgtgcgctgtggttttgttcgatttgtggtaggtgatgaggtgaccgatcgtcgatcattcttttttttatgctgcttcgcgtgcggatatcgccctcctgtcggtgcgctcttggtcggtggctgcgcgggcttttctcctgtgggaaataatgttttattctccctcggtaccaaccgtgggtggctccccccccgccgctgtaggtggggtgttttgctctatcaacctagggcgtggctttcttcggttcctttgttgtgtgttgtatgttgtttcttgtgtcgcctcctcttttgtggtgcttctcttctctcttccggagatgtgggtgcgtccctctggggggtgtcttctctgttggtgctcgccctctcgttctcttggcgctgttattgttggtgttgtttcccccgctttggtgtttcacacacggagacattttgtgcgtgctgttttctacagggtgttctcactgtgtgtgttgaaaagtggtgtttctatgtggggcgcccgcacgtcctcgttttatttggtggctggtccggtttttgtctctgtctcgcagcccccgttgtgtgttgttgttgcatccgtagttcccagcggtcgtcgtcgttttcaatattgcacaccaccattgtttgtgggtacctcagctgtggtgctcttgtggcatcgtgttcgtatatgtgggtgtccatcaacacgtttggggggcgttctccccgtgggggtgtaccaaaatgatatttgggggtcctccagagtactcctcatatctgtctgctctaattctctgtgtttttgtttgttcctccaaatgtgccaaaaactgtgtcccatcgttttccgttcgctcagatgattttggtttctacagatcctgcctatattgttgccacaagacgcatggttttgtggcgccgcccacccgcagagacacttgtatccgcggttgttcactcacgtggtccacttcttttctccctcaatattctctctcccgccacttttgtgcacgcccgcagacaacgagactcttggggcttctctctatagagtgatgatatgtgtggagactcttcaccccctcctcgcgagaggggtaaatttccccggcagcagccgttgggaagacaccacacgcgccccctctcgtggacacacactgagtttccacagaaacacagtttgggccgctgtctcctctccaaggagagccctcgggcacacctctttcacagccggagagacctcacttgtgctctctccccacttctccccagaggagcctctcttggtggtgtgttctcgccacacactaaggccggcccgcgggttaaatggtggcctcggcacacccaattcgagattcttctcacatttgttgcctcgtgggaaccacggtgagttgtntgcctagaatatcctcggttgtttttctgaatattggcacactcggtttctttgagtggggggccctttggttgtcaaccccaggaagaccctggtccctttccctggtttaatacaactacccggaccaagggtttttccctaattgtaataaaaggccagaccactatttaattag

SEQ ID NO: 510923 - DNA, 708 bp, Homo sapiens
  misc_feature (580)..(580): n is a, c, g, or t
ctaattttctgtatttttagtagagacggggtttcactgtgttagccaggctggtctccacctcctgacctagtgatccacccgcctcggcctgccgagtggctgggactacaggtgtgcaccaccacgcccagctaatttttgtattcttagtggagatagagttttgccatgttggccagggtggtctcgatctcctgaccctcatgatccgcccacttcggcctcccaaagtgctgggattacacgtgtgagccaccgtgcccagccatttttctgatatatattatttatttatttgttattgtatttttgagacagaatgtcactctgtcgctcaggatagagtgcagtggcacattcatggctcactgcaaccttgacctcctgggctcaagcaatccccccgagtcagtgggaccacaactaggcaccaccattcccggctaatttttaagtgttcgtagagatgtggtatggctgcgttgcccaggcaggtctcaaattcctgggctcaggtgatcctcctgctttggttcccaacgtgctgggattctaggcgtgagcccacgtgcccagncatatttattttttaaagctaaaacaatattattggtatagacaaaaaatgaaaccttactcttgcttttaataaattcttcgattagctgggtgcagtggctcacgcctgtaatcccagcactttgg

SEQ ID NO: 510924 - DNA, 94 bp, Homo sapiens
acatatcaagcaagttattctttgtctgtatctttttttcgtatgcaaactttttgtttggtttgtttaagaatggctttatagaagggctttt

SEQ ID NO: 510925 - DNA, 134 bp, Homo sapiens
agaaggaagaagaaagtaagaagaaggagaagacggtgacgaaggaagaagaaggagaaggaagaaggagaagaactaagaagaggaaaggaggaggagaagaaagaactaaggagaagaagaaaaaggaggga

SEQ ID NO: 510926 - DNA, 503 bp, Homo sapiens
ctgaccttaaagaggcagggggtggccatgcttgtctccaatccaagagtgtgtccgagatacagagcttcttcaggcgccttttccggcaagacggggatcaccagtcgcttcggccccagcagtctctcttgccctctccccagagctacgcttctctgcggggaccacggggtagcctggctggaccttccttgtgaccctgcagaagggggaatctcgcttacatacctcagctgatttgctggagaatagtacacccttgggggatgaaagggggcactctagaggaatcgattcggcttcaacacctgtgagggcttgctccagctttgtactgccctctctgtgagatcctggtcgcaatctcatgtctgtggtgttaggaagaatgcccgaggactctgatcttcggcaaggtgggtgtgtctggagcaatgctgggggctctgcaggcagcttgctcacggtggacagttccttttctggaggctctgtgacac

SEQ ID NO: 510927 - DNA, 317 bp, Homo sapiens
gtccccatcatagccctcacacactttatagcacaacagcccggactgagaccccctagacataggcgaggggaggacccctgagggctcagaccagggaggggtaccaggaatcaactggagccccgtttctaggaagtaccagccccatcccccacagtaccagactccggggaaggggcctctgggaggcattttcctgctttgcccctttacttcctgacttactaatactaaagaagtagggggagctcgagagccagacggcaagacaaggcagacccctccagaggcccgcaggtgggcatggtccccac

SEQ ID NO: 510928 - DNA, 1087 bp, Homo sapiens
gaggagaggagagcatagcacctgcagcaagatggatgtgggcagcaaagaaggtccatgatggagagcccagcctggactacgtccagacagcatcccactggtggaccgcatttggcagttccactgcatgccacagatgcacactgaaaacgccatgtcttatcggtggtgggtgagtggtcggtccatcaatcagatctgtgggttgattagtaggagagaccacgtgctcattggtgtcatccagcatagaagccaggcaaacagcaacggacgaatgggttactagggacggattgaggcatttgtgaggacgacctggaaagccacagcgaagcggcctggacccctgagcgtgagacaacacatgggttacaccaagcgtgactcagcgcagtatgcattctcaaatcggggcatcccaaacgtggggccccgtccagagtgggctggtagttgaacgttagcgccagaggcaaggacgttgccattgaagttctgcaccataacaggaaggcccaagcacccccgtgagaccaacccatggcatggcgattagcaatcgattgacacaggaattaaggcagtgcaccaatgaaaggaaggccgagttcccgacacaaggttcattttgcaaggggcatccgttccaacagtcatggacaagagaaggtgtacagcgaacgaagagacgtatccacaggatgggacgcaaaagtggcacccaggaagaggaatgggagccgttatacaggagtcgctaacagggacattgggggggcagcacaatgagggccaaagggaagcagtcgggtgcccgcgaaacggaatatctggcccaaaggaggccacgtccaagagggcagaacaccacacgtaccccaggcagaaaggatgatggggcaagccctcaccgggggagaccacaaggagcgcccatttggaggagcaccacacgttcggtgaggccacagggagtggagaacagaccaaaaaccagaccagtaggctaggagtattgggaggcaagcgaaaggggaatacggacacgaagaaagcgcgtatagcaggtataaacgcagta

SEQ ID NO: 510929 - DNA, 967 bp, Homo sapiens
gtttttattacgattataccacaacacgaataatcattccagtactgaaattggttatgcttagctgtgtgatttgggcaagaaacttaacttttctgtgcctcagcttcttcatctataaacagaaaaatcatagtacctcatagggtggtgtgagcattgaattaagttgacaatagggaaagtgcttagaagggttcctgtacataccttaatttcctggtgttttctaatgtacacaaacacacacacacacacacacacactacatctcgacacacacacacaagagagtgatgttcaaactcatttcagtgtcgacattcaggcattgagatgcaatgttcaagaatatgctgtcctcctatgattgtctgcccagcctggatcccgtgagctgaattcggtaggaagcatggacccgagcggtatctccgtggggagctggttgcccgctgaggcagtgtgaaaaaaaccctggtggatgctgtcgataagcttgcctgcccaaaagacagagggtgcacagaggggtccgggagcaggtgcgcaggtgggcgtgggaagcaagtcaagtgtgtggcgtccgtaggagggaacatcatcagtgccagcccctatctacgaccctcacgccggtgttcatggacagggggcccactctgacaactctgtgttcagagggtgagcctggcgtgaaagcagaggtccagggcacaaggacggggggaagaacacgtctcgccaaataggtcatccgggacaaagagaccacagtccggacccactttcccggatgtggacccgggcgctgacaaaggcctggtcgggacgcgaaggcgaattactggggagagactccggcgaccggcaccggagccacacaaagggcgggggaggcaacggggcacacaaggggggggaccgacatcgagaagtgacagctaaaaccagggacggaagcacc

SEQ ID NO: 510930 - DNA, 221 bp, Homo sapiens
gcgtttacactaacatgcattaccatcactgcccgtcgtttatacactaacagctataaccagtcactgcccgtcgtttaacactaacagctataaccatcactgcccttcttttaacactaacagctataaccatccattgcccttctttgtccacaaacagctataaccatgcattgcccgttcgttgccagctaaacagcatataccaatgtcattgc

SEQ ID NO: 510931 - DNA, 800 bp, Homo sapiens
  misc_feature (205)..(205): n is a, c, g, or t
  misc_feature (384)..(384): n is a, c, g, or t
  misc_feature (430)..(430): n is a, c, g, or t
  misc_feature (438)..(438): n is a, c, g, or t
  misc_feature (454)..(454): n is a, c, g, or t
  misc_feature (494)..(494): n is a, c, g, or t
  misc_feature (514)..(514): n is a, c, g, or t
  misc_feature (550)..(550): n is a, c, g, or t
cttcagcatcctgcaaactctgtcctcaacatctgtgttgcgggagagtaggcgacaggatcctgtagcgcgagcatgccaagggtagttggatgcatctcacagggacatgacccctgttgtgttcctacatacgctagatacacctgttcaggatccttatgggcatccggcagagaatggaaaagattgtctgtccacatgncaacatggattcgagggagcccgagaggtcagcaagatctcttgcgcagtagagggatctaactatggttgacggagtagctactgagattacagaactaaacaacatttcatcaagcaataacctggcgaagactttatgagctgtgttgggggaagtctccagtgcacactgactantctgccactcgtgagggtttatcgaaaatgtttggacccaaatggncattgtgnctatcatactggaccntggtgaacattcctattggtgagagtgcctgcggatgagngcccaggggtttcgatgcantctgccagatcagagagagatcagctagtcgatcanggcctagctagattgaggggcgcgaaaatcgaactagtgacattccaggcaaagagggaaaggacgggctctatggtcgggcctcgtgatttctccacgtcgacgcatagggtaagtatgaattagggagaagtttcagttccctttaccctgggggccagacagttagaaatctacccccggtgtagcgtaattaccggaaacatggaatgccaaattcaaaaaaggtttttcctcgttgaaattacca

SEQ ID NO: 510932 - DNA, 891 bp, Homo sapiens
gactcatgccagcagatgagatgaagcaagaggagtggccttgatagactggcaatgtgctcctgtgctggtgacagctaactgcagggatctgacggacatgtgtaattgttgcacagtaatatgaaatgaatgagataatgctagggagtccacgctcgtaagtatctgtaaaatgaataatggtgagtagtcacatacggctatctgtgttagccaaataggtaaaggaaacttagcgttaacctgtactgacggcgaaatagaggtagaattgggagataattgaacgcttaaaatgaatgatgaaagtgaatgtagtagaaatatatctggcctcgatagggaaggaattgatacggatctcatgaaattggtgcataggcagcgattgatccaggaatcgaacaggatatagggctcctctcgctgattgaattgggctacactttgctaaatgggtagtactacggagcgctgggtggccgtgtgcggccaagtactacagaaacctttgagtagtgaggtgagcaccacatgggattatggttgaaccttgggggattacttatatagtcttgctgattatagacgcttggtggcttgtggctttgaagatatgagagttgtcgtcacttgtggagaaggatggacagttactcacttccatgtgtaacatggtggttaccatttcacacgactaaagtcagcttggaatgaaactgagaatgcatagggcttgtggctggaaaaggcctcttagaccttatgaaatttgctaaaggaaagctgataaccttgggaagacgcagggagcaaaaagttgagaatgggtgaagatgggacttaagtgacgctcggtgtggtggttagaatttataagcatggtgc

SEQ ID NO: 510933 - DNA, 120 bp, Homo sapiens
tgagaagagctgttgcttcagaagaagggtcctggcataaccaatgatgaggctccaaacacagttccaatcccagccccagaaccagccaacccctctgtgctgtccagctgtccacct

SEQ ID NO: 510934 - DNA, 160 bp, Homo sapiens
  misc_feature (79)..(79): n is a, c, g, or t
tccccctgagatccccaacactctgaatcttctactcagctcttctgctgaagattttggcctgcacgatgacagactncgtaggtgttctttcccttgcccagaactccctagcagccctagaagaacagagaaaaaagtatacaatacactgtagaga

SEQ ID NO: 510935 - DNA, 583 bp, Homo sapiens
aagcactcgtgttgggtacaaggcatttctgacattttataaacctacatttaaggggaatttttaaaggaaatgtgtttttcttttttttttggttttcgagggggcaaggagggacagaaaaataaccttttcttaagtggaatattctaataagctaccttttgtaagtgccatggttattatctaatcattccaaggtttgcattgatgtctgactggcactcctttcttttaaggacagtgttttttggagtaaaatcactgggttataccaagctttatttaaggggtaaaggtaagctgtttaaaccccatggtggctgttgctgttgagatactgtgctttgggagtaaaaaaagaaaggtatttctttggcttaaagaatttttaaaaaattagacatgagacttattcatcttttcagggaacatactgattgtgcttaaaagactatacagttaagttaaaggtggctggaacatctatttttctacacaactggaaaaatgaacctgtgtctataaaaatgtgcaccacaataaaacatgtgaagcacttaaaaaaaacaaatacaaaaaa

SEQ ID NO: 510936 - DNA, 131 bp, Homo sapiens
gcacgcaaggatccgagaacagattccatgttggctgtagtgccgggagccttagtcgtgtgccagcatgttgggctggtcataaatcagcaggaaatcctaggagcctgcatcagtcatctcacaggagt

SEQ ID NO: 510937 - DNA, 160 bp, Homo sapiens
  misc_feature (104)..(104): n is a, c, g, or t
ttgtgtttgattttgaggcacttgcagatttctgagatcagagagctcttcctactgcagtagtctttgaataaagtctctcttcatctaagcccagatttttnattgaacccagtatagactcttatcttattattttctaggcatattcttcattaga

SEQ ID NO: 510938 - DNA, 186 bp, Homo sapiens
tctcagtgaatgctgagttgggtcccaggctcagaccaatcctgaggcatttctaggcggcatgggcccttcctccaatggatccactccgacttcccttctcatgatctcctgtcctggactgagagctccgtgaacgttggatgactcttttacgcagcctgtattgatcagtctcacggaaag

SEQ ID NO: 510939 - DNA, 698 bp, Homo sapiens
  misc_feature (15)..(15): n is a, c, g, or t
  misc_feature (160)..(160): n is a, c, g, or t
ccagccacatggcanaattttaatctttcaaaatcccttttggaaatattccaaagaccattatgtaaggtctaggaatacttttagatcataaccgatgttattctttcatggacaaaagggaaaaagttagtggccaactgagcaggcaagtatgcanaattttttatttaaagttaataataagtcctcaaatgcaatatcatgagaattacgctcacatttgtctttcttatccgcttaccctagcttttatcaccagaaagggacatagtggagctgactgaaaatatggccattacaaacagaacatctcataaatgaagcaaccatgtatagttccatttaacattcagtttatcatttcatgctccccttcacagttctaaaatttgttataaattaaatagatataaaatttaactagtattatgtacaattcaataagtgggtcgctctccttgcgcagtccttgacatccaactttgatagacatcacttaatacatctcacagcagcatacttggtagcctcagacagataggggaaattcatgtatgctattatttaataaaataagtgctcaatgtgcttaaatatgttattaatatctttgataattaaaaaataataggttctgaccataagcctgctgttggtatgaaccgcacaaattctgtttcagtttctaaaaaaaa

SEQ ID NO: 510940 - DNA, 404 bp, Homo sapiens
aggataaaccgacgccgaggagaatcagcagcaggagactaacaggagcgggatttaaacccagcggctgggaattctcaaggtgagggcggaggccattctggagtgaacctgggtaccaggccctgggtactccttgtggtaccaggctggcctggtgattcctgaggcgttggctcggcaccccatgggggactgccctcctccaggcctggcacaaagccagggggctaagagcagtctgcaggacacagggcaggaccacagcagggagggggctcctatgccagctccccctcatgccatatgagggcaggcctgtggctcgaagcccctgagctgggcatgtcctgagagtctgggaccatccaggggctgcatgttcatcctcagccctgcgtagc

SEQ ID NO: 510941 - DNA, 431 bp, Homo sapiens
acagacattagacgtagcaaatgagcatctatgggatgtcgatgactttagctgggggatgtgcctcagatggagttacaggtacgattatcggtaggggagatttgttgcaagacagcatggaatgggaagcggggtagggtcactgccatgggtggttttgtctcttgcctctctgattccagttcccactcactgttcctctaaagccattcactctcaagtgtgttggcttgaggtacttgctatgtatgtgacttcgagcaatatatagtgcttggtgtaatgtatgtttaaaatttatactagactatagttttctttggtttattttattcagtgaaagctatgtgtttaagatgttgcggttggtacttccaattcattgctctgaccactgcatagtattccaccgtttgcgtgttccgctg

SEQ ID NO: 510942 - DNA, 747 bp, Homo sapiens
gtgagtctagaggatctcaagtaaggcaggaggatgatgaagatagagaagatgaggaggaagtccccaatgcgcaagtggcaagggatcgaggccgtgttttgaagcttaccaggaacacatagaagagcaaaatctggtagcggcaggttgttacaggacacaactgtagagcgactggatggccgcggcactacagtcctcagcgctgacggcagagcagctcgtcccacatgcgtgtgcggagttgagcgagccagaaaacagtaagatagtctcagaatagggagcggctccaggcagtaactggaccacttacgaaagtgccttgccttgcctgcaatgcactggcctgaggggctacatgaagggatatcccaggtgacggtttcccttgcactaggccgaacctatagtatagaaatattatccattttattaccttgaatatttaatatttttcactgggaggtttgaagcttacaaaatgagaatgtgccatgcatgaagcaaaggattccaggctccagaaaaaatgaatgaactcaccttgacgtcaatgcaattgaatcaccgttgtcattcagcgagcaaccaatgtaggattgcccacagtttttctttttaaaggtggttttcgcccttcctctcccacattatttcttaatctgaacatgaaggctccattagcaacactaaaaattgatcattaacagcccctgtgcatatgagtggatccaacggttc

SEQ ID NO: 510943 - DNA, 382 bp, Homo sapiens
  misc_feature (19)..(19): n is a, c, g, or t
  misc_feature (34)..(34): n is a, c, g, or t
  misc_feature (60)..(60): n is a, c, g, or t
agggttgggtgcttttggntggaggttccttccnttggcggtcccaatagagcccggggntatttccactggccaggttcccgggtatttggttgaccccagcttggggaggagggttggtttccgttcctcaggggtttagtccgtcccaccccttcccttccctggggccccgggcccaggcccctcaggtgtaagttggttttgatggcctcccattgccccacacgccgggggacctccaggggggattttagtggcctgaggaaatgtatttataggcccccagcaggggtgctcccccctcggccggtgccccaggatgggttcctcccgggggggggttggccaaagcttttttaataaaatgcctttcccctca

SEQ ID NO: 510944 - DNA, 243 bp, Homo sapiens
ggggggggggggggggggggccccccccgggtttattttttttttctccctccttctccccccagggggggggggaagggggggggggggctccccccccccccccccggggggggggggggggttttttttttttcccccccctttttttcccccccccccgggggggccctcttttgggggggggggggggggcccgggggcccccccccgtgggggggtcgccccccccccctttttttt

SEQ ID NO: 510945 - DNA, 928 bp, Homo sapiens
  misc_feature (729)..(729): n is a, c, g, or t
  misc_feature (749)..(749): n is a, c, g, or t
  misc_feature (783)..(783): n is a, c, g, or t
  misc_feature (791)..(791): n is a, c, g, or t
  misc_feature (797)..(797): n is a, c, g, or t
  misc_feature (804)..(804): n is a, c, g, or t
  misc_feature (907)..(907): n is a, c, g, or t
  misc_feature (910)..(910): n is a, c, g, or t
  misc_feature (914)..(914): n is a, c, g, or t
  misc_feature (916)..(916): n is a, c, g, or t
aaaaggatcgaaagggaccaagcagctcactacgatatcaagttacactaagacttggaacactaacattctgtaagaggttatatagttttcagtgggaggggttgggatgggtaatctcatttgtacatatagcaatttttgatgcattttatatgcataccagcaattattactgtgttcgcacagttctcacttaactggtgctatgtgaagactctgctaatataggtattttagcagagtcttcacatagcaccagttaagtgaagactctgctaatataggtattttagaatgtgaattgaagaatggatcccaaaaacttcagaaagaggatagcaaaaaaagatctagtgcgattttatatatatatatatatatatacatacatatatatatatcatatagcttaagctgatttaaaacaaaggccttagactaattttcgattttctttcttgaaataagctaatggcttgtttgtgtaaagcttttttattaaaagaaaaattttaaaaatcttgtacctagcacagtattgttatagaatatacatgtaacattttatatggtagtttaagtctgtcagtttcttaattgtggacaaattaacagttggctctggccttttgctgtaacatgcctgtgtcactcacttagccttggcatttgtgcagacataccattttcagttctgctgtcactggaagttcaggctcagacagnaattttggcgagtgaattcnaaaaccggaatttttcttgttttttttttttttnttcattgnaatttnagaaggnaaataccagtgttcagttttgaactataatagtttgtatattcaacatttgaagtatattctattttgttgtatcttgtttcaaatgtatcaagtaggttttntgnaaananaaaaagaaattt

SEQ ID NO: 510946 - DNA, 883 bp, Homo sapiens
  misc_feature (1)..(1): n is a, c, g, or t
  misc_feature (719)..(719): n is a, c, g, or t
ncgaagatggtgtgctccgcttcccctgttgagagttgttgttttaaaagtgggggccccacaattatattggggtacgtttgcccaatggggggtcctgttccgttcgagtttggtcagggaacacttgtggcccccaattttagtggtttacggcatactcaattggtctccctctcgcgttggcgtcctcacacgagctgtgttggtgggtcgtcgccgcccccccactcagttgatccttcgggggactataatggcctctccacccgccgcgcgcgcacgccgcggtcatggtttacatttctagggagaaagataaatgaggcgttaatcccccaaatctgagcgcacaagggtgagagcctatgggttaactgcttcaggctccctccgtcggggtgtctcgacaccctccagtgggagccctcgaaccaaatacatcggagtgatactaaatcacggttgagagctcacacgcaagccactgggccaactcctccgcaaatgtctcaggacatttcattcctcacttctcccggtcttgtgtggacctcctctctcccagaccgcgctttgtcattccggtgagttccttctactctagtggcacgcctcacttacaccggtctttcgcgaccgtgcccctttgcgcggccgggtttattccctcctgcctgaagtatcagcccacctcggtcatttacaaggtgcggtgncctcttgcctggtagccccacgtcgtccgggctactcaccctgattgggtgccggagacacgccttagagtggagttctgcacaacccacggtgccagcggggggttaaaacaaaagaacttggcccaacatgtaaggagaacagggggaacaccccacataac

SEQ ID NO: 510947 - DNA, 456 bp, Homo sapiens
tctggcgatcaacttctttcctaggaataaattagagataaaatagatataccaatttttaccaatgaaataattggttatttgggaatgcctcaacatagcagagatgtaattttcctatattgaaaagttaaataaaaggtgggggggggggagtgcaagaaagaaagagatggagaacgagagcgatctggagatgaaccacatgcgatgagtaggcctggttgggatcctgaatcgaacacaccaacggtaaaaatatgtttaagacgcatcgggaaaatggggacagggattcgatattggatgttttttagggaatggatgtcagtttttttaggcgtcacagtagtatggggattatgttttcaaatggtcctttttggtagagacatacgaaaatatttagggattaaataaggtcggggatgggcttctaaatacattaatgactag

SEQ ID NO: 510948 - DNA, 341 bp, Homo sapiens
cagagaatacgagagcagttccacttgccgtgctttgttaatcatagctcatggatcctcttggcctaacatacccaaagactccttgtaaagatatagtactggttctccccaaactattttgagaggaagaaaagtcttgtattctgagtactacttttttacatttccagtagtaagtaagtgctggctccaccaagctgagaagaaatggcccttggttgtactcggggccagtgctaagaactctggaccaaccgtctgtagtggggcatgacttcgtgctcgggcaagtggagggcgaattccaaggccaataacaccggggattcaaagtcaat

SEQ ID NO: 510949 - DNA, 185 bp, Homo sapiens
gggaagtgctccttggagagtagaggtggagactcagcctttcagtgtattgccgactcttgtctccttcttcgatacctatctatcccacaagggtcattctttggggtcagctctcgtatgctcagttctgggccggttcctttgggcctgcgcccttgagtgacgtgaaggcaaatagactt

SEQ ID NO: 510950 - DNA, 467 bp, Homo sapiens
aggagctagtacagcacgagggtggagctgaagtacacaggcaggggggcgcactctgcatcctcccagatcaagacacgatggcggcagtggacgccatgctgctcccagagaccctgacgcggaggagagactctctggagtacagagagatcggtgagctctcactgccaaagtaatccatctcggggggactataacctagaacgacataacttctccagctgcggcatagaggaagccttcatcagcaaggctgacctgtcagggatcacaggggactaggaacctacgcagtctcccaaggtggatcatacggctgtgcttgatgtatttgaggagggcacagaagcatctgctgccacagcagtcacgatcaccctcctttctgcattagtggagacaaggaccatagtgcgtctcacaggcccttcctgatgatcattgtccctacagacacccagaac

SEQ ID NO: 510951 - DNA, 114 bp, Homo sapiens
tgggctgggacaggaacttgaaccgttctctggccttgatggcttctcagagacatcttaaaacacctgatgaaggatatgaagagagactagagatttagcacggagcaaggt

SEQ ID NO: 510952 - DNA, 191 bp, Homo sapiens
agaggatccggtcgctcggacatcacaagacgtttgcattcatgagctgtccccacattagcgcttaaaaacagagtgcaattcccggacgtctaaaccaaaccactttcaccgctacacgacggggtatactacggtcaggctctgaaatctgtggagcaaacccagttcatgcccatcgtccgagcggt

SEQ ID NO: 510953 - DNA, 309 bp, Homo sapiens
  misc_feature (7)..(7): n is a, c, g, or t
  misc_feature (43)..(43): n is a, c, g, or t
  misc_feature (265)..(265): n is a, c, g, or t
atgcacntgcttacccacaatttgatgagttcgtatgtgtggngggtgcggtctgtggctttccccttgcgcttctaggccaccgaggtccgtatttgccttgtggaattcaaccctaacttcgtggcgtgtatgatacttaaagtggagtggtcggtgttcttggaggtggctgataacttgtgtctgatccaggtgccgaaagggctggttgagggatatgaggagaatgaggagtttctgaggaccatgcaccacttgctgntggaggtggaagtgatagagggcaccctgcagtgcccggaatct

SEQ ID NO: 510954 - DNA, 367 bp, Homo sapiens
  misc_feature (123)..(123): n is a, c, g, or t
tgccaaacccttccctggggggtttaacccaaaacagggagatgggccaccccttccaaaaaaaaccccccgaatgcagtttttgcttggctgactgggcctgcagctcccctctcctggganttaaaggtggcccgatttaaggcccccctactcatccaactcccttttccctggggctccccatccatcaaaaaacccccaaattttaacttatgtggatgggaatatgggaattagggtgggggggggggattaaaggaaaaaatccctgtgctttgttcggcctggtgtgccaggatggttggtggttttccccccttggatctttttttactgttttttttataaatgggatgagagggga

SEQ ID NO: 510955 - DNA, 1017 bp, Homo sapiens
  misc_feature (427)..(427): n is a, c, g, or t
gcgcggagcatgaggccatgttgctggctggtagctgcggtgctggtcagagcatgcggtgtgactacgcagctcgcctggccgactgccccgaagtggaggagatacgacgctcatgacgtggcgagtgcgtgaggttgtgcatagtagtcgtcgttcgtgtcagacgcctcggggcacacagtacacgactaatgcgattactatcctggtactcggatgagctctcttagttccgcctcttgccacttcccagtccgcagagatttgcccgtatgagaaaatacctgcacagacctgacgcaggtgatcgttgtagaggggcggttggtttacaatggaacggacctcgtcacggacacgtgggctcttgggtcctatgatcctcaaacctggccagatctcagagagagagagaataacatgntacgttcaatttggtgacagaaatggcggggcaagtagcgaaagaaaatgtggtgtggctgtcatgttagacagcgaagtgcaagtgttaagcgtgcatatacacaaattcgcccaagtaacttgggcaggagatgtttacatataaagcatgagagcaacttcagtaatgtaagggcaaaatgtgggaatggggtggacattgtgtctgaaggacagctcaatagggggcgaaaggagaggtggatttggaaccagaattgcgtggattctaggggctatggtgaacaagttagcaacgtttgggtgggccttcgtcgcaaaaatgacgcctgagtttcgcgctggtgtcgcggagaggttgggaatggtgtatgacatgggtcgaatgcccggaggggttggagaacgaaatatggaatgcaattcgcaagtatacacaagttaatgctcttcgcattgtggaaccacaaactgtagattaacgggattattcaaataacccttttatcttcttatggacggtgattcaagggggaagatgggtaagaggcgtgatttcaacgtattcccggggaagttgttggttga

SEQ ID NO: 510956 - DNA, 663 bp, Homo sapiens
cagctgggggcgccatcctgctagcagcctctactctcctgcaggtggcaccatccaaggtggatggcacatcccacgtcactgggaataggagttacggttgaaacagtctgttctgtggatgagttagctgcatctgtcctcactggtaaaactgaccacatggcttccttccaattgtctacacaattgtgttggtggtgggtttgccaagtaacggcatggcccgtgtgggtctttcttttccgaactaagaagaagcaccctgctgtgatttacatggccaatctggccttggctgacctcctctctgtcatctggttccgctgaaagattgcctatcacatacatggcaacaactggatttatggggaagctctttgtaatgtgcttattggctttttctatggcaacatgtactgttccattctcttcatgacctgcctcagtgtgcagaggtattgggtcatcgtgaaccccatggggcactccaggaagaaggcaaacattgccattggcatctccctggcaatatggctgctgattctgctggtcaccatccctttgtatgtcgtgaagcagaccatcttcattcctgccctgaacatcacgacctgtcatgatgtttggcctgagcagctcttggtgggagacatgttcaat

SEQ ID NO: 510957 - DNA, 418 bp, Homo sapiens
agaatatcctataagagtttatttaacgtttattgaaacctaagagaaatgtgtgtgtgtgtgtgcgccgcaccagtggcttaactaagcaacttgttattgaaagtgttaagtcagttgatctagttgctttggctcttgcaatacagtgtctatatatgaggagccatactacacttttcttggctgtaaccccctgcttatttctttttctaatttacttttctgggctgtccacgaatgaaatctcataactcctgcagtttatgaaaataccctttaatctgacgtgtcatcgttcacccattgtgctgtaaaaaaatcagaccagacgggtttgtcatgccctgcctgaaaacacagaaatctgcctgtaaatacttttcaaaatgcccatttaataaagactttttaaata

SEQ ID NO: 510958 - DNA, 339 bp, Homo sapiens
gcggaccctagttagaagttcaatagcactagttttagaagtttcaatagcaaagcccaagggcagcacctctgtttatagcgtaatttactgaatattggcagcctactatggagaccttggtggagaagaaagatttcctttcgaaatatggctgttattgacagtgacctgttcacgcaagagctctgatgcaggtgtacaaggagattaatatagtttttatgcctgctaacacaacattcatttggcagtccatgaatcaaagaatgcctccaacttttaagtcttatcatttaagaaatacatttcataaggctatagctgctattgaaactt

SEQ ID NO: 510959 - DNA, 666 bp, Homo sapiens
  misc_feature (326)..(326): n is a, c, g, or t
  misc_feature (600)..(600): n is a, c, g, or t
attctagaggccgaggagagtgaaataccaaattctgcagtgactatcttaaaataatttttaaattttattttattttatttattaatttatttgtgagacagagtctcactgtctcactctgtcacccaggctggagagctgtgcagtggcacgatcatggcagcctcaatctcctgggctcaaacgatcctcccacctcagcctcccgagtggctgggactacaggcacccaccaccacgcctggctaatctttgcatttttagtagagacagggtttccctgttagccaggctggtctcgaactcctgacctcgtgatccgnccgcctcagcctcccaaagagctgggattacaggcgtgagccactgtgcccacccttttttttgtattgttaacagaggcagggtttcaccacgttggccaggctggtctcgaactcctaacctcaagtgacttgctcgccttgggcctcctgctaggattacaggcatgagtcactgcacctggccagagttttttattttgcatatattttctagttttttgttggttttagagacgaggtctcactatgttgcccaggctggtcttgatcntctgacctcgtgatccctccgtcttttgcttcccgtgctgagattccaggcttgagccccgcttcc

SEQ ID NO: 510960 - DNA, 1219 bp, Homo sapiens
gggcggagcagggctaccatggggcacacacatcgcgctgcaacatccaaagccacgctggcagcaacatcacccaacctccggacccgtgggcgcaggacttccggttggtacctgaagatgcacaatgtggcacactgtaggtagagcattatcaggcacaagatgtgccagtcacatcactggcatgcattggcacaagtttgtggcaacatcgaagtggagggccagttggaacaatgcattccaataggtcccagcaagatgccacagaatgtgtgccaagcagcacacaattccccatcgcagcataaatcaagccagccacccatccaagccattcaccaactgcctgcacagcaccaatgcagcacaattccacagcacacatcagcaggcagctccgcagtgcccgagaggcccatagaaacaccacagcctcagacatacatcccacggcccagcacaaaagacatggggaaataggactggcctagacagacgggacgcatggcagctacagagagacaacgcaccttcaaccagaatgacacacatctacatatcactggcaccagcagccaacgcgcaccctggagaacacctgggcaaatacgaggcacgaggaacaacccaaggagcccacacagagccagactactaggacgacaaccacctcctcacaggaagagacgacaaacaccacacccacgagaaggagcgacaacgcagcaacgacgtccgcacatcctgacaccaagacacgcacaagagacccccaaacaggagactgcgaacacacacggagcacaacagaacccaccacaaaggaaacgacgagaacacacacagaacgacagcagccgacaccctttaaggacaccagaaggacacccaaagggacgcgacaaaccaacagaccatacacaagcaaacacagcgaattgcttggcgctacacaataccagacaagcccaaacacacaccaagcaaatccaaggcacccagctacccacaccacacacagaagtccaagaacggcacaacaacacggcggacacgccaaaccaccacacaacacccaacacactcacgacccgcccacacaccgccacacagaacagcagagaccagaaaaaacgaaacgagcaaaacccggcaaaagcaaaaaaatcaaaccggacccaagcaccacaaaagaaagaggacaagaaagagt

SEQ ID NO: 510961 - DNA, 452 bp, Homo sapiens
cattgttgaggcagtggaactgatagacagcccatatctatgtacagaaaccacaagacaaacagggtaagtgaggagctactaaaataacatgtggcaaacagaacctttgttaaacttgttccctatcgacattactcccattccctaaccaggaagttttacctgcttagaatcttcttccatgtcacttgcttagaatcccttttcatctcaccctatagacaaagtcttacacagatgctcctcatgttaacaattggtttacctggatgtaatcccatcataagctgaggaacataatggaagtgcatcatcataaagctgtaagttggaccattctgagttgggaaccatttgtactttaagtaccaaataaattaaatagcaagggatatattatctttcaaaggacagctagaggaagaaggtaattaccactaaggggatac

SEQ ID NO: 510962 - DNA, 218 bp, Homo sapiens
tctttcttcccaacttttattttaggttcagggagtacatatgcacatgtgcaggttttatacgggtaaactctgtgtcatgggggcttggtatacaatttatgttgtcaccccggtaataagcataatacctaataggtaacttttcggatcctcacccccctcccacccttcaccctcaagttaagccctggcttatggtcgacgcggccgcgaat

SEQ ID NO: 510963 - DNA, 80 bp, Homo sapiens
ctactcctacggccgagccctgcaggcctctgcactgaaggactggggcgggaagaaggagaacctgaaggctgcgcagg

SEQ ID NO: 510964 - DNA, 609 bp, Homo sapiens
cagtagctattcttgatgttcctcgtatattggtatccaatgctaggcgagcgtagtagctgccccgactcatccatggtcatcctggacacctggttcggtgtgagctttcccagcagtaaggagtcgttctcccccgtctctgaatcccagtaattaatgtgtccgtcgtggctcccagagtaactgtaggacttgccgccgtttttatacaccgtcagacactggatcgatttactgtgacccttgatgacgtgcagggcattagctggggttgtatctgtccagatagttgatgtacccggacagggagacactgagcaggtggtccttctgccataggcagcccatgctgctggtccagaaccgtggagccccatggaaaatgtgctgaccacggattccacgctgactgtccaaatcttggaagtatgggtctccagaagcagaaagcaaatgggtgctgtcgggactccgactaattgcgtaaatcccagcgtcgtgagccttttttccgcccagcgcgcacaccttctccccagtttcccgtatagatgtattctgggcgtcagaatggtttggaaatcttgtccatcaggggaaatcgca

SEQ ID NO: 510965 - DNA, 134 bp, Homo sapiens
  misc_feature (78)..(78): n is a, c, g, or t
  misc_feature (82)..(82): n is a, c, g, or t
atcttcccaaaatcctttaatttacctgatgccctcatcaggtcgttaaaaattcaaatggttttaatagcttcctanctgncggttaagctctaaaacaaacaaactacagaaatgtaaaccttcatttgcca

SEQ ID NO: 510966 - DNA, 408 bp, Homo sapiens
  misc_feature (22)..(22): n is a, c, g, or t
  misc_feature (59)..(59): n is a, c, g, or t
  misc_feature (158)..(158): n is a, c, g, or t
  misc_feature (177)..(177): n is a, c, g, or t
  misc_feature (183)..(183): n is a, c, g, or t
aaactgaaacctaatgcccttnaaatatgggccttaaaaaacggatcgccccggaattnacccgcccacccatcggaccctaatgccccggtaaagaatgatatctccggtgcgcaagcggttcaccccaagactggcccattttgccgtgcccagcnagacggccgcattaaagcnggatgncccccaggcacttctgccgcgcccgctagaaacctcttcgttattacgcgtcatcttcatggcgcagtttttcaggtctaaccccgccggacgttgcgccggaccgccgatgacatacaccccacaggaggcgttatctgccacggtatcgacaaactgaatcgaccaggtcgcgaatgcggctccccaccacttccagcgccggaagtacccattcaatggcgt

SEQ ID NO: 510967 - DNA, 101 bp, Homo sapiens
agcgatatgcatatgcttgttaagacaccaattccgttatttgtttcagattcaaacatacttcccttttactattcacaagaaccattttataccaatcc

SEQ ID NO: 510968 - DNA, 193 bp, Homo sapiens
taactgcatagacagggagtgcatagcttggcctggcgacgagtcaaggagaagctgcttaggactatggagcacttggggtcaaagacctcagaaagaagtcctagatattggcgatatgctaccccatatcatgcctgtagcctacagcacagtgccaaatagatgccttttctagacactttacccataa

SEQ ID NO: 510969 - DNA, 140 bp, Homo sapiens
aattcctgggatcctccggccgccacgttgttcaaattaaaatttgtgccgtaagaaccccaaaaagtttaagggaaaaaccccccattaaagttatggataaaaattgcacacccccaactcaacagaaataacttacc

SEQ ID NO: 510970 - DNA, 316 bp, Homo sapiens
  misc_feature (40)..(40): n is a, c, g, or t
  misc_feature (115)..(115): n is a, c, g, or t
  misc_feature (156)..(156): n is a, c, g, or t
  misc_feature (218)..(218): n is a, c, g, or t
  misc_feature (247)..(247): n is a, c, g, or t
  misc_feature (257)..(257): n is a, c, g, or t
  misc_feature (278)..(278): n is a, c, g, or t
  misc_feature (281)..(281): n is a, c, g, or t
cacgcacaccaggttcttcattgggccagccatccaggtnctgtgtcctccccgtcagatgatgccattgccagcgtagccagggcttgcactcggcagtggtacatggggttcnctatagtggtcccaggtagttgcacttggtcgttcttgttntcagtcgtgggtcccatccgtgcaggggttacgcgggcttgcacacctgtttgtttgccgtngcatgttcgacaccctggccgaaggctgntgagccggtnaagcgtgggggtcagggcagncanttttagccgggttccgtgttctcacaccggtgctc

SEQ ID NO: 510971 - DNA, 971 bp, Homo sapiens
  misc_feature (899)..(899): n is a, c, g, or t
aagtgtaaggtgacaattaagtaagaaacgcggctccctcctgtcggaccccacgcttgagaacctcacacactcaccacctccccatggcataccaaataaccagtaacttacaacaaccgagagagcaccgatgcacttgacattttctaagtcttcatttgattgtttttgtacagactcattctactggaagtatatgaatactaactcactgacaactcattaaactcgaactttataaaaatatgatcctaagggccacaatgcccaacttcagtataggacctctctaacatattgaaagcacggatctccaaatgtaaatatttcactagccacttctgcagttgtagtttacgctcaagtatgattcccaactccccccttaaaatatcccccgctattaactacctgtccacctagaagaaagacacccactccacccgttctcgcccttaccctgaatgatacactcttcaagctccccccacccactaacgatgcacaagaacgcgccccgccccgcgtcttcctggtcgccccatgtgagcctgactcacggggcttcgtttgggaggctgtagcctcattccttttcgccgcgatttcttcctcccaacctctcatcttcgtcccacactcattctcccacaccacctcctttcctcctcccgccccccccctccccgaccccatatatattttcttatcccaccatatcccgaaaccctcactgatgctgaaccgacccgtctagagtgtagatcgacagaagaaacatagagtaatacgaatcgctgctaatttccatactctctcctgtagctgcgtccttggccacggctcttcctccaccgcacgcgctccgcttcgcctctagatgctttcacaccccncacctcgctttcctccctcatgtgaattttaagagtaggcaactcgggagacgcgctgcacggatctcgagt

SEQ ID NO: 510972 - DNA, 222 bp, Homo sapiens
gttgaaaagtgtagatctgccagcctgggcaacacggcaagaccccacctttacaaaaaatttaaaaattagccaggaatggtggcacgtgccagtggtcccagctccgagggagactaaggatacaggatcgcttgagcctgggtgctcaaggctgcagtgagctgagattgcgccactgccctccagactgggtgacagagtgagatttgtctcaaaaat

SEQ ID NO: 510973 - DNA, 138 bp, Homo sapiens
ggttgtagggctgggctcccaaggccttgggcagcttggcacctgtggctttgcagggtccatgcctctcggccgccctcaggggcccggctggtgccgagcgcccgtgacccttccccactaaggatacaagttgtt

SEQ ID NO: 510974 - DNA, 756 bp, Homo sapiens
cgttgttacccgcgcacccccctcgtttatatcccgagaagtgtgttctcccaagtttcttgccggggttgatcatcccggggacaaaatattttgcgcccccgcgggaaatttatcttggcgcccccattattctcgctccgcccggccgagggagaccccccaccatatgtgagcgacaaaacgaagtgtagctgacagccccacggctgtccttcttctagtcttctccctggcgatcgtgaccactctctgtctcgcctcacaggttcccctctttatatagaacaacatatgtggagttggcgccccgccctagggagcgtgctccgcacgaccgccggtggcttttcgagggtgtccacacaagaacctcccccgccctacagagtgtttcatatgggcgcccctcttatcatggcacgcatggcgcgtactgttgttgtctcaccatgtgaagcccgtctactggggcccccgtgcgcccgtatatctgctttcttctatggcgttcttcataggcgcccctccccttttgcgaccccgttatctcccacacctccctcctctcttgttcctctgcaacgcccatccctttcccgccctcccctccacgcttcaactttttccccctccttattggaacgccaccacccgaagggcccccttcagctaaataagagagcgccctctccgttcatactgctacaataatacacaccactcctgggacaaccacatcattaatacaaacaa

SEQ ID NO: 510975 - DNA, 108 bp, Homo sapiens
gctgaaaaatctcacccagtatagctggctgttggatggttttccaaggacacttccacaggcagaagccctagatagagcttatcagatcgacacagtgattaaccc

SEQ ID NO: 510976 - DNA, 364 bp, Homo sapiens
  misc_feature (281)..(281): n is a, c, g, or t
  misc_feature (355)..(355): n is a, c, g, or t
aaggccttttaccagcactcttcaagctcagtaggggaaagacttcaagcactcaggaagcatgcattcactttatttggaacaatacccttacttgtaactgtgcctcaggtgccatagtccacagagacttcttttacctgtccagagaataaaattagttgtctgttggggtaacaaaaagtgtggagctgaagagggtacctataaatgaagttgttttctgggccgggcgcagtggcttcacgcctgtaatcccagcacttcgggaggccaaggtnggaggggatccactttgagtccagggagttttgaggaccagcctggggccaacatacttgaggacttccgtctnttcccaaaa

SEQ ID NO: 510977 - DNA, 122 bp, Homo sapiens
cggacgcgtgggtatatattaaaggatttttctaggcaagaagctcaacttttttgccccataaaaataatttgtgcttaaatagtaactcatggttttcttttattaaatggggttgttgt

SEQ ID NO: 510978 - DNA, 814 bp, Homo sapiens
gcccgtcccgtcccgtcctgtgcggccccgtcccgccgccgcccgccagccatgagctccacgcagtcaacaaggcctcgtacgggtgtcggcgaaggtcaagaacggtctgtcaaatagaccccagaaggaggagagctcgcactggatcgagggactcacggcctctccatcggccgattccagaagggctgaaggatggaactatcttatgcacactcatgaacaagctacagcgggctccgtccccaagatcaccgtccatgcagaatggcacagctagaaaactgtccaattcatcaaggccatggtcagctacggatgaccctgtggactgttcgaggccaagactgtttgagagtgggaacatgacgcaggtgcaggtgtctcttctcgccctggctggaaggccaagactaaggggctgcagagcggggtggacatggcgtcaagtactcggagaagcaggagcggaatttcgacatgcaccatgaaggctggccagtgcgtcatcgggctgcacatgggcaccaacaaatgcgccagccagtcgggcatgatgcgtacggcacgaggaggcatctctatgaccccaagaaccatatctgcccccatggaccactcgacatcagcctccagatgggcacgaacaagtgcgccagccaggtgggcatgacggctccgggacccggggcacatctatgattacaagctgggaaacgacaagtgtgacaactcctccatgtccttccagattggctacacgcgggcgcaaacaggagcggccagtttcggctgggcgggatatatgacc

SEQ ID NO: 510979 - DNA, 248 bp, Homo sapiens
cacgggttcctgcccatgttgtgtaggacagtgttgtgcatagcaggcatggctacttatccttagaaaggctgcgtactaaggccttgtgtggagtctaagaactcaaatttcaggagggttcccacaatttccagactgataaaaagtggctcaatgtgcctaaactgttcatacaaacaatttggtttatcataaacacctgtttccttctgggagtcttaaaattttagtacatgggcagggag

SEQ ID NO: 510980 - DNA, 656 bp, Homo sapiens
ctgacagtccaattcagtgattgtggattgtatgacttacctagtccatccatactcatatgatcaaatatataggtggaaacttggaaacaattagcatgggtctcttgtggatttaacttgaggtttagtgaatattcataaacctgttgctgggggagagaaatgaaagttaatggagcatgcttgctgatgagagagggatttgtaatttaacgtttgtaagttatagtttacttattgtctttagaagttagctttatacattatgccccgaactagatggcctagagtccaacatgacctttggagatgacataagttgtctccataattgagtggatagcgtttaaataaaaagattagtttggcttaaggaagttatgtaacaattgagtcagccctagtatgaacttaactgtttcaggccatatatgaatagcataagtggagttataacttatcagccgtatatggagcataaatagtttgctagctgctgagtttagagaagctttaattgtggttctaataaataccagtatggatagtgatgataggaatccaggatgttgaagaaatgtggcataatgtcgtatattttggaacagagaggaaaagtcactgaagaatagtatgaagtattaaattcctat

SEQ ID NO: 510981 - DNA, 919 bp, Homo sapiens
gatgacgccggtgcagcggggtggggccgggggcctggtggccctgggatggggaaccgcgtggcttccgcgaggttcggcagtggcatccgggccggtgtcgcggcgtggacggggccgggtgcgatggccgcggagtcgcggaggcagtgccgggataaggagtggatgcccgtcaccaaagttgggccgcttggtcaggacatgaagatcaagtccctggaggagatctatctcttctccctgcccattacggaactcagagcaatcatttgatttttcttcctgggggcctctctcaaggatgaggttttgaagataatgccagttgcaaaagcaagacccgtgccggccaagcgcaccaggttcaaggcatttgtgcaatcggagaactacaatggcccacgtcggctgggtgtaaagtgcctccaaaggaggttggccaccgccattccggtgggcgccatcaatcctgggacaagcttcttccatcggtccccggtgccgcaagagggctacttggggggaacaagatcggaaagccccaaagtgtccttttgcaaggtagacagggccgtgcgggtatgatctaggtacgcctcatccattgcacacaggggcatggatcggctccgcacttgtggcctaaaagctgctcaatgattgcctggtatcgatgagtgctacacttaagcccggggctgcaattgccaaccttggggaaatttcggcaaggccatcctgtgatgcaatttctagaacctaaagtaaccttgaacccgaactctggaaggaactgtatcaccagtcccctaaaggagtatgacccttgtagaccaacaatccggggggatcaggccactgggtcaaaaggtttatcgaacaaggtacggtcgtaagaaaacacacaaaaaggggg

SEQ ID NO: 510982 - DNA, 127 bp, Homo sapiens
caagtacatcgatcgtcgatcttgagttgatctccccgcgatttgtccacgtagagctcaagatgcacctctcgtggtgaggtactactgcagctcggacaggaacagtacgctgggtgtatctccg

SEQ ID NO: 510983 - DNA, 626 bp, Homo sapiens
  misc_feature (39)..(39): n is a, c, g, or t
  misc_feature (75)..(75): n is a, c, g, or t
  misc_feature (82)..(82): n is a, c, g, or t
  misc_feature (110)..(110): n is a, c, g, or t
  misc_feature (136)..(136): n is a, c, g, or t
  misc_feature (168)..(168): n is a, c, g, or t
  misc_feature (193)..(196): n is a, c, g, or t
  misc_feature (212)..(212): n is a, c, g, or t
  misc_feature (221)..(221): n is a, c, g, or t
  misc_feature (237)..(238): n is a, c, g, or t
  misc_feature (242)..(242): n is a, c, g, or t
  misc_feature (253)..(253): n is a, c, g, or t
  misc_feature (256)..(256): n is a, c, g, or t
  misc_feature (260)..(260): n is a, c, g, or t
  misc_feature (269)..(269): n is a, c, g, or t
  misc_feature (273)..(275): n is a, c, g, or t
  misc_feature (297)..(297): n is a, c, g, or t
  misc_feature (306)..(306): n is a, c, g, or t
  misc_feature (320)..(320): n is a, c, g, or t
  misc_feature (329)..(329): n is a, c, g, or t
  misc_feature (362)..(362): n is a, c, g, or t
  misc_feature (376)..(376): n is a, c, g, or t
  misc_feature (384)..(384): n is a, c, g, or t
  misc_feature (395)..(395): n is a, c, g, or t
  misc_feature (398)..(398): n is a, c, g, or t
  misc_feature (438)..(438): n is a, c, g, or t
  misc_feature (487)..(487): n is a, c, g, or t
  misc_feature (511)..(511): n is a, c, g, or t
  misc_feature (521)..(521): n is a, c, g, or t
  misc_feature (524)..(524): n is a, c, g, or t
  misc_feature (527)..(527): n is a, c, g, or t
  misc_feature (569)..(569): n is a, c, g, or t
  misc_feature (587)..(587): n is a, c, g, or t
gcataaaataatatgctaaaacatttcatgcagaaagtntcattaaatatacatttcagcttatatccatttccnaaaaccngattatccccaatacaggaataaaaganttagaaagccaacaaacagctttaanaatgcaatccttgcagccttaaaacatttatnaccactacatatacaaagaaaatgnnnncaagtgatgtggtgangggtttcanatgaattccgaatggnntacnacactgtaatngtnaagngcagtaaangggnnnctgacctgagcccctgccagantggcttccncatagattgccatnctatccccnataggcctcgtcattggctcaataagtccaagncaaaaccaatactnaacaagcntttcggcatcnggnatatttttaatcaggtcattcagtgtgaccagtatatctncttttggacatccctcattaatcaagtccaggcattcagaaaatgtgtngtgtactttttcagtaaataatcnttgtccaccnccntcngcacatgggagtccaaaaagaccacaactggtttttcatttngtcctgcaggctcatgcngagtaactactgaattagggggcctttttagcactcttc

SEQ ID NO: 510984 - DNA, 965 bp, Homo sapiens
agtgtatgccacactccgtgggcaggtgtactgttggtggaactcctgtggcatctagtgctctggcaattgctaccagtgcggtcatcggcttcccagaatggtgtttcggggtatcgtcttaggttgtgcgtgaacgcgcccttgtggcgtcctcctatgcgcttgtccgttgtgcgctcagcaccggaggaggtgtggcggacccctataaaatgcccactttgcaatcgctttactcgttgcgtggaacattctgtggccccgctggcacagcttccggtgctgatcatatgtggccgcgaccctgggtgccgcctctaggttataagcgagctattttgtacccgcgctatccctgcctcgattgcatgccacggggacacgtgggtccactgtccttgggtatggcggggcatatgtgccaccgtgggagtacgtcacacttgtccatgtgggaacccttggtgtctcatgtgcgtttcaccgccggagatatgcgcctcggccgggcggcgcacgtgacaagatagctggtctatgagggcgacctctctgcgcctagcaccagcacttgccctattggagatatgtgacaggaggttggagatggcacagcgtttatacgagtgggagggaggacgaaccggtcgcgtcgtaatacgagttattctggagcaactgagtcgcaggtgacgggaggccagtacgacggcggcatcagtgtatgcaccaagcatcttgtggcctacacggatctctctgccatcacccggcattctagccgcagggcccactggagagctgatcccgctctgagtcctctgcccctttccaacggacaactaatcgagcactgggagggtggcagggaggaggggacagcttcaccaccttggaagtcctaggggtttatcctcttccttctttgtggtttctgtttaccacctagagaagagctattc

SEQ ID NO: 510985 - DNA, 434 bp, Homo sapiens
gtaacccagggcctgcgtatacagtaggtaaactgtatagcctttgctatagtaaacatcaacaataggataatgcctagataagggttattagtttaacatgcaacagatgtgttaagtgcctactgtgtgtcacgtactactaaggatacaactcagtgatcttgagaagaaacaaggtgcatgctctcatgcagtttgggaagccttggatagacagtaaaaacataataatttaatcaaaacatgggtgaaagatatttttcaagacatacagatggcaaacacacacatgaaaaggtgcacagtatcattgttcatcagagaaatgcaaatcaaaactacaatgatatatcacctcactccagttaaaatggcttatatccaaaagacaggcaataacaaatgctggtgaggatatggagaaaagggaa

SEQ ID NO: 510986 - DNA, 273 bp, Homo sapiens
  misc_feature (83)..(83): n is a, c, g, or t
  misc_feature (237)..(237): n is a, c, g, or t
ctgtgtgtcctaacccaaatctcttctggaattgtaatcaccacctgttgagggagaaaagtgattggattatggaagtggtntcccctgcgctgttctcatgatagtgaatgagtctcacgagatctgatggttttaaaagttgcaatttttcctgtgctcactctcacttctctcctgctgccttgtgaagaaggtgccttgcttcccctttgccttctgccttgattgtaagtntcctgaggcctcaacagccatgcggaactgtgagtc

SEQ ID NO: 510987 - DNA, 1154 bp, Homo sapiens
  misc_feature (30)..(30): n is a, c, g, or t
  misc_feature (408)..(408): n is a, c, g, or t
gctttctgacagtgcagggattctgaagcngtctgcttgagttactgtgctctcttccaaggctgtaggagttctggagctgctggctggagaggagggtggacgaagctctctctagaaagacatcctgagaggacttggcagactccaggttcttcagttttggaactcaaactggctctccttgcacctcagcctgcagatggcctattgtgggaccttgtgatcatgaagtcagggaccctgaatggagggatcggccagagctgaggcagaagaacataaattgtgaagatttcatggatatttatcacttcccaaaattaatacttttataatttcttatgcctgtctttactgcaatctctgaacataaattgtgaagatttcatggacatttatcacgtncccaattaacactcttatagtttcttatgcctatctttactttaatctcttaatcctgttatcttcataagctcagaatgtaattcacctcaggactactattgcacaaatggattgtaaaacatgtgtgtttgaacaatatgaaatcagtatacccggaaaaagaacagaatatcagtgattttcagggaacaatggaagataactataaggtctgactgcctgcggggtcgggcagaatagagccatatttttcttcttgcagaaagcctatagaaggatgtgcaagtaggagaaatatttgctgaattccttttcccagcatggaagaaccctggggaaggaatgcattcctgggggtaggtctatagatggccgctctgggagtgtttgtcttatgcggttgagataaggattgaaatacgccctggtgtcctgcagtaccctcaggcttactaggattgggaaattccagccgggtaaattctagtcagagtggttctctgttctcaaacctgtttcctgtgaagatgtttatcaagacactgtgtgcacagcaggacatagaccctcatcagtaattctaatttgcctttgcctggtgaccttaacggccctttgaagctgtgatccttgtgacctactcctgttcgacacctctcctctttaaatccttataaactgctggtttgccgtcgggtcaccacaatatctacatattgatgacggccgagccactgtaattc

SEQ ID NO: 510988 - DNA, 1243 bp, Homo sapiens
  misc_feature (165)..(165): n is a, c, g, or t
  misc_feature (1243)..(1243): n is a, c, g, or t
aactgggtcacatcggatgctccaaaatggtagccggactggcagagggagctagtgctagtcccaaggttggccactttgccagatcgggcggcgcgagtcggaccctcggtcgtacttgcactgaatggccagtgctttcgctagagatcacagtgaggatantcggctcagtgaaacaaaaggactcgtgttacatgaacaagcgtggcaagactacacgctatgttccactagatactcgggcactgcatatcacgttaacactacagagatagtaacgatgttactggtaatcgtgcaacttgcattgcccttcgaaggaaaatttcataccgaggttatcatgtgattcgcatttccctgtgggctgtaaaaccagggaactcctgagtgataatctctgaggagacttgcgagtgccttattccttagtaccgacaggtactacccaagaagatcaaatttgtgatgatcgaatgtaattccgtctaggcatggagccatgtactaaatcgctcgttaattcgagataacggtatgggatgtttatacttgtgtcttaacggggataaatttagatagatagtctattggggggctcacgtgtggggttggcattgaacatttgggtttgaatttaatgattaattttgaatgggaaaagcacatccatgtggcccctaatggctttagggaaaaagaggagcctataaagtcacgggagctttgtcccagtcccgaagccaactcactccggaagtatcactcgctgggattgtggaactggcaggcgattgtgaaaggttcttaccatatccaggacgcaatccatggggttttacacgtaacacgacggacggaaattgaatccacaatttaattggggacccggttggcgctctctggtgaaacttacaggcgagaattggtttaattagaagagtaaatgaaggaaaccaggttgggaattagaacctcggtgagaacacaggaaccatggtaataggaatgatattgcttcggggggaaatgtagacaaaacgatggtcgggctcttgaggatctatgcccaatgaatcatttgttgtattcctagtaaaagatttagcactcggcttggtcatgtaccattttgagcacggggtgttggatcagacttattggatctaggagagcatggggcttgggagacgaacaggccaacggatattgtgtgaaacgacaagacactgataactan

SEQ ID NO: 510989 - DNA, 152 bp, Homo sapiens
aggctccgccgtcccttctcctggcttttgccctgtttctgcctgctcctggctgtctagcagcgctggtgccggccagcccgttcctgttctccaggctttttgaccatgctatgctcccagcccaatcgcgcgcgcctgctggcccttgt

SEQ ID NO: 510990 - DNA, 883 bp, Homo sapiens
  misc_feature (30)..(30): n is a, c, g, or t
  misc_feature (392)..(392): n is a, c, g, or t
  misc_feature (602)..(602): n is a, c, g, or t
gctttctgacagtgcagggattctgaagcngtctgcttgagttactgtgctctcttccaaggctgtaggagttctggagctgctggctggagaggagggtggacgaagctctctctagaaagacatcctgagaggacttggcaggtgagcactgtttcaaggaatgggctgatggggtcataatccatgataacctcaccaatcttttagagtcacagctggtgagaagagcaaaaatcctcacagaaaagcagaaattcctagggaccatgaaagacagtacctgccaagtcttaggaggaaacactgggcagaggaaaaggcacctttatggcagcaacagggagagacgagggcagctggaaaaaggtggtaacagggggctggtagtngggtggtggtcagagaaggatgaatctcagaggaggtgagaccagaagaatgaagaagagcttattatggaaaaagagagggaccagcaggtacaaaggcaatgtgtagttctgctcaggagctggtacagtaatcttcaattcttattccgtagaaaaaaaggagacagaaatgtcagacactgtgatggttaatactgagtgtcactngattgaattgaacggatgcacagtgttgatcctggatgtgtctgtgaagggatgtgtcaaaaagagattaccatttgagtcggtgggctgggagaggcagacccacccttatctggggtaggaaccaacctaatgccagcatgactagactactagccaggcaggaaaagtatgaccgcgagagcactgggcctagcttgccaggcatagatcctgcttccgtatgggatgcttcctggaattgaacacccaaactccagggtcctccagtttaggactca

SEQ ID NO: 510991 - DNA, 1068 bp, Homo sapiens
  misc_feature (30)..(30): n is a, c, g, or t
  misc_feature (322)..(322): n is a, c, g, or t
gctttctgacagtgcagggattctgaagcngtctgcttgagttactgtgctctcttccaaggctgtaggagttctggagctgctggctggagaggagggtggacgaagctctctctagaaagacatcctgagaggacttggcaggaagtcagggaccctgaatggagggatcggccagagctgaggcagaagaacataaattgtgaagatttcatggatatttatcacttcccaaaattaatacttttataatttcttatgcctgtctttactgcaatctctgaacataaattgtgaagatttcatggacatttatcacgtncccaattaacactcttatagtttcttatgcctatctttactttaatctcttaatcctgttatcttcataagctcagaatgtaattcacctcaggactactattgcacaaatggattgtaaaacatgtgtgtttgaacaatatgaaatcagtatacccggaaaaagaacagaatatcagtgattttcagggaacaatggaagataactataaggtctgactgcctgcggggtcgggcagaatagagccatatttttcttcttgcagaaagcctatagaaggatgtgcaagtaggagaaatatttgctgaattccttttcccagcatggaagaaccctggggaaggaatgcattcctgggggtaggtctatagatggccgctctgggagtgtttgtcttatgcggttgagataaggattgaaatacgccctggtgtcctgcagtaccctcaggcttactaggattgggaaattccagccgggtaaattctagtcagagtggttctctgttctcaaacctgtttcctgtgaagatgtttatcaagacactgtgtgcacagcaggacatagaccctcatcagtaattctaatttgcctttgcctggtgaccttaacggccctttgaagctgtgatccttgtgacctactcctgttcgacacctctcctctttaaatccttataaactgctggtttgccgtcgggtcaccacaatatctacatattgatgacggccgagccactgtaattc

SEQ ID NO: 510992 - DNA, 532 bp, Homo sapiens
  misc_feature (514)..(514): n is a, c, g, or t
atatatccatagcaaagggtccagtcagctcacccttcatacctctttattgaccttttttgtagacatacatacggtaccaaagtcgaccacaaaggatgcttggtttcatttttccaccttaaacatccactcacctgaagcaatgaaagaataaggccagaagagtaaagacatggatgttgtgccatattttctttttacagatagtataagtggggaagactaggtaatagcctcaaagtagagaagacatcaagcaaaggcaactgagaaaatgtctgtgtggcattgtggctatggttgaccatctcattcagggtgcttctaaaacagccctcccatctgtctaccaggagttagcctatccttgttgatgaacatagggtgctcatcagtatagtaactaggaatggggaacagttctcccaacagtttgtaaggtgatgttctgtcgctctgaaggctttgatcatgctcccaacaggtttgggtcagtcttgttttgaaatgnatgactaatgggtgacgc

SEQ ID NO: 510993 - DNA, 850 bp, Homo sapiens
  misc_feature (30)..(30): n is a, c, g, or t
gctttctgacagtgcagggattctgaagcngtctgcttgagttactgtgctctcttccaaggctgtaggagttctggagctgctggctggagaggagggtggacgaagctctctctagaaagacatcctgagaggacttggcaggcctgaatatgcattggctgcgaaaagttcagggactttgcaccctgtggggtactcagatgtccagccgcactctctacattaatagtaggcaattggtgtccctgcagtggggccaccaggagtgccggccaagtttaactttgctagtgatgtgttggatcactgggctgacatggagaaaagatagaagaaaaataacttgaacgggagaatcagaaaaataaacgagaagaaaggaaacgaaataacacgagagaaagagaaacgaacgacaagacgcaaaagaacacaagcaacacgaaaccgacgacgggacgaacacgacgacgggacgaacaggggacgacgacacaacaccccttcgtacccacctaacacaactagtaaaagaaactgataaagaacacagtaactggaagacccgcgacgaaacacgaaagacgaagcgaagtaacgacggaaacacttattaatattcccacagatagacaaagtcaagcataaaactggagcttgagaaggcaatgaaaggccgtggcaccttcttataccctagaaagaagacctccattacaggaaagacttgtgtgtgggggttcgggaccattagaatcatccacaagtcaacccaaaacttggaaccgtcagggtcagaggggaaccaccatttattaagcatttgccatgtgcaggcactaaccag

SEQ ID NO: 510994 - DNA, 1106 bp, Homo sapiens
  misc_feature (30)..(30): n is a, c, g, or t
  misc_feature (360)..(360): n is a, c, g, or t
gctttctgacagtgcagggattctgaagcngtctgcttgagttactgtgctctcttccaaggctgtaggagttctggagctgctggctggagaggagggtggacgaagctctctctagaaagacatcctgagaggacttggcagcagcctgcagatggcctattgtgggaccttgtgatcatgaagtcagggaccctgaatggagggatcggccagagctgaggcagaagaacataaattgtgaagatttcatggatatttatcacttcccaaaattaatacttttataatttcttatgcctgtctttactgcaatctctgaacataaattgtgaagatttcatggacatttatcacgtncccaattaacactcttatagtttcttatgcctatctttactttaatctcttaatcctgttatcttcataagctcagaatgtaattcacctcaggactactattgcacaaatggattgtaaaacatgtgtgtttgaacaatatgaaatcagtatacccggaaaaagaacagaatatcagtgattttcagggaacaatggaagataactataaggtctgactgcctgcggggtcgggcagaatagagccatatttttcttcttgcagaaagcctatagaaggatgtgcaagtaggagaaatatttgctgaattccttttcccagcatggaagaaccctggggaaggaatgcattcctgggggtaggtctatagatggccgctctgggagtgtttgtcttatgcggttgagataaggattgaaatacgccctggtgtcctgcagtaccctcaggcttactaggattgggaaattccagccgggtaaattctagtcagagtggttctctgttctcaaacctgtttcctgtgaagatgtttatcaagacactgtgtgcacagcaggacatagaccctcatcagtaattctaatttgcctttgcctggtgaccttaacggccctttgaagctgtgatccttgtgacctactcctgttcgacacctctcctctttaaatccttataaactgctggtttgccgtcgggtcaccacaatatctacatattgatgacggccgagccactgtaattc

SEQ ID NO: 510995 - DNA, 637 bp, Homo sapiens
aagctttgcaaatacttacagcatggtccagactactatactgaaaatgtgccatcagagaaatactttcagataacaagtccttgagcacatgcctctcccgatgtaaatttcttataccaaaaataagcatctctgatgccttggcagggctcattatcttcggaaaagtgtaagacgagcatccttccggacttaggcctaggtgactccatggtagtatgaaatgttgccctgtcggatgcatacacggcatcgaatagcccaaggagggtgacggagatgcccacagttggactattgaccactgcaatcagaggcttaggaaaatctataaatcagcccacaaattccctcagtaaaacggcattaatactcagctttctcctctactccaccagggggaatatcagtgaagttagtcagatcattcccactagtgtaatagtcaccattttcctgttaaaacagtgatgattgagtcatccttgctggcagctattagtgcacgcataatttccatgatacatctcagtgttcatggcattttcctgtttggcccgtttgcacatgatctctgtgatgccatcttcggagagcacaccaataccggtaccgagccgaatcgtatcgtgtc

SEQ ID NO: 510996 - DNA, 1187 bp, Homo sapiens
  misc_feature (30)..(30): n is a, c, g, or t
  misc_feature (700)..(700): n is a, c, g, or t
  misc_feature (744)..(744): n is a, c, g, or t
  misc_feature (846)..(847): n is a, c, g, or t
  misc_feature (849)..(849): n is a, c, g, or t
  misc_feature (852)..(852): n is a, c, g, or t
gctttctgacagtgcagggattctgaagcngtctgcttgagttactgtgctctcttccaaggctgtaggagttctggagctgctggctggagaggagggtggacgaagctctctctagaaagacatcctgagaggacttggcaggcctgaatatgcattggctgcgaaaagttcagggactttgcaccctgtggggtactcagatgtccagccgcactctctacattaatagtaggcaattggtgtccctgcagtggggccaccaggagtgccggccaagtttaactttgctagtgatgtgttggatcactgggctgacatggagaaggtaatggggtggaaaagaggcacagagtgagacaattttgttgacttttaaaattcatccattaattcagtaaatatttgttaagtacttattacatgtaaggcactgtaataagctatggacaagacactcgtcttccatgaaggcagtatggtatgggagagagacagcatgagcttggaaggaagaaaggcacaggaatgtggcaacctggtaactcccaggcagccaacacacagtttgtttacactatatgtagactgcacatgctctgttgtgacctcccagggtgaaatgaggacttttggtctggggtcgtagaagaggcgggtttgaatctaataatagcaaatcaagcctgggcaacacagngagactctgtctctaccaaaaatgtttaaaacaaaattagccangcatggtggcacatacctgcagtcctagctactcaggagattgaggtggcaagattgcttgagcccaggagttggaggctgcagtgaactgtgatcacaccnncncanctccacagagtgagattctctctcaaaaaagtggggggcaaatcagcactgaacaaagactgagtcttcccagaaagttaggtcacgtgtccctgtcaaatagaggtgtgcaagtaagatagctacgaggttgacagttatcaaaagggcttcaatatgagacatccaagaaagacaaagatgacagaaatttctgagttatacttcacagacctgagagtctagaattgtactccattcactggtgatcaatcaattgccttagactgaagtcctatgagtctttctgtaggatggaaggattcataactggctagaggtaggggaagggtgga

SEQ ID NO: 510997 - DNA, 438 bp, Homo sapiens
gatgacttatttgatggcttagtaattgggtcctttggtcgtgtctgtaagtgatacagactgttattatcatttttaaaaaccacattcaaataatgcaaagtgaaaaaaaaaggtgtcaaaaatccgctggcgttactctgacagtctctagctgtggttccctagctgtggtcttcaccctcggctgcacactcgaatccctttgggacgttcgttgttttttgtgggaaattaaaaaaatcatgctgattgggcagagattctgatttaattggtctggaatggggccagggcattggtaacttttgtagttttcttagagcttcctcaggtaattttgacattcaatgaagactgagcccctctgcaccttcccaaatagcatagttagtaacaatgacaatgaagaactttcagcctaaaattcgtgtggat

SEQ ID NO: 510998 - DNA, 369 bp, Homo sapiens
ctgggtatgcatgatcctatcacccaagtagagaacatggtacccatagttaaacagccctatgcctgccgccatactctccagcctaacagtagtccccagtgtctactgtaccactctttatgcccatgagtatcccatgtatagctcccacatttaagtgagaaaatgcaccatctggtttactgcttctgtacgtattatatagtataatggcctccagctacatccattttgcttcaaaagacatgattatatttttatggctagcacagaatcacatggtgtacatgtaccacattcactttctccagtccaacattgatgggcacgtgggtcgataccatgaaatagctattttgaaataac

SEQ ID NO: 510999 - DNA, 904 bp, Homo sapiens
ccagaaatagcgggttcgctaaacaccacacatatggggtcccccctgtaagtgacccaacaagccccttggcctcgtgagattgaaactgcagcccgcgctagaagagttctgtcgcgtaacaacacacttgtgtggcgacattgctccaagaagaaagctgaacctgtatggcgaagtggtctgcttacgccagcagccaggtgtaattactgcgcgggggcagtgcaaccaagggacgccccaaaaatttggggctgggagagtagctcttcaacaaccaggcggacaactagtaccttgccgacacccctgtggagtgtgttccgccccccgaggccgccgcccgtatgtgaacaaagaggggggtaaaccggacccccacgctctatttcaaagaagggcgccttaacaatactgtgccgccgctcaacaccactctcgcgagcaaaaaacagttggtcctgttagcaccacgcgcgtcgcaccggactctgttgtcacaaccacgctccaagagttttagcatccgcggtcattgttatacataacccagccggtcttgtccggggccgtgcccacagttcgaagaggcggatactccacacaggaacagtgtaataagcgagacgactcccagcccccacactacagcaggggtcgcacagcgccagtctggcggcagagacacaccacgccagcaaaaggaataagcccgcaagcgttcccgcttcgaacaaggcagtgtggcccccgcaccgcgcgtacaaaagagagggagaactggcacacaaacagtgtgtttatcaaatgaaaacactaaaaggggaacagaacaaccactagcgctgggggaaggaggtcccacacgtgcatccagcaacccgctccccgccaacaagca

SEQ ID NO: 511000 - DNA, 344 bp, Homo sapiens
  misc_feature (315)..(315): n is a, c, g, or t
  misc_feature (322)..(322): n is a, c, g, or t
ggaaggcaaccctcctgcaaagggtccagggtggcggtggtgggggggacagtgatgcaatctcagctcactgcaacctctgccaccccagttcaagcgattctcctgcctcagcctcccaagtagctgggattacagttgcctgccaccgtgcctggctaatttttgtagttttagtagagatggggtttcaccgtctaggccaggctggtcttgaactcctgacctagtgatccacctgcctcggcctcccaaagtgctgggattacaggcataagccaccacacccggccagggctgctttcttatctcctngggtctnacatgggggttgggagtcttcc

SEQ ID NO: 511001 - DNA, 294 bp, Homo sapiens
cgtgtcccttccattacttgctgggctggttctgtcccatgcagcactgtgcgaccgattggaataacttttcgattcctggggcacagtgtacaatttcatggtcccagaacttaaacgctgggttttaaatcagctcaatgaaggtaataagaagaccccaaggtatgtgcctatttacaatcaaccgttccaagagaactcttgtgatctgttcttggatggcttccgtattgccctcttgcaaaaggtacagcatggtgcacttgaagtagtgagtgtggctatttgggt

SEQ ID NO: 511002 - DNA, 1198 bp, Homo sapiens
  misc_feature (1198)..(1198): n is a, c, g, or t
cgggcggggaggggaggggagcggcccggcccactatgcaaagcgccgggacgccgccgacgcaccccgtggcaaagaatatgcttttggtctaagtgatgttagataaaaagcaaatttggagcagttttctttattcgagttcgaaaatggttcataaagcagcgaagacaactcaaaacatcaggtaacacatttggcccaggaactgctaacaagacatacaggtgcagtggtggcattaagaagtttggcaaggaagagagccttgaagatgaggaacgtgatatgggccatgggaagttgacaaggaccaatggagagcaatcattgaactacatgaaaaattacagaagaactcagcgttgactattctacggtcattagggtcagttcagcattcgaagcaaattggaaaggtgaaaaagcttgataagtgggtgcctcatgagctgagcggaaatcaaaactatcgtttgaagtgtagtcttcttttatgctacgcaacaacaaaccattactcaatcggatgtgacatgtaatgaaaagtgaatttaatacaaaaacagttcagtggttggaccagaggcagtccaaagcagttaccaaagcaaacttgcacaggaaaaaggtcatggtcactgggtcaggggatctgcaggcccatctgatacaattacagttactgacatcctggtgaacaccattacatctgagacagtatggctccagcaatggtcaagatgcacccgaaactgggcatcactggtggactgcattgtgcaacacacagtgccacactctcgaccaacagaaacaaacaggtacgggatgttgcaacaaccacagggccaacaacgcgcaaccgacaacggggaacaaaacggctggagaccacaaccaacaaggataaaacaactgagaaccgagtagcaaagaggaaaaacagagggacgagacgtcgggaacaaacgcgccgagaatacgcaccataacgagcgcaacaagactgtcacagacacagacacaatgcagacagcgaatagaccagacaacgaaacatccatcatcaagctacataaccacacagaacaacaaacggacagacaacacaaaacgaacaaaagcccaaatgagaacaaagagaacacgacaaagacggatacggctgaagagccatagctccaccgattcgctn

SEQ ID NO: 511003 - DNA, 711 bp, Homo sapiens
ttagaactcctttactttcaactgtattgttcaaaattgccaagagatttctttcccggccaggacaagaaaagcagacacctttccattttccatgcacttgacgagtgtgcgtttttgtctgtgttggggagtggcgggccgggccacagaagagcatctcaaaacattctaaagcaaacaggaacttgatccatgttccctgaacctgaggagaacacacttctactctgctcagagccaactctcccaccaccggccccctgtatctcttctcctccccgccttccagcccaatcttcttcggaccttcactcacctcccccagtcgaccattttccccaccgaccccctcgccccccgcccccccctctacctctcgccggcccctccacctccgcaccccccccccgccctccccctcccctcccctcctccctcctcaccccagcgccccctctcccccccctccctcgctgctcccctgccccctccccgccctcctccccacctcccctcgccacctccttccccccctccccccctgccccccctcgcccccccccccctccccccctccccctcccccccgcagcgaccccctgcgcccacccgccccccccctccgcccccctccctggcccccccccgccctccccctccctccaccacccccctcccctccccctgctcttgcctctcccccgtctc

SEQ ID NO: 511004 - DNA, 166 bp, Homo sapiens
tactgtgaaatgtgatccccaaagttggaggtgggaccctagatggaaggtgtttggggatggatccctcatgaatggcttgatgccttcctggaggtaatgaatgagttctcactttgttacttcatagagagctggttgtttaaaagaggctggctcctctctg

SEQ ID NO: 511005 - DNA, 598 bp, Homo sapiens
  misc_feature (240)..(240): n is a, c, g, or t
aatccacgtgctttggcctcccaaaaggctgagatcacaggcgtgagccaccatgcctgcccgctttccttacgtattatccacacattaactcaaaatggactaaagtattaaatgtaaaatctgaaaccataaaatctctagaagtaaatcggggcaacaccatttaggacataagcacaggcaaacatttcatgatgaaaacatcaaaagcaattgcaacaacaccaaaccaaatanaaagaaggcacagcaaagcaaattatcatcagagctaacagccaacgaacagaatgggagaaaattttcacaatttatccatctgataaaggtctaatatcaagaatctacaaggaacttaagcaaatttacaagaaaaaaccaaccccattaaaaagtaggcaaaagatataaacagactcttctcaagaggagacatttatgtggccaacaaacataagaaaaaaagcccaatgtcactgaccattagagaaatgcatatcaaaaccacaatgagatatcatctcatgccagtcacaatggtgattattaaacagtcaagaaataacagatactggcaaggctgaggagaaacggg

SEQ ID NO: 511006 - DNA, 103 bp, Homo sapiens
tcgatacgaccatcatcatcatgatcgctcgacatcgatacgaccatcatcatcatgatcgctcgacatcgatacgacctactactacttctgtcgtcttctc

SEQ ID NO: 511007 - DNA, 274 bp, Homo sapiens
  misc_feature (97)..(97): n is a, c, g, or t
cagaacaggacagctgttctgtgtcttttcttccattttttatgaagagcgtttctctccttcctatccatatgaagtgtgactagtatttgttgcnttctttacagttaataatcgggatttgtgatattctgtatttaaactgaagtccacagacagggaaataattggcccaaggtcaggttgcaaaccggtggcgacgctaccatctgaactaagccctgggccccgtgtcggataccagtcagtgccctcttactgccctttctggtgt

SEQ ID NO: 511008 - DNA, 116 bp, Homo sapiens
tttccccttttcccccccccccatttggggccctgggggtttcaatcatccccccatttggtcccctgggctgtttttgtttattttaacttgtaaaaaaaaaaaatttttttcca

SEQ ID NO: 511009 - DNA, 815 bp, Homo sapiens
tggcttagtaaaaaattttatttttcttctttatgctccagaaaacaaaaaaagggccttgcccccaaggggtctcctcttgaaggataggggggcaaaaagagtgataaggggaggttgttggggtgtgaggttgaaagtaggagtttggtcctcccccttttcccctccgtggtcacctccctctttttcacgtgctccccttctccagaaaattttaggtattgaacacagctttgccacccacgggggggcgtggagaagcagagcgtgcagctcaaaaaattaagtgcccactttcagcaagaggagggttccaggtgcgtgtactctgggggggcagtgggggaagaagcagttgctgcacgggaatgtggttgtgaacaaacgctcccaggttgcaggggacagggacagcagggcccgtgggaacaattccccccttgtgcaccggggggactccttaaactcctgtgccccttcaacactttctttcccaaaacaccccaatcccccatcacgcgtactatccacccagccccgcgccatcacaataccagcgagctcgcactcaacctccaataaagaccagcaccaagtccctttgacaatatcccccttctccaagccggaaaagccctgcagacaaaaaagtaccttcaaagaccccaaatgggtaacgacatccaggatgggccacagctaggcagcacacaatctcactgcaggcttcgagtgccccaacaggagaccctcagcgatcaccacgcacgcttcaaccggaccctcaggccagcatacaacagcaccaacac

SEQ ID NO: 511010 - DNA, 982 bp, Homo sapiens
tgccctgggaggaatgtgggcctctcccttgaaggagctgtagacccccggtggtcaaaggcagggccgtacataacgggagtgagagcgcgcccgttgtgcataggggggactgaggcttagcgcagtttgacggatcccaccacctaggaaactaagtgtgtatagtcctcaagaagtatctccgtagaaattccagtgcatcaccatagggactgaccagtacttggaagtcccctagtaccctaaggatattttattttcagggtccttcttgtcctctatgaggaacccagggaaacctagaacctactctaagcaagtgtctagttcccgaattctagaagaagtggagtacgtagccctcactttacctttctgagaccgcagatattttaaagtaggggcgcgataaacatgttcttgtcaaactaaacccactcgtcattagtcatagggccaagaaagtggcgcactgaaagaacactactttcaggttatagattcttctcactaagcagaagaggctaagataataaccaagccttttttaatccttgaactgcagtcatagactagacaggtttgaatacaatcgcttctccctatagcatacaacctgtagccaagaagcatcaccaagtctctaagccacctaattgccaacagagggaaggacaatctattacccttcgactctcgttctatggcttacagagggtaggacacaatgtatctacttggcggaccaatttccttgacttcagatgtggcccgcatccatggtcaagggtcccatttgttctctagctgaactctcactccccttcaacttgaagggcagtgactatacattccacagatgaagcccagtgtttactttgaagtatgactagcaaaaagcatttacaccattcactattggtagtactcaactgtggtatagaaagaagtcataattcataactcctagctatagcac

SEQ ID NO: 511011 - DNA, 219 bp, Homo sapiens
ttccacagagcagcatgcatcgtgcaagtgatacgagatagatccagtattggcagtcctaccagatactagcctgcagcgtatccatctcagctctggaacgagtggcacacggttcgtgactggaataaaccctgcgagtcttcttcgctgccacttcctgagcggtcctcctcttgttcctcctcactgtcatcgtcactcacgaccggattggaa

SEQ ID NO: 511012 - DNA, 466 bp, Homo sapiens
  misc_feature (155)..(155): n is a, c, g, or t
  misc_feature (214)..(214): n is a, c, g, or t
  misc_feature (248)..(248): n is a, c, g, or t
  misc_feature (271)..(271): n is a, c, g, or t
agaaagaacaaacagagtttttctgtggaaaacattataattaccttttttgtctctcccccagaccccgaggttttgtaaaaagcccccaaaaccctttgggaggcagtttcctcggttaatttcttcccaaagaaatgtttttaaaaaattcnaaaacaaattggaattatgcttggtatttctcccagtttctagaaggtacctattttcnaccggtttcaagtgatgaagtgaaaaataatttnacattccgatagtgttactgatnaacaacccctacttaagagatatgttgctttttacttaagggatagtgttgatagataaattagaatgtatagataggtttgtgaaagtctaaataatggctgtatagatatgtatatatggttcacatatctggatctgtgtatttgattttgtactttaaatgtgacaaataaaccttttgggagaaaaaaaa

SEQ ID NO: 511013 - DNA, 397 bp, Homo sapiens
  misc_feature (352)..(352): n is a, c, g, or t
  misc_feature (371)..(371): n is a, c, g, or t
tcttatttaaaaactattgttagaaaatgctaatgatcatttgagctttcagtaagttgtaatctttttggtggtagagggtctcgccttgatgttgatggctgctgactgaatcagggtgatggttgctgaaggttgaggtggctgtggctattaaaataaggcaacaatgaagtttgccacattgactcttcctttcaccaaagattcctctgtaggcatgtgacactgtttgataggcatattccccaccacagatcttctttcaggaactgggggtgggacctggggcacttgcagtaatgggttcttaaaccctttgttgtccattttcaacaatgtggcacaggcntctttcaccaggagttggnttccatctccaaggaaaccactttct

SEQ ID NO: 511014 - DNA, 185 bp, Homo sapiens
ccgggttttcgagttgaagctcagaaatgccacactgaccttctcagttcatgcatatgcctggaaaatcacaggcttccattctacagtgcagggcttggaggagcagggcgattatcctttggatagaggcttacttcagggggctgagcaggaacagtccacaggcccttcactccaaaccc

SEQ ID NO: 511015 - DNA, 393 bp, Homo sapiens
gaaatagaccttcatacttccaacaccattggccagttcttagtaaagattcagagcaatccagcaatggttccaactcggaggcagcgcctcttggtccccatttctgtatagcaggcgtgtgtgtgtgtgtcgaggttttttattttttgcttaatcaaactccattcccaaatgcactccatctctggctctgagggcgctccctcctctcagccgggcagcctggcctctcctgcccagacctgcggtcccagcatcccccagagccagggaacaggcccagcgggagggggttttatgttttgtttcaaacagaaaacacaaccttatttttctttacaaaagcaaaaaaggaaaccaaaaaagatacagcctttgaatgatgaaaaa

SEQ ID NO: 511016 - DNA, 129 bp, Homo sapiens
aaaaaagccagacgagaaacgtgaaatttttttttcctgaattggacatgtgtttgcaaacacttgtctgaagataatgctgtttatgcaataattcgtgaacatgctacagagttttatataaattta

SEQ ID NO: 511017 - DNA, 3793 bp, Homo sapiens
  misc_feature (5)..(5): n is a, c, g, or t
  misc_feature (44)..(44): n is a, c, g, or t
  misc_feature (109)..(109): n is a, c, g, or t
  misc_feature (1609)..(1609): n is a, c, g, or t
  misc_feature (1692)..(1692): n is a, c, g, or t
  misc_feature (1710)..(1710): n is a, c, g, or t
  misc_feature (1742)..(1742): n is a, c, g, or t
gaggnggcgcgcgtcgccgccccgcgtcccgcctgcggcccgcncccccggcgtcaccgcctcctgcccgcctgcccgcctgcccgcctgcccgcctacccgcctaccngcctacccagcctacccccctgccggcctgccgtccttccacgcggagagccatggagggagtgagcgcgctgctggcccgctgccccacggccggcctggccggcggcctgggggtcacggcgtgcgccgcggccggcgtgttgctctaccggatcgcgcggaggatgaagccaacgcacacgatggtcaactgctggttctgcaaccaggatacgctggtgccctatgggaaccgcaactgctgggactgtccccactgcgagcagtacaacggcttccaggagaacggcgactacaacaagccgatccccgcccagtacttggagcacctgaaccacgtggtgagcagcgcgcccagcctgcgcgacccttcgcagccgcagcagtgggtgagcagccaagtcctgctgtgcaagaggtgcaaccaccaccagaccaccaagatcaagcagctggccgccttcgctccccgcgaggagggcaggtatgacgaggaggtcgaggtgtaccggcatcacctggagcagatgtacaagctgtgccggccgtgccaagcggctgtggagtactacatcaagcaccagaaccgccagctgcgcgccctgttgctcagccaccagttcaagcgccgggaggccgaccagacccacgcacagaacttctcctccgccgtgaagtccccggtccaggtcatcctgctccgtgccctcgccttcctggcctgcgccttcctactgaccaccgcgctgtatggggccagcggacacttcgccccaggcaccactgtgcccctggccctgccacctggtggcaatggctcagccacacctgacaatggcaccacccctggggccgagggctggcggcagttgctgggcctactccccgagcacatggcggagaagctgtgtgaggcctgggcctttgggcagagccaccagacgggcgtcgtggcactgggcctactcacctgcctgctggcaatgctgctggctggccgcatcaggctccggaggatcgatgccttctgcacctgcctgtgggccctgctgctggggctgcacctggctgagcagcacctgcaggccgcctcgcctagctggctagacacgctcaagttcagcaccacatctttgtgctgcctggttggcttcacggcggctgtggccacaaggaaggcaacgggcccacggaggttccggccccgaaggtcagagaagcagccatgactgcggggggaggacacacggatgctcaggcccaggctttgccaggtccgaagcgggcccctctctgtcctgcctcttttcacctgctcacgccctcccaccccgcaccctacagccccaggtcctggcccagtccctccactgcctcgaagagtcagtctgccctgccttttcctttcgggcaccaccagccatccccgagtgccctgtagccactcaccactgctgccacctctctggccaatggccctttcactggcctggtgacnggaatgtgggcagcgcccacacaggctctggcccatggcttcctactggcagctccaggcacccccctctcaccacgccgttngctggctctgacactgtngggtgagggtcctggtcctgctgtcttccctnctgctccaagaccctcccgagtccccggaaatggagagtgcagttcttgggcccagcctggcttcgccatgagtttggggagcgagaccccacctgagacaggcagtaggagcctgtgctgaccttggggaatctgagcttttccaagggtaaggggcccagggtatgcaggccttcagtgacatcaggtcgttgtcatcctttccctccctgacctgtcacgagcctctgcaggtgcctgctcaccatggcccagcgccactctgtcctccgactcaggtgagggggcagcccacagacctgctcctcagtagcagggcctggccaggcccctgctgttctcagcctcagtttgccatctatgaaatgaggtggacccctctccatagcccttgggtgccagctcagtgggtgtggggatcacatgaggtggctcatgaggacacactctggaagtcgaggggctgccacgtgcagaggaagttcccggcctgggggctttatccaggggtcccagtcgagagtggcccgaggccgtccctcaccgggcatgttccctctggctgcccactccctcagggcccacatgtcctgccactcgccactctgagcacgagttcaccttccagatgtggccaggtgtgccagctcctctctcctgtgcgttggaaccccgggggaggcaagagcagatcacaggtgcatgagggttacacccgtcacctgggtctgccgggatgggttgggggggcaggtgccaggcctcactgctgtgaatctgccacgcctgggggtcctagaggctgccccaccccagtgattgggtagcagctcacatcccacccagcttcacaagtgaggaacccaggtgcatcgggagaccctcgggggcttctgtggcctctgtgcccgatgacctgcgtggcttcagacaaggccccagcgttactgggctcagcttgttgttctgtgtggagcgtgaggtgagaaaacccctctgaaaagatgtggtcggggccacgcttcccactggttctgcagtgaggagttggggcgggtgagccaaagcggccccccatggtgtctacctgaggggcagggaaccgcctgcctgtgcactcacgccaccccccagcccacaaagagcccatctgagagaaggacgtggtggagccaggacgggaaagcgtcctgtcggctggccatgctgttgcttgcgtctcgaatcttcggttctcgaggaagtgttgacagtgtgatgctaatgtctgcttttcttggcgttgggtagaagcaggacatctgtgtgtatgtgcgtatttaaattagattatttataataaccagagccagccctcgcgctggccaggatcctcctgccgagctgatgtcgctcctgccctctgccggggtccggaagcgacatctcaggaggtagctctcagcagagtgaggattcctgcctttcgtagagttttgtgtgactttttaaattattcatgtgtcccttaaaagtttcactacgtggagaaaattccagcaccaagtgttgtggcaacagctgagagagtgcaggcaccactgtgttgtggcttgttgaccgggaatgtgtcacccctgccagggaactcttctcctcgcgggggacttgggatggccatcagaccttctagggtctggctggggtcatcctaggtatgggtgaccgtccctgagacataagcgaggtagattcagccatcctcaccctcagacttgaggtccccacccaggccaagccggccccccgtaccccttgcctgggagcaaaccgccaggacgcagcctccacgccgcacctgccacattcagccctgcccaggaaggaacacatgacccttctgtctgtgactgttgctgagtctctgtctcatgtcgtagaattgtggataattgtctagtgaccctctcatcactgtaaccatcgcgcctggcctagatgtcgtgttttggatgctgtgttttcaataaatgcctctggggccctgcttttacccgctggcgtcaaaaaa

SEQ ID NO: 511018 - DNA, 415 bp, Homo sapiens
  misc_feature (3)..(3): n is a, c, g, or t
ggntcgcgggggtctggacccatgcattcggtatgatgatatctttaatgggaggagtggggagagagtcaggacagtccttactggatacggtgaaaatttgacaaagaccttaagaaagtgacgagtaagcttagtagtgatctaggagaacagctggtggcgggcggtggggaacaacaaatgcagaggccataaggcagaagtattcttgaaacatttgggggacagcaagggggccatggtggcaagactacaaaggagtgaggggagggaagagtggtaggacttggaggttgcaaggctggagctgcaggggaaaacggccctgagggatttttgcaaagacctgtggatttaacttgtggtgagatggggaagccacgtgggggatcacttgaacccagggttccca

SEQ ID NO: 511019 - DNA, 1169 bp, Homo sapiens
atagatgccaatcgttttcccagcaccgtcacttagtattttaggaaacatgcgtgaatttcggacaagaagagaagcatgcttgggcctgtcactaaattgcaagcattcgtggaggatctagctgaagagatcatgtacctagtagtaactgggttgtatcaatgccgcatatgctgactgctcctcacggtcatggactctaagagttgtacaggttgcccataaatggcgttggaaacgtatcctgaggcttggatgaacaggaagccaatacaggaatggcaactggctattaaccctgtactgtgcgttcgacttgactgaagcttatgggtctggataaacatggacgttcttacagtagtcagtgaaaagtcgcaggagtatctaccaacaaggccgttgtgatcttattgagccattccttcgggtacccgagagatgacagacagcagacattgcgaccccaggtttgaccttgaaccagcagcagctacatcttccaacatgtgtgaggctcctatgggaactgtgttccagcctttggaatgcagatactcgtgatttcaacagtatcctgtgtcaggacccaagtctaacccagatcgaaggaccttctttgtggagcccgacagatccttcatggaagcataaattcgtcacatgttttccattaatacatgggatggggctactattcgggtaagccgtttgaggcccacactgcctctcctatacaccacctttcaggagaaaccttccggaaaatccgatgagagggcaaaatccccttttactaaaaggggtaaacacgaaggggccccctctcttttttcacggaaaaatcccctagttctgaggaacccacgtttaattaaagatatggaagataaccaattaattggctgcaccccacttacttggtgggggacaacaaaaagaagccccccacacccttaatgcgggggaaaacagaggtagttagaagggagactacattttgtgtatacaccgcacttaagggagagtactactaagtggttacaacacaatgctggctactggaccgccagtaggggtacaacacaactgaaggtagctattacacctctataatacccccaccttgtttgactgactctgcgtgcgcatgttcatctacatct

SEQ ID NO: 511020 - DNA, 230 bp, Homo sapiens
tgcccggaatgcggcaaggcctttagtcatggctctcagcttactctacatcagagaatccacacaggagagaggccctatggttgcccagagtgtggcaaagccttcaattggagctcccatcttcaaattcatatgagagttcatacaggtgagaaaccgtatgtctgtagtgagtgtggaaggggctttagtaatagttcaaacctttgcatgcatcagaaagtcca

SEQ ID NO: 511021 - DNA, 3964 bp, Homo sapiens
  misc_feature (5)..(5): n is a, c, g, or t
  misc_feature (44)..(44): n is a, c, g, or t
  misc_feature (109)..(109): n is a, c, g, or t
  misc_feature (1651)..(1651): n is a, c, g, or t
  misc_feature (1669)..(1669): n is a, c, g, or t
gaggnggcgcgcgtcgccgccccgcgtcccgcctgcggcccgcncccccggcgtcaccgcctcctgcccgcctgcccgcctgcccgcctgcccgcctacccgcctaccngcctacccagcctacccccctgccggcctgccgtccttccacgcggagagccatggagggagtgagcgcgctgctggcccgctgccccacggccggcctggccggcggcctgggggtcacggcgtgcgccgcggccggcgtgttgctctaccggatcgcgcggaggatgaagccaacgcacacgatggtcaactgctggttctgcaaccaggatacgctggtgccctatgggaaccgcaactgctgggactgtccccactgcgagcagtacaacggcttccaggagaacggcgactacaacaagccgatccccgcccagtacttggagcacctgaaccacgtggtgagcagcgcgcccagcctgcgcgacccttcgcagccgcagcagtgggtgagcagccaagtcctgctgtgcaagaggtgcaaccaccaccagaccaccaagatcaagcagctggccgccttcgctccccgcgaggagggcaggtatgacgaggaggtcgaggtgtaccggcatcacctggagcagatgtacaagctgtgccggccgtgccaagcggctgtggagtactacatcaagcaccagaaccgccagctgcgcgccctgttgctcagccaccagttcaagcgccgggaggccgaccagacccacgcacagaacttctcctccgccgtgaagtccccggtccaggtcatcctgctccgtgccctcgccttcctggcctgcgccttcctactgaccaccgcgctgtatggggccagcggacacttcgccccaggcaccactgtgcccctggccctgccacctggtggcaatggctcagccacacctgacaatggcaccacccctggggccgagggctggcggcagttgctgggcctactccccgagcacatggcggagaagctgtgtgaggcctgggcctttgggcagagccaccagacgggcgtcgtggcactgggcctactcacctgcctgctggcaatgctgctggctggccgcatcaggctccggaggatcgatgccttctgcacctgcctgtgggccctgctgctggggctgcacctggctgagcagcacctgcaggccgcctcgcctagctggctagacacgctcaagttcagcaccacatctttgtgctgcctggttggcttcacggcggctgtggccacaaggaaggcaacgggcccacggaggttccggccccgaaggttcttcccaggagactctgccggccttttccccaccagccccagcttggccatccctcacccgagtgtcggaggctctccagcgtctctgttcatccccagcccgcccagcttcctgcccctcgccaaccagcagctcttccggtctcctcgacggacctcaccctcctcattgcctggccgcctcagccgggccctctctctgggaaccataccctctctgactcgagcagactccggctatctgttcagcggtagccgcccaccatctcaggtgtctcgatctggggagtttcctgtttcagattacttctctcttctgtcggggangctgcccctcctccccantcccttccccagcgccttccgtggccggctcggtggcctccagctccggctctctgcgccaccgcaggcccctcatcagccctgcccggctcaacctgaagggacagaagctgctgctgttcccgtcaccccctggagaggcccccaccacgcccagcagctccgatgagcactcgcctcacaacggcagcctcttcaccatggagccgccccatgttccccggaagccgcccctgcaggacgtgaagcacgccctggacctgagatccaagctggaaagaggcagtgcctgcagcaaccgctccatcaagaaagaggacgactcttcccagtcatctacctgtgtggtggacaccaccaccaggggctgctcggaggaggccgccacctggagaggtcgtttcggcccttccctggtccggggcctcctggccgtgagcttggccgccaacgccctgttcacctcggtgtttctgtaccagagcctgcgctgacccaccgttggagcccctcggaggggagcaacccggtgcctgctgcttcaccactgccggcctcaggaccctccctggaggggctgccacctctgccctcatctccagggccttgacctcactggactgtgactgtcctcaggacacctgcccctcctcacctaacggactgcagggctgagcatgtgtctgaggtcacactctctgcccactcacctccttggctgacatcggttgtgtcttggtgctgacactctgatcccgaagccagggagccccaaggggctggcatgaccctggggtgccccacacagttcagccctgcctggcagggacgccagtactactgtaactgcagcaggagctgcccggcctgccttctggccccacgcccacaggcgtagtcacatctttgtactgtactcccctgtctcacctggggcaacctcagagccccactaagctgaaggccccctgggggagggggaagcatggtccttatcatctgccctatcttgccccttcctgtggagtgggcagaagggctcccgggatcctcagagctcccaggtctgagcagccaaaggcccagctgggcctccaggaccagcgcgagcccctgccccaccctcccctgccacatgtgccctgctttgtgacctctgttgaccttcctggaagcagccccattaccctgagaatgcggagcgccctggcccacctcgccctgtgtttccaggcctgcacgtctggtccttcagctgcacatggaactgcagggcaggctggcggggggccttcagatctcagatgagactgcaccccttcgaccaccctactgggcacctgcctccagcccctgagaactccatcttcccctagttctgcccaggagcccctgagaaccccatcttcccctggttctcttgcccactcccctgctggggctccttcctggcactgaggaggggcgctcccaatgctgtgaggcagcggggagggaccgtgcacccgtggctatcagagcccctccgctgtcccaccctgggcctgggacacgggcctggggcagtgtgtgtctgctggtcatgtgctggtgccagttggggaggaatcagctgtctcggtggattctgagactcactgtggggcgggaagaagggtcttcactctgccattcagggataaagtttaattttatttttctacacattttgccaggtcaggcattttgctagtaagcaggatgcccccaactctccctgccatggaggattcttttttttaagctttgggtgcttttttaatacttttttttttaatgtggggaaggagcttgctctgacgtcaccctcctctcccctgactcctgtcctgagagctgtggatgccgcctcctgccctgcctacccctgaaacgtggggaatgggggccccaggacagcatcaggacttttgagtccagctgccagcaatggttccaactcggaggcagcgcctcttggtccccatttctgtatagcaggcgtgtgtgtgtgtgtcgaggttttttattttttgcttaatcaaactccattcccaaatgcactccatctctggctctgagggcgctccctcctctcagccgggcagcctggcctctcctgcccagacctgcggtcccagcatcccccagagccagggaacaggcccagcgggagggggttttatgttttgtttcaaacagaaaacacaaccttatttttctttacaaaagcaaaaaaggaaaccaaaaaagatacagcctttgaatgatgaaaaa

SEQ ID NO: 511022 - DNA, 912 bp, Homo sapiens
  misc_feature (31)..(31): n is a, c, g, or t
  misc_feature (73)..(73): n is a, c, g, or t
  misc_feature (132)..(132): n is a, c, g, or t
acgccagggattcgataacagtggatgtgtnatatattgccaaacattacaacatgagcaaaagcaaagttgncaaccagttctacagtgtggaagtgggagactcaaccttcacagttctcaagcgctacnagaatctaaagcctattggctctggggctcagggcatagtttgtgccgcgtatgatgctgtccttgacagaaatgtggccattaagaagctcagcagaccctttcagaaccaaacacatgccaagagagcgtaccgggagctggtcctcatgaagtgtgtgaaccataaaaacattattagtttattaaatgtcttcacaccccagaaaacgctggaggagttccaagatgtttacttagtaatggaactgatggatgccaacttatgtcaagtgattcagatggaattagaccatgagcgaatgtcttacctgctgtaccaaatgttgtgtggcattaagcacctccattctgctggaattattcacagggatttaaaaccaagtaacattgtagtcaagtctgattgcacattgaaaatcctggactttggactggccaggacagcaggcacaagcttcatgatgactccatatgtggtgacacgttattacagagcccctgaggtcatcctggggatgggctacaaggagaacgtggatatatggtctgtgggatgcattatgggagaaatggttcgcacaaaaatcctctttcccagggaagggactatatttgaccaggtgggaactaagggtaatttgaacaactagggaacaccatgtcccagaattcctgaacgaaattgcaacccacaagtaaagaaactatgttggagaatcgggccgaggtattgcgggaactcacctttcccaaattcttcccagattccctcttcca

SEQ ID NO: 511023 - DNA, 232 bp, Homo sapiens
gactaagacgtaacaagtagactgctggtaacttgagttagttggttccaaagaggccagaactgtttgcttcaaagaatgcggcaggtgggctccctttggctctgtctggcagatcatgagctcttagactgtgtagcgtttggcacttactctcccttgagagtctcctgcgggggaggcttctgggcttgtcccttcaccttaaccagccgtgtcacctgtgtctctt

SEQ ID NO: 511024 - DNA, 169 bp, Homo sapiens
atgatagaggacccccccttaaacgtgctgacgtataagccagtaattagataaaacaaaaggttcttgtaataatagtcattaaaattgctattgcatgcattatagaaaccaagacacaaataaaaatataccagcagtattgtcttattgacgcagctagaaacct

SEQ ID NO: 511025 - DNA, 391 bp, Homo sapiens
gaatcagcgtgccaaaggtcgaccactgtcactcggcacaatcaaggcaggtctccaagggcagcattcaagtgtggacttgtggcaggatctgtcactaacgtggaaacttgtgctgacgcaaccttggcagatctcgtggctcaaacgagagtaccgaccatgctttgaaagcgctttctccaaacttctgcaacctggcacacatgagtctccgtgtgtcagcaccagccttaccttcatgccacagttcatcgaacataggcaaccgtgaagcagactgtcggagttccaaggcgtaacagtaaggatgtcttcgggccatttcgtatccgcattcttaccaaaatgtctcgtcattgtcaagaggagccgacaacctggcatcagc

SEQ ID NO: 511026 - DNA, 3608 bp, Homo sapiens
  misc_feature (5)..(5): n is a, c, g, or t
  misc_feature (44)..(44): n is a, c, g, or t
  misc_feature (109)..(109): n is a, c, g, or t
  misc_feature (1651)..(1651): n is a, c, g, or t
  misc_feature (1669)..(1669): n is a, c, g, or t
gaggnggcgcgcgtcgccgccccgcgtcccgcctgcggcccgcncccccggcgtcaccgcctcctgcccgcctgcccgcctgcccgcctgcccgcctacccgcctaccngcctacccagcctacccccctgccggcctgccgtccttccacgcggagagccatggagggagtgagcgcgctgctggcccgctgccccacggccggcctggccggcggcctgggggtcacggcgtgcgccgcggccggcgtgttgctctaccggatcgcgcggaggatgaagccaacgcacacgatggtcaactgctggttctgcaaccaggatacgctggtgccctatgggaaccgcaactgctgggactgtccccactgcgagcagtacaacggcttccaggagaacggcgactacaacaagccgatccccgcccagtacttggagcacctgaaccacgtggtgagcagcgcgcccagcctgcgcgacccttcgcagccgcagcagtgggtgagcagccaagtcctgctgtgcaagaggtgcaaccaccaccagaccaccaagatcaagcagctggccgccttcgctccccgcgaggagggcaggtatgacgaggaggtcgaggtgtaccggcatcacctggagcagatgtacaagctgtgccggccgtgccaagcggctgtggagtactacatcaagcaccagaaccgccagctgcgcgccctgttgctcagccaccagttcaagcgccgggaggccgaccagacccacgcacagaacttctcctccgccgtgaagtccccggtccaggtcatcctgctccgtgccctcgccttcctggcctgcgccttcctactgaccaccgcgctgtatggggccagcggacacttcgccccaggcaccactgtgcccctggccctgccacctggtggcaatggctcagccacacctgacaatggcaccacccctggggccgagggctggcggcagttgctgggcctactccccgagcacatggcggagaagctgtgtgaggcctgggcctttgggcagagccaccagacgggcgtcgtggcactgggcctactcacctgcctgctggcaatgctgctggctggccgcatcaggctccggaggatcgatgccttctgcacctgcctgtgggccctgctgctggggctgcacctggctgagcagcacctgcaggccgcctcgcctagctggctagacacgctcaagttcagcaccacatctttgtgctgcctggttggcttcacggcggctgtggccacaaggaaggcaacgggcccacggaggttccggccccgaaggttcttcccaggagactctgccggccttttccccaccagccccagcttggccatccctcacccgagtgtcggaggctctccagcgtctctgttcatccccagcccgcccagcttcctgcccctcgccaaccagcagctcttccggtctcctcgacggacctcaccctcctcattgcctggccgcctcagccgggccctctctctgggaaccataccctctctgactcgagcagactccggctatctgttcagcggtagccgcccaccatctcaggtgtctcgatctggggagtttcctgtttcagattacttctctcttctgtcggggangctgcccctcctccccantcccttccccagcgccttccgtggccggctcggtggcctccagctccggctctctgcgccaccgcaggcccctcatcagccctgcccggctcaacctgaagggacagaagctgctgctgttcccgtcaccccctggagaggcccccaccacgcccagcagctccgatgagcactcgcctcacaacggcagcctcttcaccatggagccgccccatgttccccggaagccgcccctgcaggacgtgaagcacgccctggacctgagatccaagctggaaagaggcagtgcctgcagcaaccgctccatcaagaaagaggacgactcttcccagtcatctacctgtgtggtggacaccaccaccaggggctgctcggaggaggccgccacctggagaggtcgtttcggcccttccctggtccggggcctcctggccgtgagcttggccgccaacgccctgttcacctcggtgtttctgtaccagagcctgcgctgacccaccgttggagcccctcggaggggagcaacccggtgcctgctgcttcaccactgccggcctcaggaccctccctggaggggctgccacctctgccctcatctccagggccttgacctcactggactgtgactgtcctcaggacacctgcccctcctcacctaacggactgcagggctgagcatgtgtctgaggtcacactctctgcccactcacctccttggctgacatcggttgtgtcttggtgctgacactctgatcccgaagccagggagccccaaggggctggcatgaccctggggtgccccacacagttcagccctgcctggcagggacgccagtactactgtaactgcagcaggagctgcccggcctgccttctggccccacgcccacaggcgtagtcacatctttgtactgtactcccctgtctcacctggggcaacctcagagccccactaagctgaaggccccctgggggagggggaagcatggtccttatcatctgccctatcttgccccttcctgtggagtgggcagaagggctcccgggatcctcagagctcccaggtctgagcagccaaaggcccagctgggcctccaggaccagcgcgagcccctgccccaccctcccctgccacatgtgccctgctttgtgacctctgttgaccttcctggaagcagccccattaccctgagaatgcggagcgccctggcccacctcgccctgtgtttccaggcctgcacgtctggtccttcagctgcacatggaactgcagggcaggctggcggggggccttcagatctcagatgagactgcaccccttcgaccaccctactgggcacctgcctccagcccctgagaactccatcttcccctagttctgcccaggagcccctgagaaccccatcttcccctggttctcttgcccactcccctgctggggctccttcctggcactgaggaggggcgctcccaatgctgtgaggcagcggggagggaccgtgcacccgtggctatcagagcccctccgctgtcccaccctgggcctgggacacgggcctggggcagtgtgtgtctgctggtcatgtgctggtgccagttggggaggaatcagctgtctcggtggattctgagactcactgtggggcgggaagaagggtcttcactctgccattcagggataaagtttaattttatttttctacacattttgccaggtcaggcattttgctagtaagcaggatgcccccaactctcctctcagccgggcagcctggcctctcctgcccagacctgcggtcccagcatcccccagagccagggaacaggcccagcgggagggggttttatgttttgtttcaaacagaaaacacaaccttatttttctttacaaaagcaaaaaaggaaaccaaaaaagatacagcctttgaatgatgaaaaa

SEQ ID NO: 511027 - DNA, 946 bp, Homo sapiens
  misc_feature (23)..(23): n is a, c, g, or t
gaattattgctttggaagaaaancttacatctccacaagaccttgcttcccaaataagacatgtcagaagatgctgataatcctcacttctgcattacaaatcgctcataggtgcatctgcaggatcttacttggatccagagtgctagctgcaaaagcttctgggaattgtacacttaactctgaagttttatctttaatataggaagtgccgcgtatgatgctgtccttgacagaaatgtggccattaagaagctcagcagaccctttcagaaccaaacacatgccaagagagcgtaccgggagctggtcctcatgaagtgtgtgaaccataaaaacattattagtttattaaatgtcttcacaccccagaaaacgctggaggagttccaagatgtttacttagtaatggaactgatggatgccaacttatgtcaagtgattcagatggaattagaccatgagcgaatgtcttacctgctgtaccaaatgttgtgtggcattaagcacctccattctgctggaattattcacagggatttaaaaccaagtaacattgtagtcaagtctgattgcacattgaaaatcctggactttggactggccaggacagcaggcacaagcttcatgatgactccatatgtggtgacacgttattacagagcccctgaggtcatcctggggatgggctacaaggagaacgtggatatatggtctgtgggatgcattatgggagaaatggttcgcacaaaaatcctctttcccagggaagggactatatttgaccaggtgggaactaagggtaatttgaacaactagggaacaccatgtcccagaattcctgaacgaaattgcaacccacaagtaaagaaactatgttggagaatcgggccgaggtattgcgggaactcacctttcccaaattcttcccagattccctcttcca

SEQ ID NO: 511028 - DNA, 2225 bp, Homo sapiens
  misc_feature (5)..(5): n is a, c, g, or t
  misc_feature (44)..(44): n is a, c, g, or t
  misc_feature (109)..(109): n is a, c, g, or t
  misc_feature (1609)..(1609): n is a, c, g, or t
  misc_feature (1692)..(1692): n is a, c, g, or t
  misc_feature (1710)..(1710): n is a, c, g, or t
  misc_feature (1742)..(1742): n is a, c, g, or t
gaggnggcgcgcgtcgccgccccgcgtcccgcctgcggcccgcncccccggcgtcaccgcctcctgcccgcctgcccgcctgcccgcctgcccgcctacccgcctaccngcctacccagcctacccccctgccggcctgccgtccttccacgcggagagccatggagggagtgagcgcgctgctggcccgctgccccacggccggcctggccggcggcctgggggtcacggcgtgcgccgcggccggcgtgttgctctaccggatcgcgcggaggatgaagccaacgcacacgatggtcaactgctggttctgcaaccaggatacgctggtgccctatgggaaccgcaactgctgggactgtccccactgcgagcagtacaacggcttccaggagaacggcgactacaacaagccgatccccgcccagtacttggagcacctgaaccacgtggtgagcagcgcgcccagcctgcgcgacccttcgcagccgcagcagtgggtgagcagccaagtcctgctgtgcaagaggtgcaaccaccaccagaccaccaagatcaagcagctggccgccttcgctccccgcgaggagggcaggtatgacgaggaggtcgaggtgtaccggcatcacctggagcagatgtacaagctgtgccggccgtgccaagcggctgtggagtactacatcaagcaccagaaccgccagctgcgcgccctgttgctcagccaccagttcaagcgccgggaggccgaccagacccacgcacagaacttctcctccgccgtgaagtccccggtccaggtcatcctgctccgtgccctcgccttcctggcctgcgccttcctactgaccaccgcgctgtatggggccagcggacacttcgccccaggcaccactgtgcccctggccctgccacctggtggcaatggctcagccacacctgacaatggcaccacccctggggccgagggctggcggcagttgctgggcctactccccgagcacatggcggagaagctgtgtgaggcctgggcctttgggcagagccaccagacgggcgtcgtggcactgggcctactcacctgcctgctggcaatgctgctggctggccgcatcaggctccggaggatcgatgccttctgcacctgcctgtgggccctgctgctggggctgcacctggctgagcagcacctgcaggccgcctcgcctagctggctagacacgctcaagttcagcaccacatctttgtgctgcctggttggcttcacggcggctgtggccacaaggaaggcaacgggcccacggaggttccggccccgaaggtcagagaagcagccatgactgcggggggaggacacacggatgctcaggcccaggctttgccaggtccgaagcgggcccctctctgtcctgcctcttttcacctgctcacgccctcccaccccgcaccctacagccccaggtcctggcccagtccctccactgcctcgaagagtcagtctgccctgccttttcctttcgggcaccaccagccatccccgagtgccctgtagccactcaccactgctgccacctctctggccaatggccctttcactggcctggtgacnggaatgtgggcagcgcccacacaggctctggcccatggcttcctactggcagctccaggcacccccctctcaccacgccgttngctggctctgacactgtngggtgagggtcctggtcctgctgtcttccctnctggcctctgcacaggggtggtgacagtggctacaggctgggccctggcgtgcctgaccgtgcagcagagtgaggctggggcagcagagagcccaaactcaccctgacgagcacctgtggacagtcccatgggacctgcatatggctggaaacggcctgcaggacgttggtagagaccgtaacgaaggcaaaacatcgaaatctgggtagatagatgacaccagagtcaaaaacctaccgaattcccagaattgagaatatgaaaaattaggccaacatgagacataaaagagaaagaggaacaaaccccccgaaaagaggagcaaaacacagtaaaccaggacaagagaatacacaaaaagggacaaaaaacgaaagagaaaaagacaaaaaaaaaaacaaaagaagacaataaagatagaagagagaaacacacaaagaaaaaaaaaaacacaacaaagacagaacacagagaaacagaaa

SEQ ID NO: 511029 - DNA, 659 bp, Homo sapiens
  misc_feature (23)..(23): n is a, c, g, or t
gaattattgctttggaagaaaancttacatctccacaagaccttgcttcccaaataagacatgtcagaagatgctgataatcctcacttctgcattacaaatcgctcataggtgcatctgcaggatcttacttggatccagagtgctagctgcaaaagcttctgggaattgtacacttaactctgaagttttatctttaatataggaagtgccgcgtatgatgctgtccttgacagaaatgtggccattaagaagctcagcagaccctttcagaaccaaacacatgccaagagagcgtaccgggagctggtcctcatgaagtgtgtgaaccataaaaacgtgagttttgttatttttaaacttctggcagtgggagtttgtaagattggaaaaagaaaatgtgtctgtacttgagtaagaaaggctttctttgctttgcaattcctgcctcttaagattgtttatcctgccaatatgctacattcgatttcattgtcctcatggtagctttctgcttaaaaatcacctaaaaaccatatgatgtggaagtgatgaattttataaatatttccctagttagaaaatttaccatatttggttatcttgctccaaattgagagcttcaagaaagaaacaagacaaacaaagcccaaagccag

SEQ ID NO: 511030 - DNA, 451 bp, Homo sapiens
ctggcggatctagaggatcagccctacatttctatacttagggggctacaatcgggagtactactcgattgtcatcgtccaggagtcgcaagtcgcctggttactaggaataatgggggaagtatgtcggagttgaagattagtccgccgtaatcggtgtactcataggtaccgtaccaatgatggccacttgatttgatggtcagggagggatcgttgacctcctctgttatgttaaggatgcgtacggattggagggcgatgaggactaggatgattgcgggcaggatcgttcagacggtttctatttcctgagcgtctgagatgttcgtattagtaagtcctgtagtgagtgctcaagaaaagggcataccaggactaaggaagcagactcaggcatatgattatccagggcgtgatccctgaaaggtgatcagctcttctataatag

SEQ ID NO: 511031 - DNA, 118 bp, Homo sapiens
cttggctccgcgctgctgctgctgacatgtgcttggcgaacgtcggggtacagttagctgaagatgtcactgtgtctggcgtaatacggagtgtggccaccggactgtcaattgaacc

SEQ ID NO: 511032 - DNA, 276 bp, Homo sapiens
cctggatgaagtgtcgggacatcagcccctggggtaacagcccccgacgtaggtcccttggctggaaaaggaagagagaatgtttggatgaatctgatgatgagccagagaaggagctcgcccctgagcctgaggagacctgggtggcggagacgctgtgtggcctcaagatgaaggcgaagcgacggcgagtgtcgctcgtgctccctgagtactacgaggccttcaacaggctgcttggtaggaggacacccagaggacactttgcatccagag

SEQ ID NO: 511033 - DNA, 128 bp, Homo sapiens
tatacccgttgctgactgagcgaccgctcagtagtgttggatctcaacatgtggggtcggtgcttcacggcaccggaccacaatttttcgttattacgctcgcaccagctcacgcatgacggtcactt

SEQ ID NO: 511034 - DNA, 1490 bp, Homo sapiens
  misc_feature (2)..(2): n is a, c, g, or t
gnaagaaccctcctgggatgccacataaccctggcggtcatgaaggctgtgtgcagtgcaaggctgtacctagcaatagtcagaagcaatcagagctagatgtgggcagatttgaaacaccactaaaccacatacggaataatccacaaagggcagaagcctcactggcactagaggcttaagcacaaacttcaccacagctggctgaactgacccagaggcaactcctaggaaagcaggcttaagaagaaaaaccatgctgatccctgggcagcctgaaagtccctgtatacacccaagactgtgccttctccagagtgatgggagaagaaaaatccaagctagtagtccgtcacaaaatgtgaaggcaaacacataattatttaaattgcaatagcagcctccaagccacaaacacatccaaggtaaagagtaaaagtagaactggctaagcggtcttaagcacaatctatgaccagtgattttatgctgacccggagaaatctctacatagccaggctcaaagatataaacacgaggctgcacactgtgtgggaaatagagtttaagtcatcaaagcgtaaataaattggccaagacaacaacatcaaccccctggggtggaggaggggcaatcaataagcagtgttgctacaatgtattatgcaaaagttccagttttcaatgaaacaattacaagacatgcaaagaaataggaaaatgtgaccctgtattaatttgctagggacaccataacaaagtactacagactatgtggcttaaacaatagaaatttattttctcaaaattctggatgctagaagtctaagatcaagatgtaagcagtgttggtttcttttgagccctctctccttaacttgtagatggccacctccctccacgtggtcttcacatgctgtcttcacgtgatcttccctttgtgtgtgtatctaatctcctctttttggaaggacaccagtggtattccattagggcccactcatatgacctcattttacctaattacctctttgaaaggccctgtctccaaatacagtcacattctgagatattggaggttaggacttcaatctgtgaattttggggagaaacacttcatcccataacatattcagctcatagtagatacacagacagaagaaaggcagggaatagaaactgcttttgaaggagcctaaataattgacttagcagacaatgacatcacacattttaaataagttcagagaactgaatgagatcatgtctaaagaattaaagaaaatgtatgataacaatatctaatcaaatagaaaatgccagtaaaagagaaattatttttaaaggtaccaaatgaaaattctgaatttgaaaagtacaaaaatataaataaaacaatgactaaagggtctcgagagacagtctgagctggtagaagaaagaaactgaccttgaagaagatcagtagagattatgtaatccaaaaaaaa

SEQ ID NO: 511035 - DNA, 944 bp, Homo sapiens
gggaaagatggcgtcccgcaatagaaggttaccggctctactgccaactcttccaggctcctaccgccgtggcgcatcacggaaaggcaagaggcaaatggcgggctcgggagattcagccgagaaggcaagtgcagatagatggccttgctggtattaaatgataactcaacacatccatcatggaagaagggacaatgggaactgacagttgtgcaaggagtgctccttgggtctggttgtcaaacgatcgcgcgttgaaatatatccaccctgctttcctttccctcagcatcgacagaggatgatgctgactttgaatgaaggtccaatatcagagtggaaatgatggcggagccttcgccatgtaaacattgatcatctacacgtgggctggtatcagtccacatactatggctcattcgttacccgggcactcctggactctcagtttagattaccagcatgccattgaagaatctgtcgtgtctcatttatgatcccataaaaactgcccaaggatctctctcactaagaggcatacagactgagtcctaaactgatggaagtgcgtaccgaaccggattgctcccctgaagccttgaaacacagcaatatcacctttgagtacatgtctgaagaagtgcgattgtataaaacttcgccttgatcatggtcctagtgctgggaacttgaaaagacgtccagccggtgcaaaatagcatgactgcgcatcctggccgcagaacccattggggagacctacgtgcaggaccgactggctacatgcccccaatctatcccaccatctgcaacctagccccccgacctatccggacccgaaatctccgacggaaaccccagggccacaaacaccgcgggcgtcaccaacggcctcgtcaacaagcactaaaaaccaccaccggcacaagtataccatacgc

SEQ ID NO: 511036 - DNA, 261 bp, Homo sapiens
  misc_feature (77)..(77): n is a, c, g, or t
  misc_feature (93)..(93): n is a, c, g, or t
  misc_feature (159)..(159): n is a, c, g, or t
gagaaaagggaacccttgtacactgttggtgggaatgtaaattagtacaaccactatggagaacagtgtccaaagtntccatcaacagctgantggacgaagaaaatgtggtacatatacacaatggtgtattcacccataaaaaagaatgagattcantcacttgcaacgacatggatggaactggagatcattattttaagtgaaataagccaggcacagaggtaaacttatgtcctcacttacttatgggagtttaaa

SEQ ID NO: 511037 - DNA, 125 bp, Homo sapiens
tggtgcggtggtgatagaggatcccgacaaaaggagggtcacaagcccagggaagcagtaaagtcaagaactagtgggtccagcactgaccggttctacgagggcagcaatttcctgctcagccg

SEQ ID NO: 511038 - DNA, 847 bp, Homo sapiens
ttttttttttcttcgttatcttcgtaaaaggtctggcggggggaatgcttggctaaatggaactggggtcctggactagcatttcattcctcaataattgtcaagggaggagggagagatggattgtattttcaataccatagcgggtgtgttggtagaatcggcccagaacgcggtaagacctaccgcggggataatccctgccacgaccactcgataagatagacacgtgcgcgggctttacaaactggacagggagcctgtgggccaccggaagtcttttctcttcgtgtgtcacaatctccacgggggggaagattcccctccttcgtttgtgattggtcctctcacgcgaaagatccggtcacgtgggtgccagggcgcggtctgctcatacaagctgtgcgggagtcaccctcgtctctcaacaaatcagggacagatagcgtgcgccgctctgccggatatctcgcatctgttagaatcccccttgatagactaagtgacgcaagccccctctcgcgcgtcaagggcaccgaatgggctggcgatctcagagtggtgcttccactgggctgaccgcgtgtgggggatagcacccttcttgatgtccgccactgggtgtctcctcgaagggcgcaggggccgcaatcccagcgtggtgtccctgttggtgttccgggaagccgggcgcccggcgtcggtttctccgggggccccctctgttcttcgaatcgtcgtcggctcgtgcacggcctctgccgggggtcctcccattaaccttttgctgggccccctgccccgagctgccgcgccacggccgtcagttgcgcttgctgtccccccg

SEQ ID NO: 511039 - DNA, 821 bp, Homo sapiens
cttgtttattgtgttcatgactggtgaatatagcgatgagaatgagaatgtttaatttgtagtttccgcgccgcccgttcactatcgcccggtcgactgacgttagagctctggttattatatgctgctctgctactttctctatggctatcggggtcgcatcacagcagtgacccaccccccgcccccccccttaagcattaaatattaaattttgatttgttagtgggtttatcgtggggaggggtgttgcgttcgcggttctgctgatgcttgccgcgcatggcactgatcttctgggttcctccaacattatatagttaaacacatcatttattgattgtttttatatttgtgaggtgccctcccaaccccccctctaggccccccgctctcgtatggcacggcgatccccagccaggcgcgagcgaagacagcgaataagtgcacgttaggtacgtgctcgtcggccgtcggatgtcgttctgagtgagttagttcacgtagacatcttgtgatccgtccgccaacttcgtcgaaacccaaaaacttattactatctactacgcatatcaagaatcgcatcagagcgtcctgatcaaacaccagcaacctcatcccccgcacatcgcacactacttctccacgcacaacaaatggccagtagatgtaaccgcgattaactctcgatggtcctattcgcgctctacagtgtttgcgttctatttcctgctgtttatctttcgcttcgggcgctgcacggtgtgacgtaagatacgttgtgccattgtcggcctcccctcttatagttcggattctcg

SEQ ID NO: 511040 - DNA, 658 bp, Homo sapiens
  misc_feature (574)..(574): n is a, c, g, or t
ttgtatttttagtagagacagggtttcaccatgttagccaggatggtctcgaactcctgacctcgtgatccgcccacctcggcctcccaaagtgctgggattacaggcgtgagccactgtgcccggccaatatgacctttttaagaaaaaaagaccgcagtccgtaaatataagggcataaagcaggaccataatcacatacatgctgactgtgtgttgagagcagtttctgaggcttactgccggcagggtcacagtgagaagggcctctaatttgggtggtgccttctggaaaccaagttggtatggatcacgtccatacaagacactgcaaactgggaccattgcttccactcctaagaagctgtctggcattctggtagacgctggttttcctccaccgttcctggctgacccttccaggagaggtcccacctaagccctgggggcaggaatgctgacatcaggaagcttccgtaaaatcccaagaggactgaggctcagggaacttctggacaggggaacacctggaggttcccagagggcggcaactagcgaggacatggaagcgccngcccctccccgtgcctctctctacgcttcttcattggtatcctttgcaatcaataccctttacaataaaccagtaaacgtcaaa

SEQ ID NO: 511041 - DNA, 703 bp, Homo sapiens
  misc_feature (693)..(694): n is a, c, g, or t
  misc_feature (699)..(699): n is a, c, g, or t
caggtgtccatatacgatgctctcactatagacataatcttccagtgcataggccatctggatggtaatcagcagagcttcgatcaggaggtcccaacatcactggatgtagcttggttgcttttttggagtaaagtcaaggggtcttttcctgatgccagcagtgtgtgcagaattcgctgtttcacttgctcccactcaaccaacattgactcccgatggtactcctcagccatgccgaaggtcctcttccgggactcttcgatggcagacagcagggcattgtccttctcattcttcaggaagccctgaatgtcagtgtccttcacaggctcaagaggctcaaaggtggtggctgcactcagactctccaatcgctgggagatgtgggatatgtcaagtccccgagacccgaggagaactgacgccttgacatctgccgtctcctgggacgtgcgtgttagggtacgggaacgcaggcgctctcccgcctgctggatctcctgtaagttccgttccacatggggaagctctgagatgccctcagtctcagcagcaagctgttcagcttgctgaaggagctcaccaaacccctcagtatccattggagatgcagatccttgtgctacagccgtctccgccgctcaggtgccggcttgaggacgcggccgccgcttctcgcgccgctctccnncgctncctg

SEQ ID NO: 511042 - DNA, 140 bp, Homo sapiens
  misc_feature (130)..(131): n is a, c, g, or t
  misc_feature (136)..(136): n is a, c, g, or t
cggcacgaggaaggacaagcccagggtcgcaaggacgcgaccagacacacccttaccttgtgctacagccgtctccgccgctcaggtgccggcttgaggacgcggccgccgcttctcgcgccgctctccnncgctncctg

SEQ ID NO: 511043 - DNA, 834 bp, Homo sapiens
tgtggcgccaggattgaaccgcgctgacgaagtgggtgatccatcttccgagtatcgccgggattcgaatcggatgatcatcccctctctagaggagctggactccctcaagtacagtgacctgcagaattagccaagagtctgggtctcggggccaacctgagggcagacaagtgtgtaaaagcctttgaagggttacattaaacatgaggcagaaaggaaatgagactcaggatgaaagtcaaattctgatcctctggtgatgagatgagatacagatcagcaaccaggaagaagctgagaagacagccattggccattgtcaccaaaacagggagacggtgcaagaactgtccgtgtggacccctgattcacaagaatcatggaacgcaggacaagccaggatctcagagctactgcaaaagttcccttctccaccagagagcaccaggaaagctgagaatgctgttccctcaggtaccagagattcacaggtaccttcagagggaaagaaatctctctacacagatgagtcatccaaacctggaaaaaataaaagaacgtgcaatcacttactccaaaatttaaggaaagcttcatagaagctcattttacgggaaattggcgtccattgctcaatcattttgtggggcgcacacaccggcaccttttcggccgaacacacttccttgaatgaactggagcccgcccatcaataaggggggggtccggacttccaggacttccaggagggacactctggggttaatcccatagccacaggtcgcaagcgggtttggccgagcaaaaccctggcggagggccccaaggcgg

SEQ ID NO: 511044 - DNA, 616 bp, Homo sapiens
  misc_feature (1)..(1): n is a, c, g, or t
naacagggccgtcggttggctcgctcggaaaacaagggaagttggtatttaccttcaaaagaccttggggtccccttccctcaccttgaaaaaagaaattgtctctcacacctaaaaatctcaagtgcatacacaaaaactcaaatacagcccatgacgggcagagcgctcaatgaaaggtgacagattagcaagaagcccaggagtcagacttatttccctatttaagaggtaaatcgattattagaatcagactctttttaaccttcaaagcaaaaatgaaaataggtaataactttctacccaggcgggccacctgctccccaactatacacagacaacctcgggtgctaagagtgtttaaacatgttcatcagattctcctaaagcagtaacagccaggcatgggctgagacagcattttggaatgtgtttgaaatggtgtaatcttccttagtgccctatctttattgagggagaaagagagagaaaactaattgagaagtaagaagtgagtgggcagtttggtagaagcagccacccatttgattttgaagattttaaggaaagaaagaagattttagatgaaaatgtatgactgcccccttcaatctcc

SEQ ID NO: 511045 - DNA, 734 bp, Homo sapiens
  misc_feature (263)..(263): n is a, c, g, or t
  misc_feature (277)..(277): n is a, c, g, or t
  misc_feature (279)..(279): n is a, c, g, or t
  misc_feature (296)..(296): n is a, c, g, or t
  misc_feature (299)..(300): n is a, c, g, or t
  misc_feature (305)..(305): n is a, c, g, or t
agcgggcttgtgcaagtaacctctggtcttacgtgtgtaactgagagaagagtgtgtgtttgtgtgtgcatgtgtgtttattgttcctaagaatttggcacaagtcagagataattgcctatactaagaatctatactgcagaatatagtgtatcaaaaacttttttcttttaaattattaaagtgtcttttatacttttatgaaatcattggtagccccccaagtgtttaataactggcattaagcttagagggtgaaaaanaaaaaaaagatggntngtattttcataatgaanaannctgangagatacgtgaatgaaaccaggccatagctgtcataaatcttggactttggaatatttacattcttcagtataatttttataatcctcaattatgaaccaccttgtttataggacaaaaaattttacccaattttattgaaccgaatttcactgtgctacacacgtgggtttggattcaaaccttgtgagaagttcgtagattccagatatatgattcctcctatgcgaaattaaccacttctctgtcacgtgactcggtggagtttggattcctctaaattctcagaatgattctttaggaattctataattcatagcaattttgtgacaagtaagattgccaaatagaaatttctataaagattccacagttgtgacattatggtgtgtatgcagattgtgacacatcggttcaatactttgaacga

SEQ ID NO: 511046 - DNA, 969 bp, Homo sapiens
  misc_feature (371)..(371): n is a, c, g, or t
  misc_feature (969)..(969): n is a, c, g, or t
agcgaagagggtccacttcattaaatggaatgagagtgaccaagctgtaacatttgcaggaaatgactttctatttatacgtaagtcagaaagaggaaaaagaaaacttaattcttaccctatttttgggtcccaactccctgagaagcgctgtagaaacagcctctgtgtgaactgttggagagtccgtacgaacacacacgccgttcctactacgcatgcgatgaagatcaaatcgccagacgatccggccccgacgctagtctgtcccagcaaggtcagatttccattgtcctgttgacaagaggggcagtgctcacgcgtgatctcaggaatgacgagagctttggagcccttgaacgatatagccnagaaatgggcgaaatggttcgaatttgtggaaagtccgtacacgtaggcttaccaccgaattcgaggaaacccgagtggaaggctccaacccctggcgtaaaagattacttagcgaaggaaggccatgggggacttggtttccccccacggccctagtgaacggccttggtccccaatattccccccaaagttataactacccagattgtggtcacccacaaagttgtggccgtgtagacagtgcccacaaggcttgggtctccccacagaagttgtagaaaactccccgaggcacagcggtaacacatatgagtcggccatttagggtttgccggagcgatttgcatgtgccgccaattttccgaaggttagcggtaatacggggcgcacccgttactggcaaatggggtcccctgctattaaccccggacgtagtgtaagcgccaataggagtggccaaaacccaaacttttttctgcgcaagacgatactccaagagggttatggaccgggggttatcccccgaaaggttgatgtgtgtcgccccacaacaattcgtcagatgtgagcaccccaatactccgaatgcttactcgn

SEQ ID NO: 511047 - DNA, 1068 bp, Homo sapiens
attcgttagcgacgcagagcgcagtcaggtcctgtgagacatggctctagtatctgtatgctaatgatgcatccctgggtgccagtgacgacgtcgcgtttgcgatatctacaacacgagatgccaacagcgcgccggggggccgactcgaggctgtagcgtcgaacgagattgccagaatggtagtctactggatggtcgatatgactgagatctcatggaacatgcgacgtacacctggacgtatcggatttcagaaagttagcgacttcgcgtcctgtggacgcgaattctacccttgtggtttgcatagggcccaaatttcggaggcaccttccattacggaatcgcaaaacgcatttaggaacaaagcaccttttaaccaagctgctgttgactccaccaagctctccacttgtgatccacagaatactattcgaatccttacgagacacttctggctagcgaccatctcggacccgggttacctacgactttgacctaactttcctaactccttttcgcctccccagtaacccttgacctacgcaatcaggattaccttcacactgcgtggctttaactaactttggcctctaggctaggctcactgtccgtcggtatctactccatcacacacttcccagaatagcgcttattgtggcaagacggttgccatcataccaacggagctcagaatcgccgaattggcgcgcacacagcttttgcgtatcgggcacgtaaactcgggctggagggcagatcaacacgctaagccaacacactaaaccgccatacttagtactctggaatctcgaccgatgtggagcgggaacactttaaggaaacacaaggacgctcttgcgcaatcacttgggggaaaacacgagtgtttgcagttaccacgcctgtatatttgacagccctacatagcggggcacccacaggcccattttcgggccccggaaacacttcctgatggaggaatagtggcccagagggcgtcttcaatctcataatgggcaaagtctttacgtatcgttggcctcgttcatagggacaatccat

SEQ ID NO: 511048 - DNA, 745 bp, Homo sapiens
tgagtcagctacttcacactggtcaaggcgtgttttaccccaaaactcagacaggactttctatgcatgttttgccctccctccccgcgcaattccccccgccccgatcaccgttatctcccatggacacacttgacgaagtagcttctttattccctagtggtgtacatttaagttttaacaagaggttgcacaggtatcatgctcggtggccgaacacgtgtattatggccgttctggtgtcagtcattttctctttcttcacaagtggtcactagagcgtgtctgaaatgccaaggttgacaaccctgataatcgttgatgcagatggcttctgtaggaataacttttagtatttatgtaaaaatgtttaaatttatgggatgctatatgtggtagtggtcgtcgttggtagttggtcatttgtcaatattcagtcagccaattcgtgctcacttcttgccatggataaaattgggtctttctggctaagttaagaaagacaattgtataaacatgggactttaagcaagccatagttaggttgttagttctgtaagtgcacatgggaaagcagaagacgtggtgatgaaggaactgtcatctaagcaaaagatcgagtatgatatgagtaaggctttctacattctaatttagctgtttccccccacttgcatgtgtttaaagggctaattatcaggtcaggaagcagtgagaactgatcacatggggttgtttcctaaca

SEQ ID NO: 511049 - DNA, 120 bp, Homo sapiens
tcttattgaggccacaggctctagtttctttatagagctctctatcttctcttttcagtaatgtgccagcttagatctggcctttgtaaaagagacttctcctattttgtcagctgatga

SEQ ID NO: 511050 - DNA, 104 bp, Homo sapiens
gtgccttgttctcttcatgggcctgctggtcatatgccatcagacaataagaagtaggtggagaaataggtatccatgctgaggtcctgacataaaaaggtcca

SEQ ID NO: 511051 - DNA, 886 bp, Homo sapiens
gtaatcccagcactttgggaggccgaggcatgtggatcacctgaggtcaggagtttgagaccagcctagacaacatggtgaaaccttgtctctatgaaaaatacaaaatttgctgggagtggtggtgcatgcctgtaatcccagctacttggaaggctgaggcaggagaatgtcttgaacctaggaggtggaggttgcagtgagctgagattgcaccattgcactccagcctgtgcaacaagagtgaaactccatttcaagaaaaaaaaaaaaaaaggaatttgccagctggaatgtttcccaggggtgtgagaaacattgcccatttaatgggaatcttaaatcaaaggtctaacgtcagatatttttattaccaattggacaacttggtggcacaactccctggtttctaatggaccaaaggacccgaggttacttaaagagggacttggaaccaagaaagtcagtggtctccacatgtgggatacacacttttccccctctgaaaattcaaaaggggtgtttcctcaccgggggtggcgccaaggtcacttaaccctctcaagaggatagatacctactataagggattcccccaggggtgagggccttaatgaaaaggcctgagttaatcccaggatgcttcatatagctgggggaaagttggcgtcctcaccagcaggtctcaggaaggtctaagccgcgcttagcaatccgaaatagaacttggtccaaaggtttgagccggaccgccaaaattatttcccaccctttaggaggtaaggcgacacgcggtgatcacaatcggaagtacaccatgcacggatgacgcgaggggacaggatacatacggaaatggggcaatccctctgtactatatgtatgc

SEQ ID NO: 511052 - DNA, 383 bp, Homo sapiens
  misc_feature (55)..(55): n is a, c, g, or t
  misc_feature (147)..(147): n is a, c, g, or t
  misc_feature (163)..(163): n is a, c, g, or t
  misc_feature (195)..(195): n is a, c, g, or t
  misc_feature (310)..(310): n is a, c, g, or t
agggccatcgtggcgtcagccgtgagctggcgtcacctgtgcagggccctctggntcagccatgagctggcctcacctgggttccccaccccgggctctcctgccctgccctcctgcccgccctgcctcctgcctgcgcagtccttncctaggcacctctgtnctgcgtcccaccagcctgagcaagacgccctntcggggcttgtgccgcactagcctccctctcctctgtccccatagctggttttttccaccaatcctcaacttaacagttactttacaaatttaaactcaaagcaagcttcttctncttcagcttgggggcagccatttggcttctgtcttcgttttttggggaaaccaaggtcaaggaaggccgttgc

SEQ ID NO: 511053 - DNA, 165 bp, Homo sapiens
cgaccatcacccaacattctagtgggtgggtgggaggtgagaccctctcctgccttgctcatgcctaactacctgtaacagattcagttcggccattttataatgtatgagcatgatctgtggtcccccaaaacaattacatggcacgcgacatcgccaggggat

SEQ ID NO: 511054 - DNA, 155 bp, Homo sapiens
aggcacctgtggagccatcctccttgttttaatcgtcctgctgctgctgccgttccgtgtcgcgtcgcccacatgaccctgaggtcgcaatgatgagtcctctctggtcagacaccgctggaaatgaataccaggcctgacctcaagcaaccatg

SEQ ID NO: 511055 - DNA, 560 bp, Homo sapiens
tgcacgagagcaaccaacacgtgattataaccctcactgtgaacccagcacacacgtgctcatatggagaggggaaaaaaagtgaaagggacttgggaaatattacaccggctggcacagtgtttgagaactatgtggcagatattgaggtggatggaaagccagtagaggtggctttgtgggacacaggtgtgcaggaagagaatgaacggctgagggcccttttctatccagataccgagggtatactcggggggttttccattgacaggcctgatatggttagaaaacattccaggtggaccccacaagtgaagcgattttgtgccaacggggccatatattctggttgggaatatagaaggagattcggaatgatgagcacacaaggcgggagctatcccagatgaagcacgaaccgcggaaacctcggaaaggcggagatatggcaaacaggaatggcgcttttgtgtacacggagtgtgtaacacagaccacaaatagagtgagagaggtttttgtggctaccagagatgctctgtaagctctacactgtggag

SEQ ID NO: 511056 - DNA, 330 bp, Homo sapiens
accgcacgtctgtctcatatcacgaacagcaaagcgacccgaaaggtggatacgtctgagaagctctcaacacacatgggcattgccagagaaccatattaaccacatggtaggatcaccagacttcaagaatttagggtcatcttccagctttttaccagaacggtgatcaatcttttccgttcagctcagcaaacttgcatgcaatgttgagccgtgtggcaatccactacaggggcatagccggcgcttatttggcctggtattggttcaggataatcacctgagcagtgcatccagctgcttccattggtgggtcagtaacataag

SEQ ID NO: 511057 - DNA, 699 bp, Homo sapiens
  misc_feature (448)..(448): n is a, c, g, or t
  misc_feature (469)..(469): n is a, c, g, or t
  misc_feature (661)..(661): n is a, c, g, or t
gcttatttggttacatgcccctttggctttcttagaaaagccgaaacgaaaggtctgttacctttgttagggcccaaaggttcttgattttgttctttaaaaaactaaatgtccttctttatacttccctggacatgaaaaaaaaagtatttgcgggggcaaagacagatggttgaacttcagggggtggcattttgtctccgtttccattgctggttttgggtaattttactgcaaagtggtattcagtggacatgaaatttttttcctaaaatgctcttgtttcgtccgaatggttatttttatattcatgaagaggattacacgtcaagctctaaggtacatgtggcaacatgcaggtgtgttacatatgtaatacacctaccaagtttgtgagggggaccccctaacttgacgtttagcgttacgtagatctcctaatggtatncctcccccctccccccacccnacaactggccccagtgtgtgatgttccccttcctgtgtccatgtgttctcattgttcaattcccacctatgcgagagaacatgcggtgtttggttttttgtccttgcgatagaggcattcagttagtaaagaggttggagcaacaactctttttttttttttttcacaattgtaatcgaacaggtaatgaanccatttgttaaaatatttgcctttttaagtaaaaaaga

SEQ ID NO: 511058 - DNA, 217 bp, Homo sapiens
cgttccttaaaacattttttaaattagctgaattaaatcccttctcataggccaggcattggttcgcctcgtgcttattattcccagcactttggaaggctgagactgaggttgaggctgaggccaggagtttcaagaccacccgtggttaacttcgcaagaccccacctattaaaaataaaaaattctttgtctagttaagtctaacgtctggtcc

SEQ ID NO: 511059 - DNA, 162 bp, Homo sapiens
cgccagccggtcgatcagcgggcgccactcatcggcgttgtccggatgcccgtgcagcatcagcacgacggggccgcgaccggcctccagcacccgggtcctcaccgacaattccggcatgtggaacctgtgttcttcaatcctggaagtaatttgaacctt

SEQ ID NO: 511060 - DNA, 692 bp, Homo sapiens
  misc_feature (441)..(441): n is a, c, g, or t
  misc_feature (462)..(462): n is a, c, g, or t
  misc_feature (654)..(654): n is a, c, g, or t
atttttggtggggaaggccactcgggattttaaaaaaaagaggaccacgcggccctgtttatttgtttgggctccgcgccaattcccgttgggtgtagaaattacaaaaagtcctttttgatggagaaccgttaaggatttttcggtattgggagacaaaggctgttgaatatacttggggggtgggattttgtcagggtacacattctgtattagaaaaattcctttaaagcgcgtatcaggcatacgtgattctgtgttcctaaaagcccgttggtaaaccttatagtggtaatttcttgcacctataaagccccacttcaagcctaagggtatttgtgagaacaccacaggtgtgtcccaaaagtaaacaagcctcatctttcttttcgggttccccctcaatatcgggagctgggcgcgagtgctcataaaagtatncctcccccctccccccacccnacaactggccccagtgtgtgatgttccccttcctgtgtccatgtgttctcattgttcaattcccacctatgcgagagaacatgcggtgtttggttttttgtccttgcgatagaggcattcagttagtaaagaggttggagcaacaactctttttttttttttttcacaattgtaatcgaacaggtaatgaanccatttgttaaaatatttgcctttttaagtaaaaaaga

SEQ ID NO: 511061 - DNA, 875 bp, Homo sapiens
ctgttgctggtctccgtccggtctgccggccgtctagtgtctccgtgccctccccagccgctcctgcgcccttgccctggcccctgccgccctgcagccctgtgctgctccctgcgtggcccctgccgaggtgcctgcctgcgccctgtgccagctgctgctgcccctgtggaacctggtgctgctgcctgactgctggccacctgcttcttgtctgtggctgttgctgttggttgcgcttcttgggcctgatgtgagtgactgtggccacttccctgtgcccctgatgtgctgcctgactgacttgctggcatgctgctgcctgtggatgccctgtgcatgtgccccctgcttcatgcctgcctgcccttcttggggctgctctgatgtgaggtgctgtgcctgctgggctgccctgctgctgctgactgtgcccctgtgccatgctgagtggcctgccgcttgcgatgccttgccttgttgcctgctgcctgactgccctgtgccctgcatcttggccgcctgccctagcctgtagtagtgcttcgccgtgtgccccccctgacgcctgcccctgatgctggtgtgaacctgctgcttgcgaggtggagatgtgctgcttgcgctgtgcaactctgcaccaaacccaaacggcgcgaccttgttgggacaactccattcgaccagacacgtgaacctcttgaatttgacctgccctgggaccccttgcattgtgcccagtgtgccagagtcatggcaacgctttgcatgtgttggacacggggaccaccgtgaattggacccgttacggacatcgaagtgaccttggaccggaactaaccaaggaatgctagcgctggcctcacatctgtcgg

SEQ ID NO: 511062 - DNA, 408 bp, Homo sapiens
tggtataagtatctgatcagattcatcaggccactcttggacaggatcctgctgaatatgatacactcactagatgcctttctgcatgcgctctattggctctattgttctgtgagatgttgtaagagctcaccatgacatagactcatgccatatatgtagtcagctctgttatatcattctcagccactgggcagtatcgcttccttctgacactatgctattcatatctgcgtctcatgatgtctgtagggtcatagagttctggtccactcatcgttggtctactcacagacgcctccagatgcgtaccatattagcgcgtcagttatcatcatcgacagcatgtatcagaagcccgcgagcgttctcgccatggttgtagagaactatcgtggagggtctccg

SEQ ID NO: 511063 - DNA, 230 bp, Homo sapiens
gccaggctcactcttactaaccctttcaagctctgtccaagcatttgctgcctccagaaggccttattgaagcttctaagtccccacatgggcacccccacacagtgctgccgcagagcaatgccctctaggagccccggtgttggtttatggttatgtctcgactcctctccccatttgtgagttcagttcccagcccaggcgcatgcccaataaatgtttgatgaccc

SEQ ID NO: 511064 - DNA, 300 bp, Homo sapiens
  misc_feature (283)..(283): n is a, c, g, or t
cacgaggaccgctgacgccgagcgcgatcagcagcaccgcggcgacgaacagccggcgcgccagcggcggcagacgcaccatctgagtcagttcgcgccgctcgccggcgatggtgagcacgagaaagccgacgccgccgcgggtcagcgcagcgaggtcgccgtgcagcatccacagcagcacgccgaccagccagcacgcggcaccgcccgcttcgaccagcagatgcagcgaccaggcgcgggtgacacccgcatatatatagagcgtgacgagaccggncgccgcggcggtccatc

SEQ ID NO: 511065 - DNA, 550 bp, Homo sapiens
tgaaatataatgatgaatatctggaaaaccaatgtgaatacgggatcaatagatagtaaaaagatccatttacataagattacctaagattagggcttataatatatgctagtatatcaagtttatcactaattactaacatcaatgtacaaataacatgtccaattttggttctgtaatccaaagggaaaattctaggctaaattctatccagggggggggagggggactagaaaataaaaaagtttcaaacagttccatgcaaacatcacattggtcaaatggaaaaactgccaccgggaccagaagtgcatacggctaaggtccttgtcattgaaacaagttctgtgcaagtacaattacatggctttacggttcagaatctaatataggcctgacaatcacgtccttatttccgggaggaaggcctcacgtccaataaatttccagtaacaatgtttttagaaatcaatttaataatagggggtttaatttccttcatgtatttgtgttaagcattctagtcttaagactagattagaagttagct

SEQ ID NO: 511066 - DNA, 707 bp, Homo sapiens
  misc_feature (67)..(67): n is a, c, g, or t
  misc_feature (291)..(291): n is a, c, g, or t
gggagtgtccgcaggtgacaggctcgcgaggaagatggcgtaccagatcttgtgctggacatgagangatacccctggatgatctcctcgatccgagaccagactaggagcacatactacccatctgtggcatgacagtccttcaacccatgcgtgcgtgcgagctcggaggctctgagaaggttgactctacattgctttctctcgatcgtggtacatctcgaactcgcgtgagattcaaatcgttatagaagcagctttacaaatttgatggactgagttcagactcancacatatcttcctgtgagttctaatgtcggagccgttgtgtcggagtgtgcacacttgtcttttagtgtcaaaagtattagaactatttatactactactacgtttacctgttcggaaccttgcctacgacgacgtacatgggacttctatctcctctgagggctcctgggatcacgcacaggcacccattaaaggatcattatggcactggtatacccctccttggggggcctgggcagttctccgtttcacagttgcaccctcgcatatatgggggggagatcctaggtggtagccttggaagccatttcagtggttttcccggtttgggtgcggcacaacgacccttgtataacataatatattgtctcgggtcctagtggtgcgtgtggatggccttaaaggtaactcatgg

SEQ ID NO: 511067 - DNA, 195 bp, Homo sapiens
  misc_feature (170)..(170): n is a, c, g, or t
ccccatctgtaccccccagcaggggccgagtcgctgcggacaacgtatgtaaatgggctcagcaatgccagctccctcaattccccatgtaacccccccaggactcaccaaaccccaggggctgtcctccaatccggaccatcttccagagctctccggatgcgcttgtnaacagcaagttactaggaaaccttc

SEQ ID NO: 511068 - DNA, 489 bp, Homo sapiens
  misc_feature (37)..(37): n is a, c, g, or t
  misc_feature (46)..(46): n is a, c, g, or t
  misc_feature (92)..(92): n is a, c, g, or t
  misc_feature (118)..(118): n is a, c, g, or t
  misc_feature (125)..(125): n is a, c, g, or t
  misc_feature (139)..(139): n is a, c, g, or t
  misc_feature (144)..(144): n is a, c, g, or t
  misc_feature (222)..(222): n is a, c, g, or t
  misc_feature (239)..(239): n is a, c, g, or t
  misc_feature (252)..(252): n is a, c, g, or t
  misc_feature (341)..(341): n is a, c, g, or t
  misc_feature (366)..(366): n is a, c, g, or t
  misc_feature (411)..(411): n is a, c, g, or t
  misc_feature (424)..(424): n is a, c, g, or t
gggccaatgggtgggacctttccatgagattttgganaattgggtnacctgacccctgcttttttgaaaaatgtttccggggggcagccacntggccaatgtgcatttttgcacatgntggaacntttccatgggggtntgggntattggctggagccaggacatgagtcaggggcaccatggacctcacgtgccagggagacttgaatgtggctgtcactnttccggacgccaagggntgcaggaggctgnttttggcactacccaccccgtgtgacagaataggagccagcgattcaggactgctcacgggtcaggagggcaacgcctgaagtcagacntccctataggtcaacagggacaacntggggatttttggagcagggccttcttttttcaggtttggcccantcccccagacacntggacacgtggccacaaatttgggacaagggcccccgcacagcatgaaataaaaagtgcctgagg

SEQ ID NO: 511069 - DNA, 148 bp, Homo sapiens
ggggggggtttttcccccttttttggggggaaagggggttccttgggcccaaaaaatttttgggaaatttttttttaaatccccccttgggcccattgggtttattttggggtggggttgttttttaaaaaaagggggggggttttta

SEQ ID NO: 511070 - DNA, 312 bp, Homo sapiens
gtcgacccacgcgtccgaggacgcgtgggcccatgcccaaggtcaacaacaaagaatcatagcagcactttgggaggctgaggcaggcagatcacctgaggtcaggagttcaagaccggcctggccaacatagtgaaaccccatctctactaaaaatacaaaaattagctggctgtggggctcacgcctataatctcagcttctggggaggctgaggcaggagaattgcttgaacctgggaggtggaggttgcagtgagccgatatcgcaccactgcattccagcctgggtgacagagcaagacactgtctc

SEQ ID NO: 511071 - DNA, 421 bp, Homo sapiens
tgaagattgttactgtctacaatatcagttaccacacccagcacaaaggtcgccttaagtacagaggctccagtctgcatcctttcaggaaggtgcctgcaagagaaggacaaggtgtggctgttgcgggatcagaagcgctagatgaaactccgcaagctgtgtcaagcgcctgcagaacaacgacacgcgcaggatgccaggcctcacgtgcttcacccacgacaaccagcactggcagacggcgcctttctggacacctgatgcatgcagtgaacacactggacagggatgtcctcaaacagctacacgtacagctcatggagctgaggagctgaaagggttacaagcagtgtaacccccggagtcgaaacatggacctgggacttaaagatggaggacgctatgagcaatacagggg

SEQ ID NO: 511072 - DNA, 1553 bp, Homo sapiens
  misc_feature (326)..(326): n is a, c, g, or t
  misc_feature (369)..(369): n is a, c, g, or t
  misc_feature (400)..(400): n is a, c, g, or t
  misc_feature (434)..(434): n is a, c, g, or t
  misc_feature (493)..(493): n is a, c, g, or t
  misc_feature (527)..(527): n is a, c, g, or t
  misc_feature (558)..(558): n is a, c, g, or t
  misc_feature (568)..(568): n is a, c, g, or t
  misc_feature (963)..(963): n is a, c, g, or t
  misc_feature (1053)..(1053): n is a, c, g, or t
  misc_feature (1550)..(1550): n is a, c, g, or t
accattccgctctgtactctaacactctccgcctgctcattacttcatagctgactcctagccctgatatattcaatgctgagtaagagcgtcaaataattccacgtgacaacacttattaattcacagatatactatctcacctactacttatactcacattgtcccataacgaatgctgctcaatctaagtaatcattctacaacgccagacgaaccgacatccatttatttcctattccacatcattcgtaatacctcacttcatatacataccactaactttgcgcggtatacatgcaacccaatatgaccagcataactangccacaatacaacgtacctgcaaccagtcaagagtaacattcntatatcgctactattctaccaactacataantatagggatcctcgtctcccccctatctctcccntctcgtgccgtatcctctataaagcgtctacccacaaggccatacgcgctcatgataanatccgtgtcctatgctatctctctatctcatcantgtagcacacaaaggaatacgtactccacantctctcatgnacgactaataccacaacattttacaatcatgcgcacctccagacttataaaccagttaaaatgacgcccttttcttttcacttatcgatcataccatgcattcaaaccattcttttaatacgcgagtacattcacgaccatgtgactaggatcttgcacgcgttagggaagtcctcacaaatgcctaagaaaacgccaggccctaattgccggaatggagtgctctaaagtcaaggttacaccttcttcgtcccagataatggatcccctaacttattgaagggacttgcaagagtcagagtccatgcctcgggtttctataaactgggctgaccccaataccaccattataccaattacattccaatattcgctctcataggatttaaaaccantaattcttatattagttttatatcccctcataattccatttgattccggttaatttcccttatagtaacggccaatacattttaaataanctcccaagggtgctcccaattgtatggccttaaggaaaataaattcatgaggaccttcttggaatatagcaacggcctatgtcgattttggtctttttcaccccctgttaaatttctaagtcccaccgggttggattatcccacaagggagggcgtcttgtgtacaccacgccataaagagggggtattcggcgcgccaggggtgcccatattatgagacacccccggagaaaaaaccttcggttcaaaaatttccgcccgcaaaaatgccaccaaaaaacggcggttaaccacggggttattaacaacccttccgggagcgccgcccaaaccacccccccatttttagggggctagaaaacacaccgattggggttttaacccacccccacccccacctgggaaaagcgggagggacacaccactcctattattcttactgaaaaacaaacaacacacagggcaccgggcgccccagccacccgacacaccctacncac

SEQ ID NO: 511073 - DNA, 264 bp, Homo sapiens
  misc_feature (11)..(12): n is a, c, g, or t
  misc_feature (51)..(51): n is a, c, g, or t
  misc_feature (66)..(66): n is a, c, g, or t
  misc_feature (92)..(92): n is a, c, g, or t
  misc_feature (131)..(131): n is a, c, g, or t
  misc_feature (134)..(134): n is a, c, g, or t
  misc_feature (161)..(161): n is a, c, g, or t
  misc_feature (172)..(172): n is a, c, g, or t
  misc_feature (177)..(177): n is a, c, g, or t
  misc_feature (183)..(183): n is a, c, g, or t
  misc_feature (233)..(233): n is a, c, g, or t
gcgtccctgtnnaatgtgcacgacattaggcattgagacttcaagcttttnttttctgaccacgtntctttgggtctttgaaaaagaaaagnatccctgtaaattgtaagcacttttagggggcgggtggngangggtgctctgctggtcttcaattaccnagaattctccnaaacnattttntgccggatgattgtacagaatcattgcttatgacatgatcgctttctacnctgtattacataaataacttaaataaaatta

SEQ ID NO: 511074 - DNA, 413 bp, Homo sapiens
cataggcacctgattaaatcaagcaggtggtgataaggaagtacctaaatgcagctttctgtgcagctagatctggtctaacggtagaaaaatcaaggtggcttctccaatgaagtaagttcaaaaaaacagaatagcacaagagaaatgcattcttccaaactgatggtgccagtcaaagacaacccagatgcagacagagacttcgatgctaagagcagtgccggatgatgaaatagacgcaccctcagcattgcacctgctagacagggaacgggtcatagagacccctgagactgacttctatgcacctcaggagtgaaaaccactctcggacacctagtgaaaaacgaggacacagttccaggccccacacgacaggctcaggaacgtcgagagtacatgagaaaagg

SEQ ID NO: 511075 - DNA, 206 bp, Homo sapiens
aaggctactatgggtgtcaattcgtactctctctacaaggttctctcctagtgtccaaagagctgttcctcttatggactaacagttaaatttacaaggggatctaacagggttacagtgggctaatttagaagttgaactaagattctatctatggacacatccagctatcaccatggctcggatcagtttcgtcgcctactacc

SEQ ID NO: 511076 - DNA, 150 bp, Homo sapiens
  misc_feature (145)..(145): n is a, c, g, or t
ctgtgtcaggccaggactggctccctcggcttgcacccctgtcctcctccccttgcctgcctctcagtgatttcacactttgggcctgcctgactagccagacagaactgctttcctaagtggggtgtatcttgttttgcaccanatgat

SEQ ID NO: 511077 - DNA, 261 bp, Homo sapiens
  misc_feature (14)..(14): n is a, c, g, or t
  misc_feature (42)..(42): n is a, c, g, or t
  misc_feature (90)..(90): n is a, c, g, or t
  misc_feature (179)..(179): n is a, c, g, or t
tgtggctcaacagnaatgatcttgaaaagaacaaaggtggangacttacacttaacataacccttatgtggaagaggcacccagagcgtnactcccttgcaccttctatgctctcttgcggcttagagctcatgactcaggcaaacctggaagcagtggaggtgccaccttcccagagncccaagctgtgatgctagtgacaacagtaatactggcaacagcaaagcaacatgcccccaaggacacaaacagcaaggaggg

SEQ ID NO: 511078 - DNA, 642 bp, Homo sapiens
  misc_feature (604)..(604): n is a, c, g, or t
  misc_feature (627)..(627): n is a, c, g, or t
  misc_feature (629)..(629): n is a, c, g, or t
  misc_feature (642)..(642): n is a, c, g, or t
tatagccatctcatggtgatgaattccatcatggtgattaattccatcagctttcttttgtctgggaaagacattgtttctccttcatttatgaaggataactttcctaatccttggttggtagtctttttctttcagcgctttgagtatatcatcccgttctctcctggcctgtaaggtttctgctgagaaatccattgttagtctgatgggtttcctttataagtgactagatgcttttcccttgctgtttttagaactctctctgtctttgacttttgacagtttgagtatagtttgtcatggagcctttttttttttggttttgagacagagtctcattctgtcactcagcctggagtacagtggcgcaatctcagctcactgcagcctctgcctcccaagttcaagcgattctcccacctcagcctcctgagtagtagctgggattacaggtgtgtgttaccacacccatctaatttttgtatttttaatagagacagggtttcaccatgttggccagtctggtctcgaactcctgacctcaggtgatccaccttgctcggccttccaaagtgcttggattacaggcatgagccaccgnaccgggccagaggaccttttttngnatctactggtgcn

SEQ ID NO: 511079 - DNA, 533 bp, Homo sapiens
aaagtatctagtacagtctttaaaggagtctacgctctgtcgcttgggatggagtgcagagggcgatctctgcatcactgcaagctccacctgaccgggttacaaaacattctcctgcctcagactcctgagatagctggagacatgcacggtgcgtgcccaccacaaacatgaccaccacaacctaggcctaactttaccgtattacagatacgaagaatggggataacacacagagctagacccaagcgatggctctcagaatcgtcactgaccctcactgatccaacaccagcaactcagagacatcaacaaaaaggagccggaggattcacactggccggtagcagccaaaccggtggcccaaggccgtatactcataccgataaagcataggagcctagaagtcagccgatgagaagactggaccgtacgagagcgaccagaaaagaacaaacgccaccagggcgcagcacaaccacacacaagaacatcatatcacaaaaacaggagaaaggaaacgagcacagcca

SEQ ID NO: 511080 - DNA, 402 bp, Homo sapiens
tgtgtattctagttttgtcaaagctgtatgaaatgatgatgtgggacagagaaatggcttggttaggtggttttatttgtattggattagtatgccaagtgataagatggtatatttggtactgtatttccctctgattttgatcctagtctcatgctgcagagggtactttaatatatactctttccatcaaatagaaccactatgaagctacctcaaacttccagtcaggtagttgcaattgaattaaattaggaataaataaaaatggatactggtgcagtcattatgagaggcaatgattgttaatttacagctttcatgattagcaagttacagtgatgctgtgctatgaattttcacgtaattgtgaaaaagttaaacattgaagtaatgaatttt

SEQ ID NO: 511081 - DNA, 294 bp, Homo sapiens
tacccgtcctctgatccagttgtcatttcagccatgttcacagcatttttaggggcagattcaatctcaagaaacgactttctttgctcatccctaagaagcaactcctcatccatttcaagtttgatcatgagattgcagcaattcagttacatcttcaggctccactactagttctcttgttctttttttttttttttttaagggaagggtctaacctttgctgcccaggctgcactgaaggggcacaatcacggtttaccagctcactaaagcctaaatttttggggctaa

SEQ ID NO: 511082 - DNA, 323 bp, Homo sapiens
  misc_feature (15)..(15): n is a, c, g, or t
  misc_feature (105)..(105): n is a, c, g, or t
  misc_feature (145)..(146): n is a, c, g, or t
  misc_feature (149)..(149): n is a, c, g, or t
  misc_feature (182)..(182): n is a, c, g, or t
  misc_feature (184)..(184): n is a, c, g, or t
  misc_feature (190)..(191): n is a, c, g, or t
  misc_feature (193)..(193): n is a, c, g, or t
cagtcaatatgatgnacattgtacattaaaaaacacaaacaacaacttaaagccaaatatctatagtaaaccaaggaaaattctgatatggaatggtttgactanaagcaaagaataaggcacctgctatgaatttagcacaacnnatnaaacagaattagttaaccaagacacttgtttcnanaagggnnanaagtacagagactgattaactgggtgagtaaggcaagtatactatttatgttttatacctgctggcctaaggtctgttgattcattcctagtccagaatagtgaagttcctgaagtccttgccctctgct

SEQ ID NO: 511083 - DNA, 768 bp, Homo sapiens
ggcgggccctgcgactccaagatgaaacccgaacgtctcaagttacgtggcgccatgtgctggccgtctggggcctgggtgccaaggtgattttactatcccagaggaagccggtcttgacttcgggggtccagggttcctcgcagatatctccgcactggaagttcagctagccagcaaatccactggtgatagaagggacgaaacgactcctcgaggcatccgcgttgtactacacagccaagctgacggcgcttcaacgcggggatcatggagctgggactggtagtacacggccaggtgatggccatgccaccacgggagaccgccttcatcctcactggctactgcgacggacaagtgcacgccagctggcactgcctccctccgggatccacatcttcgcctctcagatccacacacacctgactggtgagaaaggtggtcacagtgctggtccgggacggccgggagtgggagatcgtgaaccaggacaatcactacagccctcacttccaggagatccgcatgttgacacgacggtcgtgtcggtcatccgggagatgtgctcatcagtctcctgcacgtacaacccagaagaccgggagctgggcacagtggggggcttcgggatcctggaggagatgtgtgtcaataacgtggcatactaggccgttgaagcagatggagctctgaaagagacgctgtggaacgcacgggttcctgcagaagtacttcagctaatcaaaaggtatcaaaaagaggatg

SEQ ID NO: 511084 - DNA, 147 bp, Homo sapiens
  misc_feature (88)..(88): n is a, c, g, or t
tatagacaggtgtgtgcctctccaattcatgtcaaatccattgattgtacaccaggtggactccaatcaagtagtcaaaacatctcanggatgatcactggaacaggatgcactgagatcaatttgagtctcatagcaacggtcaga

SEQ ID NO: 511085 - DNA, 362 bp, Homo sapiens
aacttttgctgcccccttttactgttggtgaagggccgttgttaatggaagtttacgttttaaaactcagatgactcagaaacccgactgtggtccttttttgcagcagccaaaagacttattttggcagcatctcggtttggggcttttgaaaaaaaaggatgaagctgatttgttgaaacaactactttccccactcggaggcaaaagggggtgataaaaaataaccttccccccccctttcattttgtgacccccaaagatcacgtttgggtgttttgggtgagttttttattattgtttgttttaaatgattaaataaaaccccattaaatgtcaggatagcctctcttgcaaagtga

SEQ ID NO: 511086 - DNA, 493 bp, Homo sapiens
  misc_feature (5)..(5): n is a, c, g, or t
  misc_feature (29)..(29): n is a, c, g, or t
  misc_feature (75)..(75): n is a, c, g, or t
  misc_feature (139)..(139): n is a, c, g, or t
  misc_feature (157)..(157): n is a, c, g, or t
  misc_feature (211)..(211): n is a, c, g, or t
  misc_feature (222)..(222): n is a, c, g, or t
  misc_feature (247)..(247): n is a, c, g, or t
  misc_feature (343)..(343): n is a, c, g, or t
  misc_feature (413)..(413): n is a, c, g, or t
  misc_feature (460)..(460): n is a, c, g, or t
tgggncgccccgatttccccaagcctggngcctcgttacagggagtccaacaccgccggcaacgacgttttccanaagttctccgcgttcatcaagaacccggtgcccgcgcaggacgaagccctgtaccagcaagctntgcgcgccctcgccaggntggacagctacctgcgcgcgcccctggagcacgagcttggcgggggagccgcantgcgcgagtcncgccgccgcttcctggacggcgacnaggtcacgctggccgactgcagcctcctgcccaagctgcacatcgtcgacacggtgtgcgcgcacttccccaggcgcccatccccgcggagctttngtacgccgctacctggacagcgcgatgcaggagaaagagttcaaatacacgtgtcgcacagcgccgagantccgctggtaccggcccgccgtgcaccccctagcgccccaccccgcntctgtcgcccaataaaggcatctttgtcgggat

SEQ ID NO: 511087 - DNA, 159 bp, Homo sapiens
gaatggtgagtccattcactgcacacacacctgttacaagactgtagaaattatacaagataaaaataatggtaccctaggatggtagagcaaggatggagcacagtgtattaatttaagaattcgagagttcatgattggatgaagccacgatcggaa

SEQ ID NO: 511088 - DNA, 621 bp, Homo sapiens
tggtatttgaaaacattttaaataaataatgtgacaaaataactttcctgattatgggatttccagtatgcaaaattatggctaaaaataaggggctctcttacatgaacataatgaaaactttaatcacaatgggaattggtccccttaagtactggcaccgcctttcctatgggaacttttccaaattatctaaatggaacaatggtttgggttttgggtgaacaccagcctttttttttggtgggtccagttttggttggcgctatggtttcccactgggggtcagacctgatactttattcttatccttatagattaatttgtcctatttttttccttccaatatagccaccatatttataaatatccaatggtattattcctaataaatatggaccaaaaagggatcctatagaatatctatctaagtccaggagggcatctattgtggtccatttggaacagcaatgtaatggcctcttattaagagtattctacagggaacattcttggtagtgtttccgactattggcgccacaacaaatcttaaaacctccttttttttccttataagtcccagagaaactgttaagacccatttgggtccatgggccccac

SEQ ID NO: 511089 - DNA, 155 bp, Homo sapiens
aaaacccccccccccccgagggggcccccccccccaggggttggggccccccccctccggtttggcccccggggttgtttttccccaaaaaaacagggggggccctttttggttttccccccaaacccctttttaaaaaccccttttttttttta

SEQ ID NO: 511090 - DNA, 183 bp, Homo sapiens
ccccccttttttttaaaaaaaaaacaaaaaagttacccctttgtgggggttcatccctgtaactccagctactcaggggggtgaggcaaaaaaattgctttaacctggatggttgaggttccagtaacccgggccccccccattgccccccagcctgggcaacaaaaaccaaattgggtttta

SEQ ID NO: 511091 - DNA, 848 bp, Homo sapiens
  misc_feature (848)..(848): n is a, c, g, or t
atattacctgagtttgaaatggatgaagacagttgctaccattaaaggaccaaattgttatgctaccactaaacaaaaatacccactcaggtctgtgttaaattgtatgtcttatgttaaatggtatttagacggattcaagcataagctttgatacagagggctgagacacgtctcaggaagtcctgtaatgtgggcataactctttggacctgatcttgatgcttctgctgctcgtgttagcctctgtaagagcaatatctaagttggattattcactgtacatttgtattaaagaggctttaatagtgcctcaggggtcccctgaaagctaattttctatttctgggattccctggattcacttatatgagatggtgacatgattagaggaattgctatatgtctaggttatgaaacattgtccctttgcttcttcagtacttgcctccttgctgggccattgaattaagcacagggacgagaatttggttactgttgttatttctaactctcccaataaaacccctgttgcccagtgattgtgttgttggtgcgacttgtaactcgacgctgagggaaacacacatgagcttattcaagctagcgatatttatctatgaggcttgtgagcagtacactgaattgtactgtgccaggtatatggaagatgctctggggggtgtattgtatcctgcccagtttggcttcatgtctgaattgagttttctttatcttgatgttggtttcccttcatatgacgtcgaggtttagatttgtgaaggaaataacatgatggagataaaaatcttgaaaggaaaaaggggatttaaatccgggggaaaggn

SEQ ID NO: 511092 - DNA, 733 bp, Homo sapiens
  misc_feature (70)..(70): n is a, c, g, or t
ggaactcccccacccagtatcttattccgccaggggctcggcgcggcgggcagcgcgctgggaggacaanccctcctccccccccacacaaaattttttatccgcccgccccggcgcgccccccccacccccctcacacacaacggccacggctgacccccacctaacccactcaccccccccacccctcccgccgagccccaaccacccccccaccacacaacaacaactcaccggacccaacccccaccccccacccgcccacgccaacacccgcgctaccctccacaccccgacccaacacgccacaccacacacaccacaccgagaccacgacccacgcaagccacgccgaccggccacaccaccaactccaaacaacatccaccccgcactgaccgcaacgcccactaccccccagcccccaaccggcgcaccccatacccacgccagacgcacaccacccctaccagcccacgcctcacacccgctcccccaccgcaacccaacccccaccacggcgccacacgccaccgaccgctcccccacccacacgcaacgatacccccaccccacccgatcccccgcccgcacgccgccgcaccgtacacccactcccacacaaaccccacccacaatccacccaccgccgcacacccacaccccacgagaccccacaacacaacccacgccgaccgcccacgactgccaccgtcacaaagcccggcacccg

SEQ ID NO: 511093 - DNA, 162 bp, Homo sapiens
gaggcattccagacacagacactctgctctttaattcacagaactgctgaaagaagtagacatttctatctaaaagtagaaaaaaaggttcgtatagaaggtatttctgttatacaagatatattacacagcttgagggtagtaacagagtccgacaaagct

SEQ ID NO: 511094 - DNA, 910 bp, Homo sapiens
gtattagtctgttttcatgctgctgataaagacatacctgagactggtcaatttacaaaagaaggaggtttatggactcacagttccatgtggctggggagaccacacaatcatggcgaaagatgaaaggcaaggaggagcaagtcacgtcttacatggatggcagcaggcaaagtgagagcttgtgcagggaaactctcatttttaaaaccatcagatctcgtgagactcattcactatcatgagaacagcacacagaaagacctgcccccataattcagtcaccttccactgggttcctcccacaacacatgagaattctgggagtaacaactcaagatgagattgggtggggacacagccaaaccatgccgactttgaaacacagaacttttttaatgaaattgaactgatctattttttgttatgtgcttgagctttttggtgactgctatggtttgaaatatgttcccacaaaaattcatgttggaatgcttatattcctgtatggtgggactgtaacaaccgtacatctagtatggacacacaatatggtgattcctcacgaaattagaaaacagaattaccctatgatccagcatttcaactttctgggtggaataccaaaataatcgcaagcagggtctcaacgagatcttctgtacccccgtgtcatagcagcattagcacatagcaaagggcatatttagcttcatgaggtgatgggaaacaaattgctttctattcgggaatttcggtccacaggagaatggtttggctataattgttacacggtgctggtatggaggagaagcgtgaaacaagggttcataaaagcacaaatcaaaaaaagggcacggcaagggagctacatccaaagagaggggaaaaacaaggaggtggaactcca

SEQ ID NO: 511095 - DNA, 233 bp, Homo sapiens
gggacgtgagcgtgatcgggaaagagacagagaccgtgaccgagcgcgcgagcgagaacgagatcgggcaccgagacgacgcgagcggacccgaagtagagagtcatgacggacacgaagagaccacagctcctttgagacgccacaagtagatgctgagcccactggacgttgccacaggaccagagtctaccaaggagatagatcaagtccatcaatgaaaagtttgctgg

SEQ ID NO: 511096 - DNA, 142 bp, Homo sapiens
tgctcagatcaagatggtctctccatattccgctggagttgcgcacggtgcatcggactctcgtgctgtctctacggagggaccagcgtaacgcggcaagtaaatgcttgatggaggtacccggcagcagttccacttagtg

SEQ ID NO: 511097 - DNA, 102 bp, Homo sapiens
gtccctatcgatatttcgaaaatttaagacgtcgtatctcgtttttacagcacgccctgcattactcaattcgcagagactgcctgactcgacaactatgaa

SEQ ID NO: 511098 - DNA, 164 bp, Homo sapiens
atgtgtgtatatatgctgtgtatatatagtatgtgtatatatagtatgtgtacatagtgggtatatttgtatgtgtgtatatatatttatgtaacaaacctgcatgttctgcacatgtatcccagaacttaaagtataatgatatatgtgtgtatatgtgtgtg

SEQ ID NO: 511099 - DNA, 463 bp, Homo sapiens
cccctgaaacctggttttgttgttattcccattcccccccccacttttcaaaggggggatgtccccctttttttttgccggggtgctgtgccccagagtttcccactgccactgcaggcccccagtgggaaaacagtttcagctcgggggggccttcctttcccccagctttttaaaatcctccattctaacaagggccccctgcgggtaaaagtgggcctccccttcggccccttttccccgtcggggcaggagattttttaggtgaaccacttgcctgtgggattgtggcaggaactgtttcccctcccagccttaaatttttctgtgttcccaacccccggggggccccacagctttgaaccttccccttaggggttcccgcaggggggggtttgggtttgccctgcaaaaaatgggggcccgccccctttttcccccaataaagccccattaagcctta

SEQ ID NO: 511100 - DNA, 331 bp, Homo sapiens
cctggcatggcggtactggcaggccaccggcagcccggagcatctgaacggtgcggtccaccaggggtgcatacgcattatcgacgtctggagcctggagcaggatcatgcgcggtctacctaccgccatgtgcgccccgccgagccgtccgacaccctcggccgcgacggttcgggcactccggtgggacacaccgggatgacctggagcgggttccgcccttccgacgacgcctgccgctacggctacaacattccggctcagttcatggcgatgcgtgccctgcgtcaaattcgcgagttctgtcgcgtctgggatgacgaggctctt

SEQ ID NO: 511101 - DNA, 687 bp, Homo sapiens
agtggggttaggcccttccagccagccccaggtctttttatttgttcaaaaaaaagtaaacagggtccttagttcccccacgcagtaaaccgggccctttgcccctgaaatttttaccaccccaaagtaaataccccatgctttataaaggttaggtttaagggcaactttgggcttattgctccagttttatccccccctaattgccaacaagaaaatttgtccttcaacatggcttaagaaattaccctttccattcaaagtgggagatatttctttataaggacctgtcttcacaaaaagaaaagcagcaggtcaggagcagttgaaagagaatagaggtccctgaaccagaaatgcttccttctaattttgactctaacttttgaaagctaaaggtacatgtaggccgggcgtggtggctcacgcctgtaatcccagaactttggaagcctgaggcgggtggatcacgagctcaggaatgtaagaccagcttggctatcagagtgaaaccccatctctactaaaaacacaaagaaatctagctaggcatggtggcaggctcctgtagtcccagctactcggaagaataaggcaggagaatcgcttgaatctgggagacagaggttgcagtgacctgagataaagccattgcactccagcatgggtggcacagtgcgactctgt

SEQ ID NO: 511102 - DNA, 244 bp, Homo sapiens
gtgtcagctcagaaatgtagtgcttcattcttgtatccaggtggatagatttaagtcatgtgatccagaataatctctcagagaatgatatgccccatagaaggagacacggtccatgccatcatcagcaagtatgttaaatgacaggtacaagtattccaggcctggttccatgtgggcaaacacatagccaggcatccgttcaatctggttcccaaggagtactaggtgcagcaaggacttg

SEQ ID NO: 511103 - DNA, 234 bp, Homo sapiens
atcctactaatgcgtgagacagtaatctacattgggtcaacagatttcagctcatagtcggaagctggaccctcaaatgagccgaatatctatgtaaatggatgcggacttcccctaattcagaagtgtacgctgcggaaggatgaaagcccttcatttgggaaatgaaaatttccacggaaatttggccatttgaaccaggcttcccacagttaggaacaactcaaaaaccat

SEQ ID NO: 511104 - DNA, 779 bp, Homo sapiens
  misc_feature (12)..(12): n is a, c, g, or t
  misc_feature (111)..(111): n is a, c, g, or t
  misc_feature (171)..(171): n is a, c, g, or t
  misc_feature (173)..(173): n is a, c, g, or t
  misc_feature (178)..(178): n is a, c, g, or t
  misc_feature (188)..(188): n is a, c, g, or t
  misc_feature (194)..(194): n is a, c, g, or t
  misc_feature (199)..(199): n is a, c, g, or t
  misc_feature (207)..(207): n is a, c, g, or t
  misc_feature (217)..(217): n is a, c, g, or t
  misc_feature (233)..(234): n is a, c, g, or t
  misc_feature (257)..(257): n is a, c, g, or t
  misc_feature (260)..(260): n is a, c, g, or t
  misc_feature (264)..(264): n is a, c, g, or t
  misc_feature (267)..(268): n is a, c, g, or t
  misc_feature (303)..(303): n is a, c, g, or t
  misc_feature (307)..(307): n is a, c, g, or t
  misc_feature (319)..(321): n is a, c, g, or t
  misc_feature (359)..(360): n is a, c, g, or t
  misc_feature (365)..(365): n is a, c, g, or t
  misc_feature (374)..(374): n is a, c, g, or t
  misc_feature (400)..(400): n is a, c, g, or t
  misc_feature (408)..(408): n is a, c, g, or t
  misc_feature (432)..(432): n is a, c, g, or t
  misc_feature (440)..(440): n is a, c, g, or t
  misc_feature (538)..(538): n is a, c, g, or t
  misc_feature (557)..(557): n is a, c, g, or t
  misc_feature (564)..(564): n is a, c, g, or t
  misc_feature (591)..(592): n is a, c, g, or t
  misc_feature (601)..(601): n is a, c, g, or t
  misc_feature (618)..(618): n is a, c, g, or t
  misc_feature (625)..(625): n is a, c, g, or t
  misc_feature (645)..(645): n is a, c, g, or t
  misc_feature (649)..(649): n is a, c, g, or t
  misc_feature (654)..(654): n is a, c, g, or t
  misc_feature (660)..(660): n is a, c, g, or t
  misc_feature (664)..(665): n is a, c, g, or t
  misc_feature (691)..(691): n is a, c, g, or t
  misc_feature (693)..(693): n is a, c, g, or t
  misc_feature (701)..(701): n is a, c, g, or t
  misc_feature (777)..(777): n is a, c, g, or t
caagtcatatcngcctggtaccagctaaatttaatgaagataagttccactgaattcctaaggaaaatacaacaattccgacaccatttaataattagaaactttcaaacncgagggaaagtatgaacatcataataaatgcctcaatttggaggcaaagaaatgtaagtngngtgcngaaacccgangtatcncagancatcagtngtcccttccngtcgtggatgccttanncccaaggccttacactgttatcnccncccngcnnccctgatggggggtgccatctattgcctgcctganattnaattacacaatnnncccccccgccgggcagcggaccagagagtcataaaacnntttancttcttggngccaatcatacaatcaaacccgacanccctgccngggggggggccagtgccggggggngaattttntatcacactacatcaatagcaaagtcagaggaatcaattttccatcttgtaacactacatcaaaatagcaaattcacagtgccttccaaaggcccccnactaagaaaaataacagtnaagaggnacacagtattacttcatttacaatttnntagctcttncagtgtttcagaggganacagggnttcaacgatctaacatgaangggntagangggggncttnnaacatagcaaacatacatcttgattnantcagcccnctgcgagcacagatcttgattgaatcagcctattggtgtagttttaggtctacatacatcttgattgagtcaaccnac

SEQ ID NO: 511105 - DNA, 121 bp, Homo sapiens
catccaaagtgccatgtatcccactgcctcattctttaacacggaattccctcaaatgtctctgtgcacttacctgcgaaagtcccccatttactctcgtgagtaaagtgtgtcttaccta

SEQ ID NO: 511106 - DNA, 303 bp, Homo sapiens
tggtgctgtgtgacaacagatgatttagtcttctgggtcttatttcactctttctttatatgttaaaatgaagggagatcttcagggtgactaacatgtctatcgttggaaattggagtttaagaaccttcaataggtccggtttttaaaaaaaggcaacaagacttgactgattttgttttctcacacttaggatttctattacttaccaccttattcatatttttaataagccaggttagcactcctcattcgtttgctcaatgagcactggcaggcatcaaccacatgcatgcaccccgg

SEQ ID NO: 511107 - DNA, 234 bp, Homo sapiens
gatttcgggtttcggcatgactccaccactacacgtgacatagccccgatcttatcggcactacaggactccgactcgccaggaacgtcgagggccaccggtgcagcgtccccggactccccggaaacgctatcccgcgaagccctcgcgtgcttgtcatcgtcggcctcattgtgaggcgtctcatcgctgacctcatcagacacgtgcccgccaggggtacggagctcgaat

SEQ ID NO: 511108 - DNA, 499 bp, Homo sapiens
cagatgtcctggggcggacgcatatactccggaaatctagtatcaaactcaacatttacccgattcactagatcgtcacgtacagatacgagtagcgaggaagaagtagtcacactgcattcggggctgtaacgacgaaagatgaatagaaagatggcagtggcatttaagatgcacaaattattaaaattttaactattacagtgtagcaagtctaggtagagggcactgcatttgtacagtaaagtcagaagtggacagagtaatgctttttgtttttgtctgtctgggcagtagttggctgtaacaaagtttgtgtctagcttaaaaagtacctgttgactcagatagccacagtaagagactagaacgtgatggcataatggtgacaaaaatgagttcaaatctacagtccaccacttcctagttggctcaccgcttattacctacacttaattttagctacctaatctgtaaagtggaaataaaaaatacatat

SEQ ID NO: 511109 - DNA, 1146 bp, Homo sapiens
  misc_feature (319)..(319): n is a, c, g, or t
  misc_feature (382)..(382): n is a, c, g, or t
  misc_feature (542)..(542): n is a, c, g, or t
agaagctggaggaagtagatcttttgttggaggaatggtccagatggtcatatcgctttcaaagagcctggatccagtttagtgtcaaggacaagattaaagactactagcaatggataccatcttggcaaatgccaaatattttgataggagagtttatcaaaaggtagccaactataggtctctaactagttaggtagtgggagacggtaaaaagggagcattattaataaaaatgtcgttaaattgttatggcgtgtgtgttctggaatctgcatgtgtgtgtttaatgattatgattcggtagaggtattacaantattcataagaccatgtaagcgatcgtcattactatattatatgaacaaaaaaaagatccgancattatgataaatgtaattaaaacaatggaagatagcaaagaagaatatataaagcataggacatcaattagatcatttaatagatcgactaagaaactatatataataacacgatcgttaatcccaataatggagaccatttgaagtctaagataatcngcgagaagatattaatctggcaacttctgagaagaatctaagaatggtaatgggaaaacaatgcagggataaaggcgatgaggatatctataagatattttgatataagagtgtaacacttatctattttcttattgaaagacctgaagcaggatggaactttcgctataatgaaaggcgaggtccattatagatgaaaaatttagggtttatttaacgattataatctgaaaaattgaataaaatgaaaaaaagaaattcaataacaccaccgaggcgagggggagggaagttaaggggggttatacgaacaagacggggagccggaaggaaagagacgatcattgaaggcccgatcccgaaagaaagacatattagtttcggtgaaacaacagacgagggcggaaccctaattgggggaaaggggacaaggaggacgatttgttacagaactgatgaaggcagagtgggagaacccgggccgagttgactataagaccccgacgaggaggaagacgcagagagaccaacccccgtgtgagccacgaaggaagaaagttccggggagggaggacgaaaaactaaaaacccgcggcgcgagagc

SEQ ID NO: 511110 - DNA, 150 bp, Homo sapiens
gtcaagccaagtgggaagtacggcctggggtacaagcagactctgaagctgatcagacaaggcaaagcgaaatccgtcattctcgctaacaactgcccagctttgaggaaatctgatatagagcactatgctaaggaggctaaaaccgga

SEQ ID NO: 511111 - DNA, 141 bp, Homo sapiens
ctatctctacaaaaaatacaaaacaattagccagacgtggtaatgcatgcctgtgttcccagatacttggggggctgaggcaacgggatcacttgaaacacggaggttcgaggctacagtgagcaaggtttgtgccactgc

SEQ ID NO: 511112 - DNA, 269 bp, Homo sapiens
gcattatggcgggcattgataaagacatcgaaggtgaagcgcgtccgcagccagacatcaagattggttatctgccgcagaaccgcagctgaacccggaacacaccgtgcgtgagtccattgaagaagcggtttcagaagtggttaacgccctgaaacgcctggatgaagtgtatgcgctgtacgccgatccggatgccgattttgacaagctggccgctgaacaaggccgtctggaagagatcattcaggttcacgacggtcataatt

SEQ ID NO: 511113 - DNA, 1278 bp, Homo sapiens
accgctggtgttgtggatggttttttgtttgtttttactttcgaggtatttttttgtagaggaaataaaaggcgacaaaccagcgacatggaggagacagaaaacaagtggagagcgacagtgtacactagcaatgtggtggtgttcgttttgcgtagtaggtatgtgttggttgtcttgctccagtcgaattttctttactcatttgtgtgttatctgttagttgcgggtggggttgttcaccttgccccggcgttatggtgtggaagtagtcttctctctgggatatgatagcgggggtgggtctgcgcatgtcttgcgctgttttttgttatggcggttgtgtaaggagcacgtctcgtgcttagggttgtgtgtgggcggccaggtgtgcctacaatatctgtgttgccccccggggggcgaacaggttgccgatgttgtctctcttcaccggtgtgctttggtgtgtggccccgtgtagtgagatctccctgttgtaacctctctcttattgcctatctgtggtgtattattggtggttacgatttttctgaggggtgcttccgcgacagttcgtgtggcgtggggtgcctgccccggaggatgtggggcggaaaaacagacccttgtggcgcccctttttgtaccggtctcggattgtttattgtcccctggtctggttcggatagacacatctctttgtggaagacacattgtcgagagattgtggcatgccccccgctgagagggcggtgcctcttctgtctcgtgcgccccccgctctcctcacataggtgcgggtgacacccctctgggggactctctttgaggcccccgcgggggcgctctcggagagtgcctctctcagaggctcctctcgcgaagtggataaaaactccccctcttgttcgcccccctatgatgatacgcgggtgtgcccaccacctcgtcgagattctttgtggcgttggtctagatatttccccctgctgggccgccccctgtgggaccttctgtgacccctcctccgctgggttatgggcgttcaatcgcgccttctttgtgtggcctttaagcctctttcctctctccctcgggtgctctctccccacgcattgtcttgttgtttcacacacgcggcgcctaagaatgatgggtatttgtgggcccctaggggtcgtttgtcccctatgttgggcaccaacgctttctccacaaacacagcaaaacagggttttgttttgtctgtatcggagcaatagatacgagaaaata

SEQ ID NO: 511114 - DNA, 900 bp, Homo sapiens
  misc_feature (30)..(30): n is a, c, g, or t
  misc_feature (61)..(61): n is a, c, g, or t
  misc_feature (91)..(92): n is a, c, g, or t
  misc_feature (127)..(127): n is a, c, g, or t
  misc_feature (141)..(141): n is a, c, g, or t
  misc_feature (170)..(170): n is a, c, g, or t
  misc_feature (182)..(182): n is a, c, g, or t
  misc_feature (192)..(192): n is a, c, g, or t
  misc_feature (228)..(228): n is a, c, g, or t
  misc_feature (238)..(238): n is a, c, g, or t
  misc_feature (254)..(254): n is a, c, g, or t
  misc_feature (261)..(262): n is a, c, g, or t
  misc_feature (306)..(306): n is a, c, g, or t
  misc_feature (348)..(348): n is a, c, g, or t
  misc_feature (354)..(354): n is a, c, g, or t
  misc_feature (356)..(356): n is a, c, g, or t
  misc_feature (360)..(360): n is a, c, g, or t
  misc_feature (372)..(372): n is a, c, g, or t
  misc_feature (377)..(377): n is a, c, g, or t
  misc_feature (455)..(456): n is a, c, g, or t
  misc_feature (460)..(460): n is a, c, g, or t
  misc_feature (483)..(483): n is a, c, g, or t
  misc_feature (546)..(546): n is a, c, g, or t
  misc_feature (664)..(664): n is a, c, g, or t
  misc_feature (770)..(770): n is a, c, g, or t
  misc_feature (782)..(782): n is a, c, g, or t
  misc_feature (852)..(852): n is a, c, g, or t
ccccagggagaagagggcggatgccaatangagctggcagaggctgggcaggtcctgagtnggcccaggctaggccaagagagaaggcacnncgccctgggcgccccagtcccagggcagaggccangcctgcctggaganggcagcgcggggtcagctctcaggggtcnggctgggttccncgccgccgcngctctgctcataagacggtggggcctcataggggtngccccaaganctgttctctggggggngaatcanngtgctggtagtgggcgctggccccccggggccctctgcaaagtnggggacagtggcacctgttgatatgcactatggagggtgctncgggtntnatgnagggctgccatnctggnggcagggctccggcgcaccaggcacagaactctatgtggccagcatgggctgccgctgcgttttgctctttgtggttnngtanacggggtccaatttgtgggggcngccatctgcagcctcagcctcagcctcctccttgtgtggtgcggaaggcaccacaggggtgtngccccaggaggcagccccaggcctggccgggggctcactggggcatggttcacagcaatattgccaatgaagaccgggagggtcacagtagcttccggcgccttcagagagacctgtnagtagtagtcgatgtggatgaggctgcagcccggcaggccgcactggggcaaggcaggcaccaggatctgctcgtgccactgcgcccgccgccagccttgtacgcncgcaccctccanctccgcaatggtccgtacgtcgtggatacagcgcttggccttataagacactttctgcagcagactggcnacacagggctggtgtccttgcctgactggttctcaacgtcggcatgca

SEQ ID NO: 511115 - DNA, 249 bp, Homo sapiens
ggcggaccagcaagcagtcttcaggtaggatcctctttggctctgtgcttcgtcaccacgtagctgtcttttgtcccattcccaccatcacccccggatgtctgggacgtcccagcaagggatgggaaaagcagccctgggagcatcgtccccagcgaagccggccttacagagcccagagccattgtcacacacgcaaggcagggctgtcctcttcttcacacagtagctggagctggttcacaggat

SEQ ID NO: 511116 - DNA, 424 bp, Homo sapiens
  misc_feature (7)..(7): n is a, c, g, or t
  misc_feature (24)..(24): n is a, c, g, or t
  misc_feature (258)..(258): n is a, c, g, or t
cccctcnctttgcccttgctcccngccatgtgagaatacttattcccccttttgcccttcccacaatggttggaagccttccctgacgccctcccctacaagctgatcagatgttagcacccatgccttccctgtacagcctgcaaaactgtgagcccaattaaacctcttctttataaattaccccagtctcacgtatttctttatagtacttcaagaatggcctaatacagatggatagtttgcaaatattctttncccattctatgggttgtctcttcactttgttgtttcctttgcaatacagatttttaacttgatgtgatcccacttgtccacttttgctttggttgcctgtcaggtattacacaaaaaatctttgcccactccaatgtcctggagagattccccaatgttttatttt

SEQ ID NO: 511117 - DNA, 193 bp, Homo sapiens
ccagtgttgcatgatggtcagattctagagcgatcccgaacgagggcacaggcatttacatgccatgagaacaggtttctctgctcatgtgatatgaaacaggtaagcagatgcctttaagtcagcgatggggacagtgcccttgggcctttcaagattattacagactactccaagctagcttgaggcctgg

SEQ ID NO: 511118 - DNA, 178 bp, Homo sapiens
ctagccttctattatttatttaaagcaagaatgcatggtaatatcacctttggaggaaaaaaaattatgtttctactatcacaaagtccataatgagagaacacagaaaaacagctatccttcatatattttttgggctttgtgtttttttggccacctcccatttatttttttctct

SEQ ID NO: 511119 - DNA, 812 bp, Homo sapiens
gccctgctgttctaggctctgtgggcataggcaggctagaggtggaaccctgcctccatgccagcgtctggtgggcaatggaacggctggcatcatccaggtgaggaggctggcgcatgttgggaggctgctggctgcacagacccgtgtatggggaggagaggggctgctgtgcaggggtgtggagtagggagctggcatcccctgagagcacatgcagggctgtctgctagcctcatgtgctctctgtgcaagcagctctttgcaccatctctttggacagtggccaccactgctacaatgtgggcctgacgaggcactagggctccttcctacctgcttacaatcttgtgaaacatgtgtggccgtggtgcgtgtggactcacgcctgtaatcccagcactttgggaggccaaggcaggaggatcgctggagcccagtaggtcaagaccagccagggcaacatgatgagaccctgtctctgccacaaaaattctttaaactattagcctggcgtggtagcgcacgcctgtggtcccagctgctggggaggctgaagtaggaggatcatttatgctttgggaggtcgaggaatgcggatgagtcaatggatgtatgagatggagggtaatgcgatgggatgaccagaggcatgaagcctggtgactacgacggaaaggacctggggaaccacgttgactgtcaggggtcgtaaaggactcaatggtttcagtactctagcaaagaacgctgcagcaatttcagaaagatccctccaaggaaaagtcgatgctgaacgcccaatcctccca

SEQ ID NO: 511120 - DNA, 357 bp, Homo sapiens
agtagagacaggattttgccacgttggccaggctggtctcgaactcctgacctcaggtaatcctcccatgtcggcctcccaaagtgcgtggattacaggcatgagccaccgtgcccagccacgatctctgttttgaataatgaagataagcagatcacatccagaacaaccccacccgacagaaatgacagctacttcctagagactttaggtgctacagagcagattcatgcgcttaataagaattgagcctcattatcacctaagaaagctgaggaagcatatattaccaagtgcaattaacaagagagtttttattcctataaaaacacatattaaagaaaggctttgacggta

SEQ ID NO: 511121 - DNA, 451 bp, Homo sapiens
tatggccggggaatggtccttttttaagactcattcttgacttctttactaccactggttagttatataatctaatatcctaatatcaggtttaaaaattttaaattagaatttaagaatctaattattaagatttaaaaaaaaaaaaaaaaaaaaaaaaaaaaaaaaaaaaaaaaaaaaaaaaaaaaaaaaaaaaaaaaaaaaaaaaaaaaaaaaaaaaaaaaaaaaaaaaaaaaaaaaaaaaaaatttggggcccctttggcccaaagcgtttttaaccttggccagttttttcctggggcccaaatttggggccctttgggcaaattccccctttgggggggggtttaaaaattaaggggccggtttttaaaaacgcggggttgggaaaaccctggggtttcccaaattaaagccctttggaaaaaaaccctttttccagaggggggg

SEQ ID NO: 511122 - DNA, 643 bp, Homo sapiens
  misc_feature (13)..(13): n is a, c, g, or t
  misc_feature (79)..(79): n is a, c, g, or t
  misc_feature (391)..(391): n is a, c, g, or t
  misc_feature (551)..(551): n is a, c, g, or t
gaggatcccccgncatgtcgtggctgggaaggaaagaaacaggatggcaggcctggagtgatggctgctctccaccctncatcatcaccctaggcaggaagccaaactgccctggctacaaaagggctcaagatgcattgtgtgcccctcgtggaaaagcttgggatttgcacactgggaaaaaaaagggtatctcagaaggctccaggtgtcctgtggatgaagggttactaacacttccttgtgctaatttgcttatgcaaagtaggtcagccctcactttaatgccacagtagaaactgcaagtcttttttaggctaagatacatgataattataggactgcctattatttgcttcataaaacaacagacacaaaaggaaaaaggagnccaagtttgtgagaacatgaaactcattttggaaagcacagtttcgataagaggctctttctgaacttgttactacagttattagtaaatggaaataaagagtcatattgaggcttcataatgctgattccgaagaagtacacacagccacctgaatcangagactggaagacactcaaagctacttgagagggcttaattgacaaggcatcactaagaagcaatgaaccaggccaggcgcagtggctcatg

SEQ ID NO: 511123 - DNA, 705 bp, Homo sapiens
gctatggtttgaatgtttgtgtccttgaaaaatgcatatgtgaaatcctaacccccaagatgatggtattaggagataggaccttgggaatcaaagccctcatgactgggattagtgtccttataaaagacaccccagagataccatgtgacaacatagtgagaaggcaccatgtgtgaaccagaaagtgggccctcaccagacaccaaatctgctggcaccttaatcccagctttcagaactatgagataaatcatatagtatcactcatgccacattctgttggttacaagcccgtccagattcaaggggaacgaacatagattcccaattctcaatgggaggagtgtcagatttgcaaccatttttgaaaactgccacagacttctcactagtatcagaaattcaacatatgatcttcataaaacatttcatcagcattttttcttctctgttcagtagtaccatcattatttcactcttctgggcttgaaaacttaatcatccttgctttttttcatccaaatccatttgtactacaatttctttttatttttttttaaatctttggatgtcacgtgttttctcactgacatcacagaccctgaaccatgtagtaacaccccaaatgcactctctgctcacggttctccaaccaggtgtatgtgcagcgatagggttggcgtaatcggattctcattcagg

SEQ ID NO: 511124 - DNA, 339 bp, Homo sapiens
ctgtgatggcgtatcgtgaaggtctcctgtggagtaacgtcccagtctggctttcccttgataatgcagaaaggaagcccgcattttaggacacagggcaggcaagaagacaagcagctcgatgggatccacgtcgtgtgcaatcaccaccagctgagctttctggttctccaccatggtgttgacggtgttaactcctgctcgaaggacaggtggtctctccgttgggacgtcccctttgccagcagccttcttctcggcccggggcaacagtctctgcttcttctcttgcttagtctctggtctgtacttgtgggccaaagacaaggtagagccgag

SEQ ID NO: 511125 - DNA, 310 bp, Homo sapiens
cctcgctttctccgcggtcttccgagcggtcgcgtgaactgctttctgcaggctggccatggcggttcacggtcccaaggctctcgggctttgcccaaatgctcaagggggggagcccaaacactttttcagggttagaaggggctcttttatagaaacatacaaactttcaaggagctttccaaaccactcgtgacagcatatgggccccatgggatgaacaaaatggttatcaaccactttggggagatgttttttgacaaagatgcagcaactatttttagagaactagaagtacagcatcctcctg

SEQ ID NO: 511126 - DNA, 336 bp, Homo sapiens
ggtagatgctgaatagcctagacatcaaagttggtgtgaacccaaatagagtcagctgacccagcatcagccacactctgggttggaaaatgtttgcctgttggaattaatttaagctcaagtatatatcaacaccctcctattgtgcaacccacccaatacacactcatggccccccaaagccccccaccctaaccactgtaacaacagtttttgtgtcattttctgtattaaacatcttgttgcacgcatttgaggtcatcagggtgcaaaatttgtattcctgaaaatgtcatatattttcattaataaataacctaaatatgataaaacaaa

SEQ ID NO: 511127 - DNA, 963 bp, Homo sapiens
ttctgccgtcatgtctgctacgcctgcagcagaggtcctcctctaggatggtgtctctcctagatctgtgacacctctacgcgcggtgggggccctctttctggaagcgcgtttctttctgtccccccccttttggcctcgttgccttgccctttcttgcttggggtttccccccccgcgcctggggagccctcccgggtccagcgaagctcccaccggtattgctgttgccaaggcccatgaaggtccgacactggtggctcccggagcttttgttcaacccggatgttccgccgatgaccaccggagccagaggtccatggacccaagactgagcgttgcccaacgagccacggcccagccgagagtggttcccagaacgcaatcccggttatgtccgctattctatcccggcgcttccccccaccctgcgattggagagtctctggtactaaccgctgtagccgggcccctctatccccgcccctttatggagtctttggaccccttcctgttctcctgggagtcccctgcccccgcccccttctctcttgagatgaccttttaaaggggaaaaaacacccaccatgatttcaggagtctggcattcctggatccctcttccctgcccggtgcctgtcacccgtcttcactgcctccttttccctgtcatgctcatcagcttatggcttctgtctaagcacctgaaaggaggactgaaaacctcccctgcacggctggttttaggtcttgaattatgtaagaatcttgcacccgcacctgctaaatgtaatttcaattgtttttccctctaggaccaacacttacccaaatatgccacttttttttggtgggaagagagattgtcctgtgatttctacccctttcctgaggcctgtggaaataacctttatgtactttaagttataccagaaaatagaattaagttatacccaaccttga

SEQ ID NO: 511128 - DNA, 268 bp, Homo sapiens
tgacactccatctcctcggttctagcaattctcctctgcctcccaaagtgctgggattacaggcgtgagccagcacgccagggcgccaatgtgtagtcttttatccctcagccttctccccaagtccccatagttcattgtatcattcttatgcctttgcctttgtgtcctcatagattagctaccacttataagtggaaacatacgatacttgtttttccagtcctgagttacttcacttagaataatggtctccaattccatctac

SEQ ID NO: 511129 - DNA, 166 bp, Homo sapiens
  misc_feature (35)..(35): n is a, c, g, or t
  misc_feature (81)..(81): n is a, c, g, or t
tttcagcccccacctcaggttagggctctgccgcnagcctgacctctagccctggtggcagaggtccctcagctgcaaggntaattggttgaccaccgattccagctgcggttaatccagcttgggcctgtttgcactgcaatccttttgggctctcctaggatcc

SEQ ID NO: 511130 - DNA, 148 bp, Homo sapiens
  misc_feature (148)..(148): n is a, c, g, or t
taaacaaaggtggtttttaattccccccaatttgggaaccagtccaaaccggggcctggggggtcttttccggaccagtttgccaaaagcaagggagggggggtcccggccccaattccgtattcggggcctaagttggccaaaacgn

SEQ ID NO: 511131 - DNA, 892 bp, Homo sapiens
atgttttcttgtttccctttgttgtctgttccttgttgttatgctctggtgttccatgttcctggtcatcgtccgccccggtctttctggtcggtccgggcattgtgtgttttcatggcttcgttgtcgccgggcttccgacgtccgtggtgctccttcctttttatctatccctactctgttcagtgttggtgtttcgaggttcccatttgtctgcctgctttctgtcgtgaacgtgattgttgtggccctctttgtccgaggaggcctgtgtgccctggtttctcatcttccttatggtcgcggttcgggtgactgatatctcttcgtcgtttcgcttactcgtccagacgagcatgctcgtctactgtcgtccacaccacgatctcatccacgtgtcacccgtcgagcgttgccctcagaccacaagggcctggatctatgatgggtaggttgcctgccgtttccctgcgatctacgacttgtgttgatctcctccccgtaggttaggttctggtgcactcctgctaccccggtcctgcctcacccactgaccagcgaggggctgcctacgtatccttgggcacacgctacatcatggtgtccatttgtcgaccccgtgacactcaaccactctgccaaacctgccctgccattgtgcctgtgtttagggggcctggccccacgtcctgggagcttcgggggatgggtctctcatgtctcccacacttcctgagattcaatgttccgcgatgaccatgaacgtgaatatgtcaccttgactctccaagaacacggcccttctcatggaagcgtcccggagtccccgcctgtcggtcgtccgtccgcccacaggggcttcgagtgcacagggaattctggggactccccg

SEQ ID NO: 511132 - DNA, 85 bp, Homo sapiens
tcgctccatttgctttggacagatttaaagactagcacagccatttgtgttaattaaaatctctcgcacctttaaaaaaaaaaaa

SEQ ID NO: 511133 - DNA, 269 bp, Homo sapiens
gcggccgcctactactactactgctcgaattcaagcttctaacgatgtacggggacatgttcctgctgcagataactagccagacccacccctttatttcaggccatcccttcatttcccataagggatacttttagttaattgaatatctatagaaacaatgctaatgactggtttgctgttaataaataagtgggtaaatctctgttcggggctctcagctctgaaggctgtgagacccctgatttcccactttacacctctaaaaa

SEQ ID NO: 511134 - DNA, 131 bp, Homo sapiens
  misc_feature (33)..(33): n is a, c, g, or t
taatcacgtgcattgtggactcctggagagtanttctactcacacacacgtcgcgccgtagacactggagaatccttctagtcactacacatcccgctgtggatactggagaatccttctcgccacacact

SEQ ID NO: 511135 - DNA, 131 bp, Homo sapiens
tatctacgaatagggtttgatgagtcatagaaaccttgcggcactatatcatattgcgccaggtttcaatttctatacgactatactttatttagggtaaatggtcttggctaagtgttagggtttgatga

SEQ ID NO: 511136 - DNA, 1229 bp, Homo sapiens
ggagagagagaactagtctcggtttatttatatttttttttttgggtaaaaaggaggtatggctattttccccaccattgttcttcaactcctggcctacaaacaatcttatctgccctggcttcccaaattgtttacaggcttggcccatgtggtccccagccatattatatttattatggtatttgctgggaagaaacttgtgattgacagtccccacattatctagaaaaaattcgcagggcttcacgcaacattcttggagctgcaatgtggacagaacctttgccctgggaaaaccaccttttgtagatctgaggatatttctccctgtacacgagtgtataaactacgtatttgcgcctgtgattataacagttgcgcttgcattaacagtcccccaacttgtgtaattggatttgtgagccacaccaataggataacatggaaaaaccctgtgatgggggataaagtggggtggccccacctggtgtataaagccaagtgcctccttatgccactacgatttcacaacaaccagagaacagccccccgtgtgtctgaacgcggggcgcactctttgtggagagaaggaaggcaactctctcctataagacggagaaagtgctctcccacgagaggacacgctccatgtgttgagtaaaatagttccgctcctatgaaagcgctgcgtcgacagaggtggtgaaacaacttgttggctgtggttgtggggaccacacccttgtgctcacaagcctctctgttgcgaggcacacatacttcaccacaaaactctctccccaggagtgccccctcgctgtattatcaccacaatttcttgtgacgacgtctaaaagacaaaaatgctgaagtttatttgtccccacactttgtgtagaagccccaagaggtaaaaaagaacgacaacatctctcttcaatgaggagatcacagctagtgtgtaagagatccacaggatacacccccctttctttggaaagaaactaatctccctctatagggctctatttatcccaaagatatattttcttctcaacacagcgctatctaagtagaagcgctcctcacccatagttgtcatagggccatcattgggcccccattgcacagcgcaacccacaaagccctgtgaaatatatagttgaacacctcttttaatttacccagtataaggggttacaaagagaacggctacagtaaagacc

SEQ ID NO: 511137 - DNA, 272 bp, Homo sapiens
gggtgagagccatctcctctaagcaatgcagggcggcagggccaccacatactgtgcaggcaggagcgtattaattctcctgagtgacacaggcttgggcaaagaagtgtgcttcgctgtacagaaagacacatcacctattaccatccatcatctgaagctaaacccctggatcccgccttgcactgtagggtgggcacattccccccatcccatattctttcctgatcactcttcacggccgccagccaaatgccacttccctctattat

SEQ ID NO: 511138 - DNA, 248 bp, Homo sapiens
  misc_feature (141)..(141): n is a, c, g, or t
gccttttcccccaagcccctagtaaaaaaaaaacccggttgggggccccccccttttttcaaattggggggggaaaaattttttccagccccctttttcaggggcccccccttaaaaaaacaaaaaaatcccggttttganctttttaggttaaaaaaaatgggcccggttttttggggcttcctttttttttactaaaaattcttttttcttttagcctgaataaaaattttccttgggggctggta

SEQ ID NO: 511139 - DNA, 281 bp, Homo sapiens
  misc_feature (133)..(133): n is a, c, g, or t
aaggcaagaaattagccttgttaagaattttaagtgtaatgggaagccattagagggttttaaacaaggaaagatgtgatgtgacttatattctaataggattgccttgattcacctatggagaatggatttntgggatctcagtactgggatactgagatcccagggggaaaatatcactaaggttggaattgcttttctgcacattaaaagcaattctctttttccttgaaacctccatgtgatgttaattaggtaaatgggatttcaaggaaaaaaaa

SEQ ID NO: 511140 - DNA, 109 bp, Homo sapiens
agtcgaaacgataacagataccagtgaagctgcagaaaaaaaaagggaatgtttatacagctgtaggctggagaatgtaaataacgttcagccactagtggaaatcagt

SEQ ID NO: 511141 - DNA, 200 bp, Homo sapiens
aagaacggtcatatctctggtgcagagaaacgataagtcccgtataagaatgtcaatgtgcagaacttccacagtcagtcatggcaaggatggtctcccttcaatgccctgatccaccggcacagaccagagctgattgagtatgacaagctgaggaaggacgaccctgtcaccaacctgaacaatgtcctctattggct

SEQ ID NO: 511142 - DNA, 311 bp, Homo sapiens
  misc_feature (121)..(121): n is a, c, g, or t
  misc_feature (154)..(154): n is a, c, g, or t
aggtaaggaagtaggtaggtggagagagaggagggggggggggcttggtttgactgggcaattcgctttggactcgtgtattctcatttgtcataccgcatcacactaccactgctttttnaagaaggggcagtggggcggtgcagaataaaanaaataccatgatttagtgaattctgtgtttcaggatacttcccttcctaattatcatttgattagatacttgcaatttaaatgttaagctgttttcactgctggttctgagtaatagaaattcattcctctcggggggggtaaaattcaagcacatt

SEQ ID NO: 511143 - DNA, 342 bp, Homo sapiens
cactatcctgcgctaagggaagctgtcaaggccgacgaccttgcctgcgataaggcattgatggctagcccccatgtaagccatgaaacacctcgccgacggggtttcgctacgatttgacggcgccgacctacgatgtacctgatcgatacaatgaatcagcgccgggtacatggcgagctcgtcatggagatgggtgaggcttggcgaagtgggaatctcccccacttctgaggtcatgaccttagggaaacgatgccgagaagcccaccaaactgtggtgtccaactcgaggacttaggtttggcgagtctggagcaggcagagtctcgtctagctgaa

SEQ ID NO: 511144 - DNA, 851 bp, Homo sapiens
agcggcttcctttttctctgtgcatcctcagtgacgcggggcacagctctgcccgggggcctaccagagcccacctggaccccacactgggtcagccctggtgcggaggaggccgctgtaggcgcggccaggtcacagtcggcaccagaagtttggcagatctcagtgaggcgttagtttgcatttccttgtgacggagtctcactctgttgccaggctggagtacaatggtgccatcttgactcactgcaacctccgcctcccgggttcaagctattctcctgcctcagcttcctgagtagctggtactacaggcgtgtgccaccatgcccaggttttgactggaatgccaggcttaacgttgctcagaagttgcttctatgaggacgtctcccagcagctgtcagtgtttccaatgagtcatcgccagcccctgcaatgagcctctcaggctggtaagttttgtttcagaaccgcttcctcaagcttcttttgcctttaaaagcttcctcttgccccagcctcccagggaatgcctgtggtctgtcatggctcacacatcctggttgataatccactgctgttctccacggaatgccttcattttgagagctgctcgctgcctgttgtggtttcagttgacggccaccgtgtgtgcagagttcaccagccgctgtggtgtgcagtgcagcagctgaccttgctgccttgttggttttctaatcccatgacgggaccgtcttaagtggttctcaccaagaatggaccaggaacacgtgctgggtgggccacattcttcctcaacgttggtgcccaccagtttatagcacttcgcacacgggggtttatgg

SEQ ID NO: 511145 - DNA, 901 bp, Homo sapiens
gggccgggcgcggtggctcatgcctgtaatcccagcactttgggaggccgaggtgggtggatcacctgaggttgggagttcgagacagcctgaacaacatggagaaaccccatctctactaaaaatacaaaatcagacaggcatggatggcagcacgcgtgtaatcccagctactcgggaggctaaggcaggagagtcgcttgaaaccccaggaggcggaggttgccaggtgagccgagatcgcgccaattgcactccagcctgggcaaccagtacatgataactccgtcccaaacaaaaaccacactaataaccaaaaccaaagaactgtcaggcgccaccgaggagccagagaaaaacctgtaaacgacacgcaatcggcaaggggggagaccgggcccaatagatagaaacgtgagaaaagggggccatagcgctgcttaacacaaaagaaactcgctgggtcacacgacaacaggggggcggtgaggctcacccaaaaataacaaaacgcccggggggcacaactagacgcgatccaagctaaacaacacctcactggggaccaaccgaagggggcactactagggggacgcctcacacacaaagaggggtccaacagcgaacaccgaatatcatcataattaggccccccgctgggatgagacaccttaataagccaatatgttcgacaagtccaccaactgaggaagcaaaatagctattaggccggcacgacagactttcaaaacttcggcgcgggtatcgacatacgcacgccctcgctactttctaaaccccctgatcaacaaatacgcaacccgttcaagtatcattcactatcagcattcataaaggtcaatctgcataaacaaataaacgctggatgatacacaaacag

SEQ ID NO: 511146 - DNA, 1369 bp, Homo sapiens
  misc_feature (769)..(769): n is a, c, g, or t
cctctcactatgctggtgcgtgtgtcgcagtgttgttccggcgtgtaagctctgtaggcgactactgtttggctgtgggtctccttactcagggtattgtcgtgcctctccccggttgggtggtactcctttcagccgatcaatcccctccccctgtgtgttgggtgagtgcaacccccttttgcggcagcaacttctctctccttctcctcgggggtatttctccacgctggaggatttcctcttcacagataggtgggtggtcccctctgcttacccccccccgtgcaggtttgtcaacaccaggaagtggttcaaaaggcgttttctggcacagtgtgtgcgccgtggacgccccacaaagtggggatctctttgcctacgaagagaggtgtgcccccttgttggaagcagacatctcccctcggagagagaggaatatttccacggagccttccacggcttcacagactctctagggacacgcacatggtccccaaatcggaaggttggatagttttccccacaccctggacccttcaccgggtttgccccttgcgtgtgactgttactgttcagcccattatgtgaaaattgtgtggcttcccccaagggtaccctcccccggtaggtccagatagaatatgggtgacccaaagagcccaagtgttgctggaccttttcttgaggctttgccccacccgggaccaattgacttcccttgcgcgcccagccctaaacgccacggaggtgccccctggaggtgtcnccggaggcaccaggtggccagtcccctctaccctggttgagaatgtggattgcccccttaaagggaacccccatggagtcccctgggaaccccccagaatagcgctgtacatatgtggaagaagagaactttggcaccttggaagactgtcttaaacttccccccgacaccacttattgcgccgctcctcgcccggagtataggagaattccagagaattatgtaagaggaggaaatggctctggtccaccattctgtgaatatccccagaacctgcctccaatagttttaagaatggccccttgcaccattggagaattgtcccaccctcaccagggaagcctgcctgtgaaggcgaggagacccaggatttcttcttgcctctttccccaacattttccctccctgaacctgagggaaacataatctggattcactccctcttggttgataccccacctcccaaaaggacaacttcttgattaagaccggttgtaaactagagatggaccggttatccacggaacttttcagcctcccgatgacccttggaattaaaattgccccaccctccgggccacccatatattaccccgccca

SEQ ID NO: 511147 - DNA, 304 bp, Homo sapiens
cgtgaccttccataccgaccgatacgcctgaacgtgtcgcttgacggaaacctaagtacatcaattggtcagcaaagatcacggtatctttaagacctaatttacggtagcaagagttaatcaacttagagatgtttttcttggtcatctcaacgttgatttgttggaaatccataccttctggcacaacttcccaaagtaagcagcgacctggtgtggtatccacaacaatggtttgctgttcacggttaccattttcatcaatcacagtctggtgtacacgtgcttttacgcgagtcgacgc

SEQ ID NO: 511148 - DNA, 450 bp, Homo sapiens
aggcatgtgattatagcgaggacgactaaccttgaatccacgcagaaaggcttagagataaaagtaggagtttgatcagtagccacgtttgcgttacacttgtctgggtacaaataatgggaacattgacgaatggcatgtcatcatagcatagccctcaatacttctgtctctagaatcacacttctccaatctggaccagttactccctaagatctgcagtcatggtctgtcagttctgtgcgttttccttacgcaatcatttctggagtttcttctctttcctgtctcccatatctttctcctttcttggcttgaggaagacttaagtccttactctattatcttccggaatcctgaagcgtttgtgattccgtgcgtctctgaagcggtcttgtgctctttgctcatatttgattggtagactggcttgttgtgtggcgacttggc

SEQ ID NO: 511149 - DNA, 821 bp, Homo sapiens
tgggattataggcatgcacagacatgccggcgactgcgcgctctcgcccgggagctgctcggggaagcgccggagcgcgggtcccgcgccggcgcccctccctggcgtcgaggagaaccccagcggtccgcagagctgagccgaagacccgcccgatccccgccaggaatgcgacgtcctctgcctgccctgctgtatgggtgccaggctgctcagccagggcacagaatctgggacctggtgggctggaggggccgaagctggctggtgggctggctgtgcgagggtgagggacttgtcctcgcggagtgtggcgtggccagacgtggggttgcttgggtgtcagtggtgcgtgtgccagcttctcggggcttgaggcgtgagtgtgtgcggtggccatctccgggagtggtcctggccgacgcgggtgggggtcgctctgccgcagttcctgggtgctcctggttcagcgcgggcctcgcctccaactcgagctggtgctccgggagacggaaggctggcgtttgtccatgtgcaatgtctggtggtggcccctgcccacggatggtggggcctcaacctgacctccacttccttcaggaaaaccccagcgccgacgaccccgaacccatgctggctggcacgccacgcgggggtccctcgggtcccacagcctaccggagccccccacccgcaggccggcaccatactccgagcccacgtgctgccgaccgacctacgaaccagcacgcgctgtgacacaagccagggccagcacgggcccctggcgaggacatcccgcatgccacccacctaccgcc

SEQ ID NO: 511150 - DNA, 645 bp, Homo sapiens
gggtagaagcagagtctttgacccgacagtcaagcccagtggatgtgggtggggacgagccacaggagaaggtatgttacctctgaaaacgaggaaggataggcggtacttggaacaactggttagtgtcattagcaagtatccacactgtcatgagaggagtcacccatcaggtgacaagagaggcgtgcagaggcctcgagcttgtagtaggtctggatcggagtaagtctctgagaaagccatgtcgcagcgaggctccagtactccctaaggatggtgcagtcaatggaccgtcagttgtaggagatcagactcctattgaagcactagacttctatagaaagactgactagaaacaaaagatggctcgatggtactagaggagaaggtctagggcaacagctggttccctactcacggtaggatgatctaagactgatctgattggaagagttgtgagtgcagtgtggcaggatgggggttgatactaaggataggccagggagatatttgagaaaatcagtctgtatgatacaagttcagaactagctggtacatgataggagacacaaggaagaataggaagatcatgaatgacgaagaagggtgaagaaaacgtgaaggtgtcaaaaaagagtgatg

SEQ ID NO: 511151 - DNA, 1015 bp, Homo sapiens
ctttaaagaaatgcaagtagcaattgaagaaccactgctgctggtggtagtccctggctagactgaattacatctacgaaatctaggtcagaaggaagcgtccttgggatcccagatcactctttttttattgttatgtgttcttgaagcggggcatgatccctttggatgtgcctctatcgttcttctgtgcagatgaagagctcccagctcatctaatttttccagttccggaatgccgcatgttttgtcacatcagtgcaggccatgttagccaccttccagcctcacctttaagtcaatctgtgctcctcccctctctgtggtcaggttccagttatcccgactgactcaggcgcgcctccttgggcaagcaagtggtgtagctgtctctgggcgcaggtgggcctgtcctcccgtagtgtttgtccttcctccaccagcgttctcctgggcgtgacgtggccctgtatcaggcaaacgtcaatcgggtagcatgatcagtactccaccgggtggggctacgttgtatgtgtcacgcccgtattttctcatcaagtagtagcctggtggttgcggaacatttgaggtttccttcggggtggcccactatactcaggcccactctgagaggaaatcgtcgcttggggtctgaccactatccctggtcggcgtatatggctgcttgctcccccgctgcaattttcccgggcgtccgttatgcccgtgggtcagcctgcactatcgaagatttttgcggccgagaaatgtcttgcggcagggtgtgcgaactccaccgcagagccttctggtgtgttgaccaggggtttttcccagactgcgaggccttggttccactgcagaacttggggcgcctaagttcaacgtttttcgggaagagagggtaaccctctcagcccaatagatctgaaggggcgctaagcaaggcgtttgaaggtgcgaccacgtgcaggtgtcacgtgcgtcaccccgctcccgtcatgtacctcgtttg

SEQ ID NO: 511152 - DNA, 265 bp, Homo sapiens
  misc_feature (33)..(33): n is a, c, g, or t
  misc_feature (148)..(148): n is a, c, g, or t
gccaatagctgtatggcccagcaatcaaaattnatcggtacgttgacacttgcttatctgtcttctcggttggcttgcatcattccacttagctgcatcagcagaatccttgttcagaccagcgcgtgttgcagtcaacaacgcttgncaccatcttggtacatgacataagttcccccaggattgaagccgacatcatgccgtacctgaagtcaaggcttccccagctgcttcgtaacttgtgccacctttgatatcaccgttt

SEQ ID NO: 511153 - DNA, 390 bp, Homo sapiens
gggcaggtacgtaactgacatgaccagcagacaggctaaagacactgagctgaaaaccctggactctattgctaaaccaaggctcctgaatccgttccctctgagcaactgttgctgtggtgctgccttcacaagcactctgtggagcactgagattgaggggctgtgctatccgtcatcagacaagctgcagccagaactgttcagctgacaaactgggagcagtccagaaatacagtaatggctgcatagtgaaaaaaagccaatttagattctttttatagagagaaaaacataaacatgtgattgaacaagtctcctctattagactaattggtttagatttgatatttaattgctaaaaatacatttagaatataaaccttactg

SEQ ID NO: 511154 - DNA, 147 bp, Homo sapiens
acaatcaacattggggggaattacctaccaagatgtaatggtgtgttaatttgggcgctctcttgcgattctaccgctgagagaggaggcgcgtggtgagaggagagctccaccatctgcgcgctcgtgtacgctggaatggaattg

SEQ ID NO: 511155 - DNA, 531 bp, Homo sapiens
ccagagaccctcatgaggcacgtgttacgatgatgggaagacatacctacgtatggagaacagtggcagcaatggaatatctcggtgccatttgctcctgcagcatgcttgtgtgaggccagcgtggtgctgtccgctgtgacaacgtgccgcagacctggggagtgaacccagtcccgaaaggcaactagtggccagtcctacaaccagtattctcagagataccatcagagaacaaacactaatgtaaatgggccaattgagtgctgcatgcctttagatgtacaggctgacagagaagattcccgagagtaaatcatctttccaatccagaggaacaagcatgtctctctgccaagatccatctaaagtgtagtgatgtatagcagacccagcttagagtccttctttctttcttaagccctttgctctggaggaagtgctccagcttcagctcaactcacagcttctccaagcataaccctgggagtttcctgagggttccctcataaatgagtgtctctgggcaag

SEQ ID NO: 511156 - DNA, 399 bp, Homo sapiens
  misc_feature (384)..(384): n is a, c, g, or t
aagctttgcacctggagaggccgtcgagagaaaggagctgttccaggagaggctgacttgctgatcttccaggcctaattccagaccgactagacgacgactggggccttcacaggccgtcgagaggccggacctggccctggagaggccgacttcggcacgctttggacctgcataggccgacgggaggcccaagctgatcctagaggagcccaccgaccggaggccattagagcgctgcagatgccatcggagggcaggagctgagccgggagaggccaccgtgaggcctgagctgggcctgcggagcttggcttcaggaagttgtgggtctaccagggccgctgcgagctgggcaggagctgagtccatagacgttgttgngaggccagagtcggt

SEQ ID NO: 511157 - DNA, 143 bp, Homo sapiens
tctacaggatccttagagttaagcgggtcgagtacaagcggttagttttcaaagaagttcgatgaagaatacacagctcgacaggaagctcaagcagagcttcaaaacagagatgagaaaatcaaagaacttgaagcagaaat

SEQ ID NO: 511158 - DNA, 388 bp, Homo sapiens
cgatgcgatagcggctcattagaatccgcggccagatcgctcatcgttcatagtctctccctgtgtgataaagaaacgcaagtcataacaaatctgcggattgattctccagcccttccattccacaagcaaacgcctacacccagcgacataacgctgatgctcgttcgcataacgaaacaaatgccgcttatcgtacgtctccaaccgtccctctggagtcgcccataacaaccgattgaataccccctcaggcgtacataaccgcacacttcccgtcaccacagcctctaaagacgccgcctgctcaagaacccaagcgaccgtcggaccatccatcccctccacatcctcaaggacatcgttagaaaaaccactggtaaacgtc

SEQ ID NO: 511159 - DNA, 107 bp, Homo sapiens
tatcgtgtactattctgcaaacaacaaatttttattagaaggttaagatttttcaatggcacaaaactatttggaatgaacccaaaagatagcaggaaagattggga

SEQ ID NO: 511160 - DNA, 166 bp, Homo sapiens
  misc_feature (39)..(39): n is a, c, g, or t
  misc_feature (46)..(46): n is a, c, g, or t
  misc_feature (48)..(48): n is a, c, g, or t
  misc_feature (56)..(56): n is a, c, g, or t
  misc_feature (133)..(133): n is a, c, g, or t
  misc_feature (150)..(151): n is a, c, g, or t
cctcatcgcacccgagataccctcggcgtcgacagccgncctgtgntnttgagtgnaaaatacggcttcctgattgaattcctttaagactcttcgtgagaccacagaccccttccttcccctgagtctggcnggttcagatgcgtctgnncgtctggttgctcgg

SEQ ID NO: 511161 - DNA, 353 bp, Homo sapiens
tatggctcgctctagagtatccaccgccagcacactgcaacaaaaacaaaaatagacaaatgagactatattaaactaaaaagcttctgcacagccaaagaaataacagattgaagagacaacatcttgaatgggagaaaatatttgcaaactattcatctgagaagggattaatatccagaatttataaggaattcaaggaattcaaacaacagtaaaaaaaaaaaaaaaaaaccacccccctttaaaatcgggccccaaattttggggggtacccgggcccaaattcgaaaccttgtcaatggctgttcccggggggaaaacaaagaaccaggaatccctaaatttgggca

SEQ ID NO: 511162 - DNA, 719 bp, Homo sapiens
ccagctccgacgtaagtccctctcgcgcgccacctccatccgctgcccctctgcccacgggcctgggctcagtgtgggtaggggtttgaccccttcctgctcctctccgccccccatccacgcccacatctctctgcctcctctcctggtgctacatgtgggcctgctctgcctcgctccctgccctgcctgcctcagtctccccatgctctctgccacccccctctgtgaccatgtgcctcttagtgtctctccagctgctgccatccctgcaatggctggcccctgacaccaactcactttttcctctgatgcgctgggaggctgttactcactcttcctccttcccctcctcgcctgactccctgggctctgtggcccctgtggggatgtggaagatggcctcctatctactcctctgccccagtcccctccttgcgtcagtcccagtgagggataatgcgcctggcggaatggctgcagggaggtgttatctctgcttcaggagtgcccgccggcccttgcagctgctggaagacccatatatctcatgcttcattgtaacttttggggacctgcagtgtgaaggaatgcagggtgacggtattggtatccccacctaagaccctcccctatccctgatgccagacgtcagcccctggcagggggtcttggaagccagaggtaatgacaagcatagaaaggctgaagatcccggg

SEQ ID NO: 511163 - DNA, 341 bp, Homo sapiens
aagaagctgcatatctttcaaacagatccatgaattccattatcatcatatactaggtagcttatatccagtgggagaaagcacatgcgggtaaactgctttccagaggacacactatccagaacagaatgaacaaagaacaggctgtagcaaaaatatatagtccctttacacatatagtcaaacttcattaatgcacaatactgtcgtggtccttaaatgtctgaaagagatcagtatgtatcattgaaattagttaatctctgagtataacccatatagtgcatctcagagtagttaggtgataaagccgtggcgttaaaaagctttgagggttccga

SEQ ID NO: 511164 - DNA, 617 bp, Homo sapiens
  misc_feature (522)..(522): n is a, c, g, or t
cgatcatgtctgggttggagtacagactaggttacaccgtggtggtcaggctgtgctcgaactgctggccttaagcgatctgcctgccgctacctgccaaagtgctgggattacccgcgtgagccacctctcccagcctgaagccacattcataatctaatgacaagggatggtggcatgacatgctcatcactcattcgctgcattgctctattcctcgttacgcatggggtggactgctcctgacactggacactacttctccactctctgctacacataatgtctctgtactcttccctcaggatgtggcacatgggctctgcctgaaagtcctgcctctctgctacttccctccctatcactagctacctgcaattccaccaggagcctaagactgtcatttctttaattctgcaagaagacccgctttctcggtgccctacacatccccctgccacatggctacaccatcaggcatttcccagcatctgctgcctgctctgctgctcaaggggctgngcgagaagacagcccagttctgttgggatcacagttttgtcctcagtgcgtagcacaggttctagaacacagctacaacaccatactttgtgtga

SEQ ID NO: 511165 - DNA, 396 bp, Homo sapiens
gctttgatttgagaacatgaagcgcaacagaagagtctttggagaagctgagcagtgattgtggcgccccaagcccctgctgcccagctgtgttgttctcttgagggtcagatctctgttcccacagttccatacccactcattgatcactgacaaattcttaacgctagcgatggcttgggagatggggggttggatagcatcctctttctttggcccttcttatccttaggaaaagagggttcctctccttgtgtgtgtctcttccccccacccctaattctctgctctgtttgggaagacgtggaggaaaaggtgacttctggcccacgtcttaccccatgtatggcttgagatgcccctcccacatgttgaaacggctcccaatatatcctg

SEQ ID NO: 511166 - DNA, 217 bp, Homo sapiens
taacagggcaggaaaagctttatggggggtcggggggaatttggttggccttaaagggaatttggggtcctgttcctaaatttgggaggcagcaagcatgtaaggcttaaagggggtttggccaaagcatggggtggggggcttcccccctgctacccgggcaaagccccagtttcccttttcccaacttttttttttaataaaatggggcccccca

SEQ ID NO: 511167 - DNA, 157 bp, Homo sapiens
tccgtgtgagtagcatgtggttgtgctatgtatctaccgcatccggcatcaccatcatctgctacaagtgatagcttccagttcatctgaatattccatctgtttgcaccgctcatagcacggcacatttcgggttaccagaaattgttggcctgtg

SEQ ID NO: 511168 - DNA, 326 bp, Homo sapiens
  misc_feature (275)..(275): n is a, c, g, or t
tttccaaggctggaggtgggccaaagccaggactctgtccttccccacatactgtgtgcatacatggctgtgactggggtgcaggggagagaagggggtataataggcccatagtgactaattaagtttcttcctcaaccctggggcccctggtggtgtgaatgtggtgccaagtagattgctggtgcctctgcccttcctagagatagcaactgggccctggggtacaacgaaggtgagggtggggagtgattgctgtgttggctcctccaaancctggggctctcagagtaacccccagaaacacccagagccaataactacaa

SEQ ID NO: 511169 - DNA, 88 bp, Homo sapiens
aatggcacagtcatgggtgctgaactccgccatgttctagccaccctgggtgaaaagatgaaagaggaagaagtggaagccctgatgg

SEQ ID NO: 511170 - DNA, 312 bp, Homo sapiens
  misc_feature (19)..(19): n is a, c, g, or t
  misc_feature (51)..(51): n is a, c, g, or t
ccagccccacggcagtgtncccagggcaggatcccgtgattccccgggacnccaaatgggcgtgtgttacagtgtgctcttttagccttacccatcagctgacggcttaagtgttaaccagctcaatagaccctctgcctttttgcaagcgcagagggtcagtgtgacagtttctgtatctcagctcttgtctcacctcccagaagaatcaggtcacacatggacttgaaggatgcctggtgtctggagtttatacgggtacaggatagggggtcatggagggccaaaagacgggcctgtctaattgcagga

SEQ ID NO: 511171 - DNA, 321 bp, Homo sapiens
  misc_feature (197)..(197): n is a, c, g, or t
  misc_feature (205)..(205): n is a, c, g, or t
  misc_feature (239)..(239): n is a, c, g, or t
  misc_feature (260)..(260): n is a, c, g, or t
  misc_feature (288)..(288): n is a, c, g, or t
  misc_feature (305)..(305): n is a, c, g, or t
  misc_feature (318)..(318): n is a, c, g, or t
ttcccatgaaaaatacaataaagactctgaaccaggcttttcctgatccaaactggttcttccctatgtagccctgaatgaaatggcatgtcttctcctgtcagtaaatgtacataacaataatcttcttttaaagggcattagtctcaatatgtcatttgtcacctccataaattaaaatcctacagacatttttngacaattnacaaagccctttcccacttatagacatagatgtntgaaaacccccaaatccagtnttagtgaattgagtttactagcatattnaaaataatacatcctgntcaaaagggtttnagc

SEQ ID NO: 511172 - DNA, 180 bp, Homo sapiens
gatcagagatcgagtaggcaccttcaaatgtcttgttggacggtcatcaggatcaacataagtagtatgttccttattttcttaacctgtggtgttgtcaaatggtggtttttctacttccattatcctttttgcatgtgtccccattaaaattttccctataagtgatggtgggggggc

SEQ ID NO: 511173 - DNA, 123 bp, Homo sapiens
gcggccgcctactactactactgctcgaattcaagcttctaacgatgtacggggacatgcatcacggatcaatcatcggtacttattttccaataaaattttcaaactttgtactgtaaaaaa

SEQ ID NO: 511174 - DNA, 274 bp, Homo sapiens
tccgctgtgtgatggcggcacagtcggggttgatctcgggtggtgatgagcctcgccccttgttgacggcaggcggggcattcggacagttgagtagccacagtaggcccccagctccagcagcacggagggctggtgctcctgaatcacggcgtccacgatcttgcctttcttgtcgcccacgttcatgggccactccttctgctcgcagtaggtgtcaatggcctccagcacgctctgtgcgttcccgggctccgttggcctacagcacatg

SEQ ID NO: 511175 - DNA, 950 bp, Homo sapiens
cgtgggcctcggggacaggtcgccctaaagtgaggacccctagaaggagagaagggagggtggcatgggagaggtgaccgggccctccagtacggtagacaagccccaaggtagaccacaagtctccaggactagagctgccggttccctctgggccagagggcccaaggagccccctgggttctccaaccagtgcaagcaaggtctaggggacaaccttggacaagccccgcagccttcttgctgggctggctcgctgagtgccactcaaaataggacataggacaagcttgtctgacatcagctactgagttaaattatgggctttataggactcaaacctgttgtttttcccaactctgttctctccctccaatccaacccctgccacagtgcatggcgcaggctagccttgaatggactgacagacaccaacagctgcatcccttggcatggggctccatgtcaaatatgccaaacccagggagatggagggggctggagacccgggggcctcctcatagagataactctgcactgggttcaatatggccctgatgtgcagccgcaaagtagatgctcataaatgcgcacatgcgctcatcacacagacaccgggagaggtgctggactccagctggtagcacgtgcaagccaggactgaaaggagggggttccaggaggacctctggcagaagggcacgaagtgcatgacagtcacacggccagtgctgtcctccaggctctggtgcgacgcaagcacgggagccaacgcaataaagtgacctcgaattcgggaggtggccagtgacgtgtggacaagggggccgggccgatgggtaaccggcgagcggggggaccaggaggggccggaaaggagcaaagggggcgaacaggaaggtgaagaaactccggggaagggaaaagggcggacgaagaaggtgaaacaa

SEQ ID NO: 511176 - DNA, 236 bp, Homo sapiens
ttagggctacctagatggtggtatctaatcccagttgcggtctagctactagtgtgttcagatacgtgaaagccactttcgtagtccatttagtgtcaccgggagtttataccccctcaggtgagttccagcttcattggggaggatgtgactgatggaggtggcgatttgctgctgtgaaatcgttttcggtcctagctcctcccggcaggtaaggtctaggaggagtaggggca

SEQ ID NO: 511177 - DNA, 136 bp, Homo sapiens
atggctaagggtcacaagcagccagcaggcatggctactgtccattgcattcatgcaactgcattgcacccaagcatgctcgcggcatctctcatgcacgcatggcagtgcaagcaggcaacggcaactgcatgtt

SEQ ID NO: 511178 - DNA, 92 bp, Homo sapiens
tttgaaacttttaaactggtttcggcttttgcggcttttgatcccccctttgctcctgacaaccctcattcaataaagaccagtgaagccca

SEQ ID NO: 511179 - DNA, 206 bp, Homo sapiens
ttaaaaaaaagtcccccctcattccccaaggtggagggcagggggcccaatcaaagcttacagtagcctcgaaaagcgatccttttgcctcagcctccaaagaaattgggattacaggggggccccccaacccctggccaagggttttttccaaatcattccctaatggggtgggggtccggtaaaaataaaaaaattaaaattta

SEQ ID NO: 511180 - DNA, 421 bp, Homo sapiens
  misc_feature (193)..(193): n is a, c, g, or t
attcagaaaagagagtggtagagataactatattacaaatctgttaggtattattctttaacaagtaggtgttcaattcttgccttcctttttttttttaaatatctggtcatcctgggcacggttcctaaaaaaaaaccccattatcccaagcaaaaagcacagaagggggagtggggctccaaaagatgtnacctcaaaatctaaggcctagcagagaatcaccaaattaagggagagtcaccaggggtgtaaccagggaaggacgtgccttaagtaggtcctcaggccagaggcgggaggcaccagctaattcagaggacagaatcctcgagggaagggtgagccatccgggggggcatgtcaccccgggattaaacacaatttaaaaccaattgattccgaaggaaagcccagtgcc

SEQ ID NO: 511181 - DNA, 190 bp, Homo sapiens
gatccccgttatagcaccgtgatagggcacgtcctcctgctctttgtaaggaagaacaggaacgacgatacagctttattttgtagcgccaaggtctcactatcgctcactccgtgtaatcccgtgctttgtatcaatgaggatctggctaccagacgcggtctggtagcacagaaagtgcgtgacctgg

SEQ ID NO: 511182 - DNA, 677 bp, Homo sapiens
tatcgtgtcttaccacagtgttcatatgtaaatgatcatcacatttcgtgaatggaggccatgtcaggtgctaaggaagttcgccttttacacagaagattgagaaaatttcctagatataaatacagataaattcagaaggttaaagggggtgcaggtatagataacaatactaaggtggcaagtggaagaggagtcacaaatacatagcctaaaacttcaagatgtattctataggagtcagattttactgaatatgttacccacaaatagctgcctatatgtaataataaaatatatataaatatatagttataaaactttctttaaactgtaactatgggaatttattttctttacatagttgcgcagacacacaaacatatatatatatttaaaatatattgtggggcttatagaccacctactcctaagtttggtgtggttgttaaattaaatatttaattgaatagacttatcttacatcatgtgaactgacacatgggggcatggtggtcactgcaggaggaaaccaatatagggaaattaagattatcaagtacaacagtgtgggcatattctcctcttttctaacaaggttccacatggttcctgaggtaatggagagacaggttgtaactgtgacttgccatcaagttgattggtctgcctttctt

SEQ ID NO: 511183 - DNA, 674 bp, Homo sapiens
  misc_feature (230)..(230): n is a, c, g, or t
  misc_feature (368)..(368): n is a, c, g, or t
ttgtcttcttgtcctcaaaagcaggtggtgtaccgtggaacctgaccggggaccacgggtgtccaaaataattgtggcgtggccccaaaacatagtgcggtctcctttttcgtggagccagttttagttttaaagccattagttaagatcagctccttgtgtggaaaacgcccttctgttataaagctcaggggcaataaggaagcagaggccctttgggggtgccctcntgaagagagcgtcaggccatcagctctgtccctctggtgctccaacgtctgtccttcaccctccatctctgggagcagctgcacctgactggccacgcgggggcagtggaggcacaggctcagggtggccgggctacntggcaccttatggcttacaaagtagagttggcccagtttccttccacctgaggggagcactctgactcctaacagtcttccttgccctgccatcatctggggtggctggctgtcaagaaaggccgggcatgctttctaaacacagccacaggaggcttgtagggcatcttccaggtggggaaacagtcttagataagtaaggtgacttgcctaaggcctcccagcacccttgatcttggagtctcacagcagactgcatgtgaacaactggaaccgaaaacatgccgcagtataaaacaaacatta

SEQ ID NO: 511184 - DNA, 104 bp, Homo sapiens
taagggaccaatcttcctctctcacggattatagtcagccagcagtggggcctaattaaactctgcattcattataccctctatagccctggaatgagctaagc

SEQ ID NO: 511185 - DNA, 628 bp, Homo sapiens
  misc_feature (1)..(1): n is a, c, g, or t
  misc_feature (87)..(87): n is a, c, g, or t
  misc_feature (102)..(102): n is a, c, g, or t
  misc_feature (108)..(108): n is a, c, g, or t
  misc_feature (123)..(124): n is a, c, g, or t
  misc_feature (126)..(126): n is a, c, g, or t
  misc_feature (172)..(172): n is a, c, g, or t
  misc_feature (190)..(190): n is a, c, g, or t
  misc_feature (211)..(211): n is a, c, g, or t
  misc_feature (290)..(290): n is a, c, g, or t
  misc_feature (302)..(302): n is a, c, g, or t
  misc_feature (329)..(329): n is a, c, g, or t
  misc_feature (333)..(333): n is a, c, g, or t
  misc_feature (420)..(420): n is a, c, g, or t
  misc_feature (497)..(497): n is a, c, g, or t
  misc_feature (516)..(516): n is a, c, g, or t
  misc_feature (597)..(597): n is a, c, g, or t
nagaaaaaaaaaaaagaaaaaaaaaaatataaatataaaaaaaattaaaaacttaaaatagaaaaaaaaaaaaaaaaaaatcaaaanaccaacagaaaaaangaaganaagaatactttaagnngngcccaacctccaggggggatcaggggggtcagggggggtcactganaccggcagtttttcttgntttttgcattagtgccctcanctggaactgtttacgggacagaagacgtacatgcttcaggaagacatccaggtctatcacgccccttctcaaggcttcncccaagtaaaanatagtgtcttcaatagcgttttcttcngcanacagattcaggatctgtttgtataagggagctgggggaatgataacttcatcgatatcattgttttcagactgattttccatttttnccagagcagaactgagttcttcatccttctttttcaaaagttctatgtttttatcaaccccggctacttcttgatcnaaacgggaaaccatctctnccagtttctggggaccctttttcaggtcttcttctgttcgtttcaaggcattgagctctgcctgggcacgatccatttccnccttcatccgccatctcagtttgtcattttt

SEQ ID NO: 511186 - DNA, 85 bp, Homo sapiens
tggataagtgggtgtaaggctatgtgacttgatcaaaacaaatgcaggggcctctctataaataaagggagatctcatctcttag

SEQ ID NO: 511187 - DNA, 451 bp, Homo sapiens
catagcctgggaacatacatctagcaactgtcgtccatattgtcacaatcttacaatatgtagctaggtcaaactatgtctactgtcacttctagtagagtacatattgatggtgttctccgataacttctccatggctggatagcgcattccttcatagggtggaaagcgttttccattatctggtagattacctacaggtgtaccattctactgtgggacccctcaatttgcttccaagtttaggctaattatgaacgaaactgctagaatgtgtgagtgtgcaggcttagtgtggacatacatataggtctccttgggggtaaataccagacgaatgcaatcactgtgtgtgcatggccagagcctgtaaagtcttgtaagacgttgaccagactgtcttccaaagtgcttgtaccattttgtattcccaccaccagtgtggagagag

SEQ ID NO: 511188 - DNA, 440 bp, Homo sapiens
ggattcgacggcagggaaattcctcgggtagtatactgcttggggagatatattcgccttagaagaaagagactgtagcaataacaaaatcaagcgtagagctttattacctgagtatgaaatagagccgatatgtcttatatctttatcaataaaaccaatgtccagaaacaagtctttcattatctttgtaagtaaggctctattggctgtttacacccatgaataatggcataggtatctatttttcttttttacattgaaaaaaatcctgtgattactattgaatgcatcaagtaaagaaaaagaaaagaatacatccgatgcgtagattcttgaccatatagtattctataacatagctatatccacctgatagccatggcaaaacattataagaaggtcatttatttcgcagtaagaattataccaagctcaaa

SEQ ID NO: 511189 - DNA, 347 bp, Homo sapiens
gctcgacctgaaatagaacttggggaagaataaaataggggtaaaattgatagttccattctaaacatagtatctctaagaagcccactatgaatattgtctaattagaaatatatgaatctgaaatacttcaaaggaatacaggctggaggcttgcatttggatgtgatagggaagtttaagtcattgggctaaataagatgagctgcaacaagtgttccaaaatagaatagatgagcagagatggtttaagcagagatagagcaacctgaaaaagtgactggtaaagagtggtgagagaaaaaagaggaatgatgacagaattttaaattccttttctcaaaggg

SEQ ID NO: 511190 - DNA, 826 bp, Homo sapiens
ggcgaggaggcgctcgctccgtctgctcggccgctcctacgtcgcctctggggagatgatggtggggggcctgggtcctggccgccggctgggtcctgggaccccgcctgtccctggctcgaaatgggcccctccactcccgagccgagcgtggctctagcttcccatgtgcatggggacacctcagatgtctggactctcagagggagaccctcgggggcacacgctgaggcgaggcacggacggagtgagtgtggggcttcaaaatgacctccgggtttgctcagcttatcattctgacgatagggttcgctgtcgcctgtggattagcaagtctacatagagcacaccgggcagcgtcgcgcgtggcttgaagccttgtacacacaaagcgtgacgggggacgcatagggcatggcacacgagcaccatcgccatgcgactatgcaatcgatccttaaaacccaggggcaatggaggaccgtgggacagaaacggaaggccgttggccgggcgtagtccgtggcctcctggagttccaacaacccctttcaaagcaccagatacaacaattggattggacagactccccagaggcccctagggcaatggagatcataggaacagaacgggggagatccgataaataccttggggagcaacccaaaggagactcgctagtgagcacaaaccaatgtgtttggaacggggcaacagaagaggtcctgaccccaaggggcattctgacaaacaaaccagaaaaacccctcggaaggaggcctaaggggaaagacggcgcaggtatgaaaaaagcaaaacacccctg

SEQ ID NO: 511191 - DNA, 345 bp, Homo sapiens
  misc_feature (263)..(263): n is a, c, g, or t
cttttggggtctttgctcaggatgtcaagggaacccaggaccagatgcataaagtgataaaacaatctaattgtatcacaaatgtataaaacaaccacagcgatggggtggatgaaattgttgtggacctaagtaattttggaaatagagtctataaaattaaaggcaaaagaaactgtatataagtactgcactctagttgaaaagttgtttcctgtgggatatgggttaacaattatgatactgctgtacaggtatgctgngactgaacaaataaatgcaaagatggtggatggtgcaagccagcttttatactcttagaggggagtgcatagataagcaaga

SEQ ID NO: 511192 - DNA, 144 bp, Homo sapiens
ttcattataatttattttccatactaaatgacactcccaccagggccatgacagtttataatccccatggcaatggccagaagaaattatgaaagggcaaaaaggaaggccccaactccggttttgaggaattctccacccatt

SEQ ID NO: 511193 - DNA, 389 bp, Homo sapiens
atcagctgtgccctcccaggtacccctaagtcagcagactctctaaagatcgatcatgcatgcttgtcagcttggtactggtcgtcgattcaacaatcatcgtgattggtgatcatcccggcgtcatcaccatcaccatcatcatcactgtcatcaccatcatcatcactatcattacatcaccatcaccaccattatcactgtcatcatcacctttctccatcaccatcatcatcatcatcatatcatcctcatccccatcatcatcaccatcaccaccgtcattgctgtcatcaccattcgccatcaatgtcgtcatcaccatcatcatcactatcatcattatcaccatcatcaccatcaccatcatcattactgtcatcatcacc

SEQ ID NO: 511194 - DNA, 227 bp, Homo sapiens
agctaggcggtagtagtcgcccttcgggtgcgcaggatgtgccggctcaaatagagggtcggcagatcgagcagtttgcattcgatgaggtagaggaggttgaggatgctgcccgttctgccgttgccatccgagaagggatgaatggcttcgaatttgataatgcaggatggccatgcggatcagcgggtcggaccgtgtcgtcttagcgagtgatcgtccgattt

SEQ ID NO: 511195 - DNA, 1124 bp, Homo sapiens
ggacgcgtgggtcgacccacgcgtccggaagttccctgtgggaggctgttttctgagggagctgagtgtttacagccactcagccctgctctgctcagctgaagcagaaaacagagaccttttgcattactttggttcaagagcaagacaggaggcgactgcatgagaccatggctgagacacctagtcctccaggcactgaggaactccagggcattctgtgggtctcatgggaagccagcacctctacctgttcctcagaagatcgtggccacctgggaagccatcagcctgggaaggcagctggtgcctgagtacttcaacttcgcccatgatgtgctggatgtgtggagtcggctggaagaggctggacaccgccccccaaatcctgccttctggtgggtcaatggcacaggagcagagatcaagtggagctttgaggagctggggaagcagtccaggaaggcagccaatgtgctggggggtgcatgcggcctgcagcctggggacagaatgatgctggtactcccacggctcccggagtggtggctggtcagtgtggcttgcatgcggacagggactgtgatgattccgggtgtgactcagctgacagagaaggacctcaagtaccggctgcaggcgtccagggccaagtccattatcaccagtgactccctagctccaagggtggatgccatcagtgccgaatgcccctccctccagaccaagctgctggtgtcagacagcagtcggccaggctggttgaacttcagggaactcctccggtgaattggggctctccagaacagcagaaaaatgaagtcatttcccctttaagcaacaaaagatgaaatgcattgctgattccacacatagagagcgaatcagagaggagcactcccattggcagccaggctgacctgagcataatcctggtccctaccttaatgttcaaggtccctcattcagtcagtgctggatttgtcagcagcttttctgtgcttcatttgcttctataatgcggtggtagttattagagctaccattcagagtacatgaaataaccaatatggtgcatttagcacatagcaggtggtcagttaataataaactagtggccatgt

SEQ ID NO: 511196 - DNA, 459 bp, Homo sapiens
  misc_feature (326)..(326): n is a, c, g, or t
  misc_feature (361)..(361): n is a, c, g, or t
  misc_feature (370)..(370): n is a, c, g, or t
atttatttattctatgagtacactgtctgtgttcagacacaccagaagtggacatcagatcccattacagatggttgtaagccaccatatggttgctgggaattaaattcaggacctctggaagagcagtcagtgctcttaaccactgagccatctctccagcctgatacagaatcctataagcaacactatttgcagcttttaagttagaaatgttatttataacggttgctaaaaacattacataaacatttttgcttaaacttacagtcctgcctggggttagggtccactgccacatggactcggttacaggtccgacaganaatataccagcttttaatgggcagaaattagaggnaccattacnactcctcatggaaagctacttggaagtgggttcagaactttaaggcaggccagcagcacaaagaattaatggggaataatagcctcccc

SEQ ID NO: 511197 - DNA, 3479 bp, Homo sapiens
  misc_feature (2766)..(2766): n is a, c, g, or t
  misc_feature (2776)..(2776): n is a, c, g, or t
  misc_feature (3317)..(3317): n is a, c, g, or t
ggacgcgtgggtcgacccacgcgtccggaagttccctgtgggaggctgttttctgagggagctgagtgtttacagccactcagccctgctctgctcagctgaagcagaaaacagagaccttttgcattactttggttcaagagcaagacaggaggcgactgcatgagaccatggctgagacacctagtcctccaggcactgaggaactccagggcattctgtgggtctcatgggaagccagcacctctacctgttcctcagaagatcgtggccacctgggaagccatcagcctgggaaggcagctggtgcctgagtacttcaacttcgcccatgatgtgctggatgtgtggagtcggctggaagaggctggacaccgccccccaaatcctgccttctggtgggtcaatggcacaggagcagagatcaagtggagctttgaggagctggggaagcagtccaggaaggcagccaatgtgctggggggtgcatgcggcctgcagcctggggacagaatgatgctggtactcccacggctcccggagtggtggctggtcagtgtggcttgcatgcggacagggactgtgatgattccgggtgtgactcagctgacagagaaggacctcaagtaccggctgcaggcgtccagggccaagtccattatcaccagtgactccctagctccaagggtggatgccatcagtgccgaatgcccctccctccagaccaagctgctggtgtcagacagcagtcggccaggctggttgaacttcagggaactcctccgggaggcttctacagagcacaactgcatgaggacaaagagtcgagacccgctggccatctactttaccagcggaaccaccgggggcccccaagatggtcgagcactcccagagcagctacggactgggttttgtggccagcggaagacggtgggtggccttgaccgaatctgacatcttctggaacacgactgacactggctgggtgaaggcagcctggactctcttctctgcctggcctaatggatcttgcatttttgtgcatgagctgccccgagttgatgccaaagttatcctgaatactctctccaaattcccgataaccaccctctgctgtgtcccaaccatctttcggctgcttgtgcaggaggatctgaccaggtaccagtttcagagcctgaggcactgtctgaccggaggagaggccctcaaccgtgacgtgagggagaagtggaaacaccagaccggtgtggagctgtacgaaggctatggccagtctgaaacggttgtcatctgtgccaatccaaaaggcatgaaaatcaagtctggatccatggggaaggcgtccccaccctacgatgtgcagattgtggatgatgagggcaacgtcctgcctcctggagaagaggggaatgttgccgtccgtatcagacccactcggcccttctgtttcttcaattgctatttggacaatcctgagaagacagctgcatcagaacaaggggacttttacatcacaggggaccgagctcgcatggacaaggatggctacttttggttcatgggaagaaacgacgatgtgatcaattcttcaagctaccggatcgggcctgttgaagtggaaagtgccctggcagagcatcctgctgtcctggagtcggctgtggtcagcagcccagaccccatcaggggagaggtggtaaaggcatttatagtccttactccagcctactcctctcatgacccagaggcactaacgcgggaactccaggagcatgtgaaaagggtgactgctccatacaaataccccaggaaggtggcctttgtttcagaactgccaaagacggtttctggaaagatccaaaggagtaaattgcgaagtcaggagtgggggaaatgaggtgcaccccaggaaggccccgtagacctccgaagactccacaagaaactaatggatcactggtcagtccccatggggagcatcatctcttcgaccctaaagatgtcaaaggtgtgcagcttccaaacggcatccccaggatcactgggcaatgctggaaagagcaaaagaatatcattggccctgatcacatagatgctgcgccgcctagcaaatgcttggtggttcgacttctccctctgtctgggggcaggctcagcatctgcccactggtctcactaagagctttcagatttccctccataggacaggttaccatagacttggggcacttgtgggtactcattttctgccagtgggaatgtaaaggcttcatcctttgtatgtaaccatttggcaaaagtatgcaggaacataaaataaaatatcctttagctcagaaattctatcttcgggagtcaccacaaaagaaaaaaatcaaaatgcagaaaatgtgtggtgcactaagatgatcacacagcattaaaactaaaaaaaaaaaagaaaaaattaacaattaacatccaaacaacaaggaaatgattaacaaaattgtagtagattaactcaattacatatgatgtagccactaaaatatttgagagcagtttagtatgtcttgggaaaagtgtaagctatattaattttaaaaatcagagcaaaaatattcatactggagaatcccaactctgaaaaataaagggaaaactgtggttaattgtaatcctcctggagattgaggagggagggagagaaaataatggatggtagtttttcttcttcctttttccattacatttctgtattttccaagtttttgtacnaagcacatanaactattttaatgaaaaagttatgttaaagaaagcatactctgcttcatgtctagttcttcctccacatactcatacatcaaccccaaagactgctgtattatgtctgtattagtcagcattctccagagaaggagaagcaataggacatatatagacataggagaggggatttatgatgggaattggctcactcgattttggaggctgagaagttccacaatctaccatctgcatgctggagatccaggaaaccccgtggtataattccatctgagtccaaaggccgttgtggaggctggaggtctaggatcaggggttggcaaggttggtttcattctgaggatgtttccttggtttgtagatcgccgtcttctccctctgtcttcacgtggtctttcttctgtgcatgtgtgtctggggcccaatctcctcttcttctaaggacacctggtatttgtcatatgcctcggctcctcaaactgcagcaaacaaactctatggaagagaaaaaaatgggactccagagacttgaaatcacngccacttgtcagatgcagcccccaactcagctgcaggagcttagccaaatttctagtcctctctgagcctcaatttccttatctataaaatggggctctggatacctctcttgtagagttcttgtttagattacatgtgagcacttctataaaacactgaac

SEQ ID NO: 511198 - DNA, 378 bp, Homo sapiens
ggtcccatgccagttgggacatggcttaggaggaccaggctgcaggcaatacttggcccagtggccagatttccagcacttgaagcaagatcctggggcaggtggtcctggaggaatgcctggccgctgcagttcaggcgttttgaagttcttgtatgctggagatgcggctgggttttgtctcacagcagaggcaagtaattgtaactcagaaatgtgttgctgtctggctgcctcctttctattattgtacaccttgaaggcaaggttgattaattcccattgcgaggtttgagggccggattctaatttttgaagctttttctaatgtcaggggctgactgggtgataaaatgcatattgagaataagacagcct

SEQ ID NO: 511199 - DNA, 3316 bp, Homo sapiens
  misc_feature (2766)..(2766): n is a, c, g, or t
  misc_feature (2776)..(2776): n is a, c, g, or t
  misc_feature (3154)..(3154): n is a, c, g, or t
ggacgcgtgggtcgacccacgcgtccggaagttccctgtgggaggctgttttctgagggagctgagtgtttacagccactcagccctgctctgctcagctgaagcagaaaacagagaccttttgcattactttggttcaagagcaagacaggaggcgactgcatgagaccatggctgagacacctagtcctccaggcactgaggaactccagggcattctgtgggtctcatgggaagccagcacctctacctgttcctcagaagatcgtggccacctgggaagccatcagcctgggaaggcagctggtgcctgagtacttcaacttcgcccatgatgtgctggatgtgtggagtcggctggaagaggctggacaccgccccccaaatcctgccttctggtgggtcaatggcacaggagcagagatcaagtggagctttgaggagctggggaagcagtccaggaaggcagccaatgtgctggggggtgcatgcggcctgcagcctggggacagaatgatgctggtactcccacggctcccggagtggtggctggtcagtgtggcttgcatgcggacagggactgtgatgattccgggtgtgactcagctgacagagaaggacctcaagtaccggctgcaggcgtccagggccaagtccattatcaccagtgactccctagctccaagggtggatgccatcagtgccgaatgcccctccctccagaccaagctgctggtgtcagacagcagtcggccaggctggttgaacttcagggaactcctccgggaggcttctacagagcacaactgcatgaggacaaagagtcgagacccgctggccatctactttaccagcggaaccaccgggggcccccaagatggtcgagcactcccagagcagctacggactgggttttgtggccagcggaagacggtgggtggccttgaccgaatctgacatcttctggaacacgactgacactggctgggtgaaggcagcctggactctcttctctgcctggcctaatggatcttgcatttttgtgcatgagctgccccgagttgatgccaaagttatcctgaatactctctccaaattcccgataaccaccctctgctgtgtcccaaccatctttcggctgcttgtgcaggaggatctgaccaggtaccagtttcagagcctgaggcactgtctgaccggaggagaggccctcaaccgtgacgtgagggagaagtggaaacaccagaccggtgtggagctgtacgaaggctatggccagtctgaaacggttgtcatctgtgccaatccaaaaggcatgaaaatcaagtctggatccatggggaaggcgtccccaccctacgatgtgcagattgtggatgatgagggcaacgtcctgcctcctggagaagaggggaatgttgccgtccgtatcagacccactcggcccttctgtttcttcaattgctatttggacaatcctgagaagacagctgcatcagaacaaggggacttttacatcacaggggaccgagctcgcatggacaaggatggctacttttggttcatgggaagaaacgacgatgtgatcaattcttcaagctaccggatcgggcctgttgaagtggaaagtgccctggcagagcatcctgctgtcctggagtcggctgtggtcagcagcccagaccccatcaggggagaggtggtaaaggcatttatagtccttactccagcctactcctctcatgacccagaggcactaacgcgggaactccaggagcatgtgaaaagggtgactgctccatacaaataccccaggaaggtggcctttgtttcagaactgccaaagacggtttctggaaagatccaaaggagtaaattgcgaagtcaggagtgggggaaatgaggtgcaccccaggaaggccccgtagacctccgaagactccacaagaaactaatggatcactggtcagtccccatggggagcatcatctcttcgaccctaaagatgtcaaaggtgtgcagcttccaaacggcatccccaggatcactgggcaatgctggaaagagcaaaagaatatcattggccctgatcacatagatgctgcgccgcctagcaaatgcttggtggttcgacttctccctctgtctgggggcaggctcagcatctgcccactggtctcactaagagctttcagatttccctccataggacaggttaccatagacttggggcacttgtgggtactcattttctgccagtgggaatgtaaaggcttcatcctttgtatgtaaccatttggcaaaagtatgcaggaacataaaataaaatatcctttagctcagaaattctatcttcgggagtcaccacaaaagaaaaaaatcaaaatgcagaaaatgtgtggtgcactaagatgatcacacagcattaaaactaaaaaaaaaaaagaaaaaattaacaattaacatccaaacaacaaggaaatgattaacaaaattgtagtagattaactcaattacatatgatgtagccactaaaatatttgagagcagtttagtatgtcttgggaaaagtgtaagctatattaattttaaaaatcagagcaaaaatattcatactggagaatcccaactctgaaaaataaagggaaaactgtggttaattgtaatcctcctggagattgaggagggagggagagaaaataatggatggtagtttttcttcttcctttttccattacatttctgtattttccaagtttttgtacnaagcacatanaactattttaatgaaaaagttatgttaaagaaagcatactctgcttcatgtctagttcttcctccacatactcatacatcaaccccaaagactgctgtattatgtctgtattagtcagcattctccagagaaggagaagcaataggacatatatagacataggagaggggatttatgatgggaattggctcactcgattttggaggctgagaagttccacaatctaccatctgcatgctggagatccaggaaaccccgtggtataattccatctgagtccaaaggcctggtatttgtcatatgcctcggctcctcaaactgcagcaaacaaactctatggaagagaaaaaaatgggactccagagacttgaaatcacngccacttgtcagatgcagcccccaactcagctgcaggagcttagccaaatttctagtcctctctgagcctcaatttccttatctataaaatggggctctggatacctctcttgtagagttcttgtttagattacatgtgagcacttctataaaacactgaac

SEQ ID NO: 511200 - DNA, 3425 bp, Homo sapiens
  misc_feature (2712)..(2712): n is a, c, g, or t
  misc_feature (2722)..(2722): n is a, c, g, or t
  misc_feature (3263)..(3263): n is a, c, g, or t
ggacgcgtgggtcgacccacgcgtccggaagttccctgtgggaggctgttttctgagggagctgagtgtttacagccactcagccctgctctgctcagctgaagcagaaaacagagaccttttgcattactttggttcaagagcaagacaggaggcgactgcatgagaccatggctgagacacctagtcctccaggcactgaggaactccagggcattctgtgggtctcatgggaagccagcacctctacctgttcctcagaagatcgtggccacctgggaagccatcagcctgggaaggcagctggtgcctgagtacttcaacttcgcccatgatgtgctggatgtgtggagtcggctggaagaggctggacaccgccccccaaatcctgccttctggtgggtcaatggcacaggagcagagatcaagtggagctttgaggagctggggaagcagtccaggaaggcagccaatgtgctggggggtgcatgcggcctgcagcctggggacagaatgatgctggtactcccacggctcccggagtggtggctggtcagtgtggcttgcatgcggacagggactgtgatgattccgggtgtgactcagctgacagagaaggacctcaagtaccggctgcaggcgtccagggccaagtccattatcaccagtgactccctagctccaagggtggatgccatcagtgccgaatgcccctccctccagaccaagctgctggtgtcagacagcagtcggccaggctggttgaacttcagggaactcctccgggaggcttctacagagcacaactgcatgaggacaaagagtcgagacccgctggccatctactttaccagcggaaccaccgggggcccccaagatggtcgagcactcccagagcagctacggactgggttttgtggccagcggaagacggtgggtggccttgaccgaatctgacatcttctggaacacgactgacactggctgggtgaaggcagcctggactctcttctctgcctggcctaatggatcttgcatttttgtgcatgagctgccccgagttgatgccaaagttatcctgaatactctctccaaattcccgataaccaccctctgctgtgtcccaaccatctttcggctgcttgtgcaggaggatctgaccaggtaccagtttcagagcctgaggcactgtctgaccggaggagaggccctcaaccgtgacgtgagggagaagtggaaacaccagaccggtgtggagctgtacgaaggctatggccagtctgaaacggttgtcatctgtgccaatccaaaaggcatggtggatgatgagggcaacgtcctgcctcctggagaagaggggaatgttgccgtccgtatcagacccactcggcccttctgtttcttcaattgctatttggacaatcctgagaagacagctgcatcagaacaaggggacttttacatcacaggggaccgagctcgcatggacaaggatggctacttttggttcatgggaagaaacgacgatgtgatcaattcttcaagctaccggatcgggcctgttgaagtggaaagtgccctggcagagcatcctgctgtcctggagtcggctgtggtcagcagcccagaccccatcaggggagaggtggtaaaggcatttatagtccttactccagcctactcctctcatgacccagaggcactaacgcgggaactccaggagcatgtgaaaagggtgactgctccatacaaataccccaggaaggtggcctttgtttcagaactgccaaagacggtttctggaaagatccaaaggagtaaattgcgaagtcaggagtgggggaaatgaggtgcaccccaggaaggccccgtagacctccgaagactccacaagaaactaatggatcactggtcagtccccatggggagcatcatctcttcgaccctaaagatgtcaaaggtgtgcagcttccaaacggcatccccaggatcactgggcaatgctggaaagagcaaaagaatatcattggccctgatcacatagatgctgcgccgcctagcaaatgcttggtggttcgacttctccctctgtctgggggcaggctcagcatctgcccactggtctcactaagagctttcagatttccctccataggacaggttaccatagacttggggcacttgtgggtactcattttctgccagtgggaatgtaaaggcttcatcctttgtatgtaaccatttggcaaaagtatgcaggaacataaaataaaatatcctttagctcagaaattctatcttcgggagtcaccacaaaagaaaaaaatcaaaatgcagaaaatgtgtggtgcactaagatgatcacacagcattaaaactaaaaaaaaaaaagaaaaaattaacaattaacatccaaacaacaaggaaatgattaacaaaattgtagtagattaactcaattacatatgatgtagccactaaaatatttgagagcagtttagtatgtcttgggaaaagtgtaagctatattaattttaaaaatcagagcaaaaatattcatactggagaatcccaactctgaaaaataaagggaaaactgtggttaattgtaatcctcctggagattgaggagggagggagagaaaataatggatggtagtttttcttcttcctttttccattacatttctgtattttccaagtttttgtacnaagcacatanaactattttaatgaaaaagttatgttaaagaaagcatactctgcttcatgtctagttcttcctccacatactcatacatcaaccccaaagactgctgtattatgtctgtattagtcagcattctccagagaaggagaagcaataggacatatatagacataggagaggggatttatgatgggaattggctcactcgattttggaggctgagaagttccacaatctaccatctgcatgctggagatccaggaaaccccgtggtataattccatctgagtccaaaggccgttgtggaggctggaggtctaggatcaggggttggcaaggttggtttcattctgaggatgtttccttggtttgtagatcgccgtcttctccctctgtcttcacgtggtctttcttctgtgcatgtgtgtctggggcccaatctcctcttcttctaaggacacctggtatttgtcatatgcctcggctcctcaaactgcagcaaacaaactctatggaagagaaaaaaatgggactccagagacttgaaatcacngccacttgtcagatgcagcccccaactcagctgcaggagcttagccaaatttctagtcctctctgagcctcaatttccttatctataaaatggggctctggatacctctcttgtagagttcttgtttagattacatgtgagcacttctataaaacactgaac

SEQ ID NO: 511201 - DNA, 125 bp, Homo sapiens
tcctgctacaccaggcacgaggtgaatgaatgtcaggcgtattataccatagcccccatcgctgggtcaatagtacttgccgcagtactcttaaaactaggcggctatggtataatacgcatcac

SEQ ID NO: 511202 - DNA, 148 bp, Homo sapiens
cacgaggtgttctgctttgactcagagatcgtcaatgcaccaggtgttgtcaccgagggggtcacaaataacgttcctacgatagtcagggaggcggtcatggaggaacagatggctctcgacattgaccggggaagaaagctcttgt

SEQ ID NO: 511203 - DNA, 937 bp, Homo sapiens
  misc_feature (65)..(65): n is a, c, g, or t
gagaaggtttaggtgaagagggcagaggaaacccaattaattgaatatcatctatgtgacccagntttaaaatgtgctaaggcatgagttggtgagagtattagcatatcagagttgaccggtacagggatgagttatgagagtgacaggactcctacgagaaattggcctgagggccaaaatggggcacaaaggatagatttatgattcaaaaagtaccacccgccacttctctagtaacgagtccggcagcagagaagttcaacgtgtcccgcagcgcaaggatcaaatatctggccgtcggagcttcgattctcatcacgttctcactcggcagtagtacatggcttgattctgagcacccgtagcaagcgtctggctcttttgcagacctggccgacgtgaaaacgcccttgatgtgatgccggtgtattctcccccccacaaagcaccacccgccgctcgtagtcatcctggctttttaaacaatgtcaaaccagagcaagtggttttcaattactctccttgaactaggccttcccattcctccgacccccaactcatcattgatcgcgaccctggcccttcccaaggccacaggcacccgccgccagctcgcccaccccgcggctgcccagcccggcccgccgccccccctcacctgtcaggcgcagcttgacgggcccgttcctccggcctccggggttagacatgtccccggcggcgggggcggcgggggcggcgggcggcacgggggcgacggcgaggcgcggcggagtcaccacagcggccggggctggggcccgagcagccggcgcctcggccgccacggccggagggtcccggatgtgccgagagtcgtcgccatgagccgcggagggagcgggacgccgagctcccccctcctcccacttctccttcctcggcccgggccgca

SEQ ID NO: 511204 - DNA, 3565 bp, Homo sapiens
  misc_feature (2852)..(2852): n is a, c, g, or t
  misc_feature (2862)..(2862): n is a, c, g, or t
  misc_feature (3403)..(3403): n is a, c, g, or t
ggacgcgtgggtcgacccacgcgtccggaagttccctgtgggaggctgttttctgagggagctgagtgtttacagccactcagccctgctctgctcagctgaagcagaaaacagagaccttttgcattactttggttcaagagcaagacaggaggcgactgcatgagaccatggctgagacacctagtcctccaggcactgaggaactccagggcattctgtgggtctcatgggaagccagcacctctacctgttcctcagaagatcgtggccacctgggaagccatcagcctgggaaggcagctggtgcctgagtacttcaacttcgcccatgatgtgctggatgtgtggagtcggctggaagaggctggacaccgccccccaaatcctgccttctggtgggtcaatggcacaggagcagagatcaagtggagctttgaggagctggggaagcagtccaggaaggcagccaatgtgctggggggtgcatgcggcctgcagcctggggacagaatgatgctggtactcccacggctcccggagtggtggctggtcagtgtggcttgcatgcggacagggactgtgatgattccgggtgtgactcagctgacagagaaggacctcaagtaccggctgcaggcgtccagggccaagtccattatcaccagtgactccctagctccaagggtggatgccatcagtgccgaatgcccctccctccagaccaagctgctggtgtcagacagcagtcggccaggctggttgaacttcagggaactcctccgggaggcttctacagagcacaactgcatgaggacaaagagtcgagacccgctggccatctactttaccagcggaaccaccgggggcccccaagatggtcgagcactcccagagcagctacggactgggttttgtggccagcggaagacggtgggtggccttgaccgaatctgacatcttctggaacacgactgacactggctgggtgaaggcagcctggactctcttctctgcctggcctaatggatcttgcatttttgtgcatgagctgccccgagttgatgccaaagttatcctgaatactctctccaaattcccgataaccaccctctgctgtgtcccaaccatctttcggctgcttgtgcaggaggatctgaccaggtaccagtttcagagcctgaggcactgtctgaccggaggagaggccctcaaccgtgacgtgagggagaagtggaaacaccagaccggtgtggagctgtacgaaggctatggccagtctgaaacggttgtcatctgtgccaatccaaaaggcatgaaaatcaagtctggatccatggggaaggcgtccccaccctacgatgtgcagattgtggatgatgagggcaacgtcctgcctcctggagaagaggggaatgttgccgtccgtatcagacccactcggcccttctgtttcttcaattgctatttggacaatcctgagaagacagctgcatcagaacaaggggacttttacatcacaggggaccgagctcgcatggacaaggatggctacttttggttcatgggaagaaacgacgatgtgatcaattcttcaaggtcaagctgtctgcacttccctcctccctttgaaatttcatgggggttgagggaagcccacttgaagagttgtttttcccttccagctaccggatcgggcctgttgaagtggaaagtgccctggcagagcatcctgctgtcctggagtcggctgtggtcagcagcccagaccccatcaggggagaggtggtaaaggcatttatagtccttactccagcctactcctctcatgacccagaggcactaacgcgggaactccaggagcatgtgaaaagggtgactgctccatacaaataccccaggaaggtggcctttgtttcagaactgccaaagacggtttctggaaagatccaaaggagtaaattgcgaagtcaggagtgggggaaatgaggtgcaccccaggaaggccccgtagacctccgaagactccacaagaaactaatggatcactggtcagtccccatggggagcatcatctcttcgaccctaaagatgtcaaaggtgtgcagcttccaaacggcatccccaggatcactgggcaatgctggaaagagcaaaagaatatcattggccctgatcacatagatgctgcgccgcctagcaaatgcttggtggttcgacttctccctctgtctgggggcaggctcagcatctgcccactggtctcactaagagctttcagatttccctccataggacaggttaccatagacttggggcacttgtgggtactcattttctgccagtgggaatgtaaaggcttcatcctttgtatgtaaccatttggcaaaagtatgcaggaacataaaataaaatatcctttagctcagaaattctatcttcgggagtcaccacaaaagaaaaaaatcaaaatgcagaaaatgtgtggtgcactaagatgatcacacagcattaaaactaaaaaaaaaaaagaaaaaattaacaattaacatccaaacaacaaggaaatgattaacaaaattgtagtagattaactcaattacatatgatgtagccactaaaatatttgagagcagtttagtatgtcttgggaaaagtgtaagctatattaattttaaaaatcagagcaaaaatattcatactggagaatcccaactctgaaaaataaagggaaaactgtggttaattgtaatcctcctggagattgaggagggagggagagaaaataatggatggtagtttttcttcttcctttttccattacatttctgtattttccaagtttttgtacnaagcacatanaactattttaatgaaaaagttatgttaaagaaagcatactctgcttcatgtctagttcttcctccacatactcatacatcaaccccaaagactgctgtattatgtctgtattagtcagcattctccagagaaggagaagcaataggacatatatagacataggagaggggatttatgatgggaattggctcactcgattttggaggctgagaagttccacaatctaccatctgcatgctggagatccaggaaaccccgtggtataattccatctgagtccaaaggccgttgtggaggctggaggtctaggatcaggggttggcaaggttggtttcattctgaggatgtttccttggtttgtagatcgccgtcttctccctctgtcttcacgtggtctttcttctgtgcatgtgtgtctggggcccaatctcctcttcttctaaggacacctggtatttgtcatatgcctcggctcctcaaactgcagcaaacaaactctatggaagagaaaaaaatgggactccagagacttgaaatcacngccacttgtcagatgcagcccccaactcagctgcaggagcttagccaaatttctagtcctctctgagcctcaatttccttatctataaaatggggctctggatacctctcttgtagagttcttgtttagattacatgtgagcacttctataaaacactgaac

SEQ ID NO: 511205 - DNA, 988 bp, Homo sapiens
gacgcgactgatctgtggttcatggtatggacagggctgcttatcagtatctcatgcactaagtactttatgtcgctctctactgtcgttagaccttctgggtgtccttggaggacgtatgagtagattcagatccaagatatagggtgaattatgagttgctcgttagtggaccaatgttttcgaaggtggggtgaaaaactatctggcaaataggataagtacagtagacaatctcaagaggaagtctgaggatgggtactgaattgtgggtggtgagatctctatctcagtcatgacctattagtgtatagtacatgtagctagtctgtgacctggaggtagttctaattggtgagaaattgaatgtcaagtgggtggtgctctgtgaggtgaggggggaagatgaatgctatgaagcaatagtggaagattaagtctataatagatgtagagttgacttggtaattcaagagatcataggtcaccagaattgagtgcataggagctttagatgtcctatgggaataacttattcagactactcttccttggggtgtgtaaggtcatacatagtgagcaatgatgagtgagtgggtacatatagaccatgtctgagcatccacaggaaagtataacgggtatgtaaagggggatttgtgaccagagcgtaggtggggaatgaaccgaaatcaaggagtataaattacgactgaggtctgggggaactagaattgcggttgaggcactctgtgcgattggtacagtagatcgagtgcggtgtacatctaggagggtgaaaagggaatatgaggtgggattccgaagttttgagtaatttattgagaccttggattggactttagtaggctgtaaaattaaaggtgtgtgaggggctcactgtgcaaggccggaggggggggaaaagggttgaggaagagattgaaatgtgagaaaatggggaataaaagacgtggttagtgttata

SEQ ID NO: 511206 - DNA, 233 bp, Homo sapiens
gtcgacgggattacaggcatgagcaccatgcttggcccccattaagtgccttttgtattattttattgtgtcccctgccaaggattttagcacttaaaaaatcttctggccagcactttgggaggccgaggcgggcggatcacgaggtcaggagatcgagaccgtcctggctaacacggtgaaaccccgtctctactaaaaatacaaaaaattagccgggcgtggtggcgggc

SEQ ID NO: 511207 - DNA, 3485 bp, Homo sapiens
  misc_feature (2772)..(2772): n is a, c, g, or t
  misc_feature (2782)..(2782): n is a, c, g, or t
  misc_feature (3323)..(3323): n is a, c, g, or t
ggacgcgtgggtcgacccacgcgtccggaagttccctgtgggaggctgttttctgagggagctgagtgtttacagccactcagccctgctctgctcagctgaagcagaaaacagagaccttttgcattactttggttcaagagcaagacaggaggcgactgcatgagaccatggctgagacacctagtcctccaggcactgaggaactccagggcattctgtgggtctcatgggaagccagcacctctacctgttcctcagaagatcgtggccacctgggaagccatcagcctgggaaggcagctggtgcctgagtacttcaacttcgcccatgatgtgctggatgtgtggagtcggctggaagaggctggacaccgccccccaaatcctgccttctggtgggtcaatggcacaggagcagagatcaagtggagctttgaggagctggggaagcagtccaggaaggcagccaatgtgctggggggtgcatgcggcctgcagcctggggacagaatgatgctggtactcccacggctcccggagtggtggctggtcagtgtggcttgcatgcggacagggactgtgatgattccgggtgtgactcagctgacagagaaggacctcaagtaccggctgcaggcgtccagggccaagtccattatcaccagtgactccctagctccaagggtggatgccatcagtgccgaatgcccctccctccagaccaagctgctggtgtcagacagcagtcggccaggctggttgaacttcagggaactcctccgggaggcttctacagagcacaactgcatgaggacaaagagtcgagacccgctggccatctactttaccagcggaaccaccgggggcccccaagatggtcgagcactcccagagcagctacggactgggttttgtggccagcggaagacggtgggtggccttgaccgaatctgacatcttctggaacacgactgacactggctgggtgaaggcagcctggactctcttctctgcctggcctaatggatcttgcatttttgtgcatgagctgccccgagttgatgccaaagttatcctgaatgtaccagtttcagagcctgaggcactgtctgaccggaggagaggccctcaaccgtgacgtgagggagaagtggaaacaccagaccggtgtggagctgtacgaaggctatggccagtctgaaacggttgtcatctgtgccaatccaaaaggcatgaaaatcaagtctggatccatggggaaggcgtccccaccctacgatgtgcagattgtggatgatgagggcaacgtcctgcctcctggagaagaggggaatgttgccgtccgtatcagacccactcggcccttctgtttcttcaattgctatttggacaatcctgagaagacagctgcatcagaacaaggggacttttacatcacaggggaccgagctcgcatggacaaggatggctacttttggttcatgggaagaaacgacgatgtgatcaattcttcaaggtcaagctgtctgcacttccctcctccctttgaaatttcatgggggttgagggaagcccacttgaagagttgtttttcccttccagctaccggatcgggcctgttgaagtggaaagtgccctggcagagcatcctgctgtcctggagtcggctgtggtcagcagcccagaccccatcaggggagaggtggtaaaggcatttatagtccttactccagcctactcctctcatgacccagaggcactaacgcgggaactccaggagcatgtgaaaagggtgactgctccatacaaataccccaggaaggtggcctttgtttcagaactgccaaagacggtttctggaaagatccaaaggagtaaattgcgaagtcaggagtgggggaaatgaggtgcaccccaggaaggccccgtagacctccgaagactccacaagaaactaatggatcactggtcagtccccatggggagcatcatctcttcgaccctaaagatgtcaaaggtgtgcagcttccaaacggcatccccaggatcactgggcaatgctggaaagagcaaaagaatatcattggccctgatcacatagatgctgcgccgcctagcaaatgcttggtggttcgacttctccctctgtctgggggcaggctcagcatctgcccactggtctcactaagagctttcagatttccctccataggacaggttaccatagacttggggcacttgtgggtactcattttctgccagtgggaatgtaaaggcttcatcctttgtatgtaaccatttggcaaaagtatgcaggaacataaaataaaatatcctttagctcagaaattctatcttcgggagtcaccacaaaagaaaaaaatcaaaatgcagaaaatgtgtggtgcactaagatgatcacacagcattaaaactaaaaaaaaaaaagaaaaaattaacaattaacatccaaacaacaaggaaatgattaacaaaattgtagtagattaactcaattacatatgatgtagccactaaaatatttgagagcagtttagtatgtcttgggaaaagtgtaagctatattaattttaaaaatcagagcaaaaatattcatactggagaatcccaactctgaaaaataaagggaaaactgtggttaattgtaatcctcctggagattgaggagggagggagagaaaataatggatggtagtttttcttcttcctttttccattacatttctgtattttccaagtttttgtacnaagcacatanaactattttaatgaaaaagttatgttaaagaaagcatactctgcttcatgtctagttcttcctccacatactcatacatcaaccccaaagactgctgtattatgtctgtattagtcagcattctccagagaaggagaagcaataggacatatatagacataggagaggggatttatgatgggaattggctcactcgattttggaggctgagaagttccacaatctaccatctgcatgctggagatccaggaaaccccgtggtataattccatctgagtccaaaggccgttgtggaggctggaggtctaggatcaggggttggcaaggttggtttcattctgaggatgtttccttggtttgtagatcgccgtcttctccctctgtcttcacgtggtctttcttctgtgcatgtgtgtctggggcccaatctcctcttcttctaaggacacctggtatttgtcatatgcctcggctcctcaaactgcagcaaacaaactctatggaagagaaaaaaatgggactccagagacttgaaatcacngccacttgtcagatgcagcccccaactcagctgcaggagcttagccaaatttctagtcctctctgagcctcaatttccttatctataaaatggggctctggatacctctcttgtagagttcttgtttagattacatgtgagcacttctataaaacactgaac

SEQ ID NO: 511208 - DNA, 296 bp, Homo sapiens
ttgtgaggacactagtgcccaagaagtcaaggctgcatgcagtgggccatgttcccgccactgcactccagcctgggggacagggtgagaccctatctcccctccaaaaaaaaaaaaaatttaaaacctgatctggtggtttcaaaaaactacgctaccaccctcaaagaaatcagacatacttgacaccacatagctcccaaaacactctctggtactgagttaagatcaaaactatttaagcacctactcttctcttcctccccgtctaaactcccttatttccagcgctaagt

SEQ ID NO: 511209 - DNA, 456 bp, Homo sapiens
tagtctgcagttcccggtggcgggtcctggtgccttaactcctggatgcagcgatgaatgccctaacttggaattggcaggcgttgggctccgggcttttacatcggtaaggagtgcagatgtcagatgctagagctcctatacctcgcggtaccctcgttggacctcctggatggtctggcctcctgcgaagagcatgtgagagaaatcgctccaatatgacccacgatgaagtggacttgggcttccagatcatctggatacagtggatggcaccagacggttatctggtgtctcatctccatcagggtcccactcatgcatacatgcctctggatcatgatgactcgttgggccttgctcagcatgagatcgagggtgcgggcctttaagagatccgagagtgctaaattggagagcccagaggccccatgatagatcaaaggggtctaccta

SEQ ID NO: 511210 - DNA, 3371 bp, Homo sapiens
  misc_feature (2658)..(2658): n is a, c, g, or t
  misc_feature (2668)..(2668): n is a, c, g, or t
  misc_feature (3209)..(3209): n is a, c, g, or t
ggacgcgtgggtcgacccacgcgtccggaagttccctgtgggaggctgttttctgagggagctgagtgtttacagccactcagccctgctctgctcagctgaagcagaaaacagagaccttttgcattactttggttcaagagcaagacaggaggcgactgcatgagaccatggctgagacacctagtcctccaggcactgaggaactccagggcattctgtgggtctcatgggaagccagcacctctacctgttcctcagaagatcgtggccacctgggaagccatcagcctgggaaggcagctggtgcctgagtacttcaacttcgcccatgatgtgctggatgtgtggagtcggctggaagaggctggacaccgccccccaaatcctgccttctggtgggtcaatggcacaggagcagagatcaagtggagctttgaggagctggggaagcagtccaggaaggcagccaatgtgctggggggtgcatgcggcctgcagcctggggacagaatgatgctggtactcccacggctcccggagtggtggctggtcagtgtggcttgcatgcggacagggactgtgatgattccgggtgtgactcagctgacagagaaggacctcaagtaccggctgcaggcgtccagggccaagtccattatcaccagtgactccctagctccaagggtggatgccatcagtgccgaatgcccctccctccagaccaagctgctggtgtcagacagcagtcggccaggctggttgaacttcagggaactcctccgggaggcttctacagagcacaactgcatgaggacaaagagtcgagacccgctggccatctactttaccagcggaaccaccgggggcccccaagatggtcgagcactcccagagcagctacggactgggttttgtggccagcggaagacggtgggtggccttgaccgaatctgacatcttctggaacacgactgacactggctgggtgaaggcagcctggactctcttctctgcctggcctaatggatcttgcatttttgtgcatgagctgccccgagttgatgccaaagttatcctgaatactctctccaaattcccgataaccaccctctgctgtgtcccaaccatctttcggctgcttgtgcaggaggatctgaccaggtaccagtttcagagcctgaggcactgtctgaccggaggagaggccctcaaccgtgacgtgagggagaagtggaaacaccagaccggtgtggagctgtacgaaggctatggccagtctgaaacggttgtcatctgtgccaatccaaaaggcatggtggatgatgagggcaacgtcctgcctcctggagaagaggggaatgttgccgtccgtatcagacccactcggcccttctgtttcttcaattgctatttggacaatcctgagaagacagctgcatcagaacaaggggacttttacatcacaggggaccgagctcgcatggacaaggatggctacttttggttcatgggaagaaacgacgatgtgatcaattcttcaagctaccggatcgggcctgttgaagtggaaagtgccctggcagagcatcctgctgtcctggagtcggctgtggtcagcagcccagaccccatcaggggagaggtggtaaaggcatttatagtccttactccagcctactcctctcatgacccagaggcactaacgcgggaactccaggagcatgtgctgccaaagacggtttctggaaagatccaaaggagtaaattgcgaagtcaggagtgggggaaatgaggtgcaccccaggaaggccccgtagacctccgaagactccacaagaaactaatggatcactggtcagtccccatggggagcatcatctcttcgaccctaaagatgtcaaaggtgtgcagcttccaaacggcatccccaggatcactgggcaatgctggaaagagcaaaagaatatcattggccctgatcacatagatgctgcgccgcctagcaaatgcttggtggttcgacttctccctctgtctgggggcaggctcagcatctgcccactggtctcactaagagctttcagatttccctccataggacaggttaccatagacttggggcacttgtgggtactcattttctgccagtgggaatgtaaaggcttcatcctttgtatgtaaccatttggcaaaagtatgcaggaacataaaataaaatatcctttagctcagaaattctatcttcgggagtcaccacaaaagaaaaaaatcaaaatgcagaaaatgtgtggtgcactaagatgatcacacagcattaaaactaaaaaaaaaaaagaaaaaattaacaattaacatccaaacaacaaggaaatgattaacaaaattgtagtagattaactcaattacatatgatgtagccactaaaatatttgagagcagtttagtatgtcttgggaaaagtgtaagctatattaattttaaaaatcagagcaaaaatattcatactggagaatcccaactctgaaaaataaagggaaaactgtggttaattgtaatcctcctggagattgaggagggagggagagaaaataatggatggtagtttttcttcttcctttttccattacatttctgtattttccaagtttttgtacnaagcacatanaactattttaatgaaaaagttatgttaaagaaagcatactctgcttcatgtctagttcttcctccacatactcatacatcaaccccaaagactgctgtattatgtctgtattagtcagcattctccagagaaggagaagcaataggacatatatagacataggagaggggatttatgatgggaattggctcactcgattttggaggctgagaagttccacaatctaccatctgcatgctggagatccaggaaaccccgtggtataattccatctgagtccaaaggccgttgtggaggctggaggtctaggatcaggggttggcaaggttggtttcattctgaggatgtttccttggtttgtagatcgccgtcttctccctctgtcttcacgtggtctttcttctgtgcatgtgtgtctggggcccaatctcctcttcttctaaggacacctggtatttgtcatatgcctcggctcctcaaactgcagcaaacaaactctatggaagagaaaaaaatgggactccagagacttgaaatcacngccacttgtcagatgcagcccccaactcagctgcaggagcttagccaaatttctagtcctctctgagcctcaatttccttatctataaaatggggctctggatacctctcttgtagagttcttgtttagattacatgtgagcacttctataaaacactgaac

SEQ ID NO: 511211 - DNA, 3367 bp, Homo sapiens
  misc_feature (2654)..(2654): n is a, c, g, or t
  misc_feature (2664)..(2664): n is a, c, g, or t
  misc_feature (3205)..(3205): n is a, c, g, or t
ggacgcgtgggtcgacccacgcgtccggaagttccctgtgggaggctgttttctgagggagctgagtgtttacagccactcagccctgctctgctcagctgaagcagagaccatggctgagacacctagtcctccaggcactgaggaactccagggcattctgtgggtctcatgggaagccagcacctctacctgttcctcagaagatcgtggccacctgggaagccatcagcctgggaaggcagctggtgcctgagtacttcaacttcgcccatgatgtgctggatgtgtggagtcggctggaagaggctggacaccgccccccaaatcctgccttctggtgggtcaatggcacaggagcagagatcaagtggagctttgaggagctggggaagcagtccaggaaggcagccaatgtgctggggggtgcatgcggcctgcagcctggggacagaatgatgctggtactcccacggctcccggagtggtggctggtcagtgtggcttgcatgcggacagggactgtgatgattccgggtgtgactcagctgacagagaaggacctcaagtaccggctgcaggcgtccagggccaagtccattatcaccagtgactccctagctccaagggtggatgccatcagtgccgaatgcccctccctccagaccaagctgctggtgtcagacagcagtcggccaggctggttgaacttcagggaactcctccgggaggcttctacagagcacaactgcatgaggacaaagagtcgagacccgctggccatctactttaccagcggaaccaccgggggcccccaagatggtcgagcactcccagagcagctacggactgggttttgtggccagcggaagacggtgggtggccttgaccgaatctgacatcttctggaacacgactgacactggctgggtgaaggcagcctggactctcttctctgcctggcctaatggatcttgcatttttgtgcatgagctgccccgagttgatgccaaagttatcctgaatactctctccaaattcccgataaccaccctctgctgtgtcccaaccatctttcggctgcttgtgcaggaggatctgaccaggtaccagtttcagagcctgaggcactgtctgaccggaggagaggccctcaaccgtgacgtgagggagaagtggaaacaccagaccggtgtggagctgtacgaaggctatggccagtctgaaacggttgtcatctgtgccaatccaaaaggcatggtggatgatgagggcaacgtcctgcctcctggagaagaggggaatgttgccgtccgtatcagacccactcggcccttctgtttcttcaattgctatttggacaatcctgagaagacagctgcatcagaacaaggggacttttacatcacaggggaccgagctcgcatggacaaggatggctacttttggttcatgggaagaaacgacgatgtgatcaattcttcaagctaccggatcgggcctgttgaagtggaaagtgccctggcagagcatcctgctgtcctggagtcggctgtggtcagcagcccagaccccatcaggggagaggtggtaaaggcatttatagtccttactccagcctactcctctcatgacccagaggcactaacgcgggaactccaggagcatgtgaaaagggtgactgctccatacaaataccccaggaaggtggcctttgtttcagaactgccaaagacggtttctggaaagatccaaaggagtaaattgcgaagtcaggagtgggggaaatgaggtgcaccccaggaaggccccgtagacctccgaagactccacaagaaactaatggatcactggtcagtccccatggggagcatcatctcttcgaccctaaagatgtcaaaggtgtgcagcttccaaacggcatccccaggatcactgggcaatgctggaaagagcaaaagaatatcattggccctgatcacatagatgctgcgccgcctagcaaatgcttggtggttcgacttctccctctgtctgggggcaggctcagcatctgcccactggtctcactaagagctttcagatttccctccataggacaggttaccatagacttggggcacttgtgggtactcattttctgccagtgggaatgtaaaggcttcatcctttgtatgtaaccatttggcaaaagtatgcaggaacataaaataaaatatcctttagctcagaaattctatcttcgggagtcaccacaaaagaaaaaaatcaaaatgcagaaaatgtgtggtgcactaagatgatcacacagcattaaaactaaaaaaaaaaaagaaaaaattaacaattaacatccaaacaacaaggaaatgattaacaaaattgtagtagattaactcaattacatatgatgtagccactaaaatatttgagagcagtttagtatgtcttgggaaaagtgtaagctatattaattttaaaaatcagagcaaaaatattcatactggagaatcccaactctgaaaaataaagggaaaactgtggttaattgtaatcctcctggagattgaggagggagggagagaaaataatggatggtagtttttcttcttcctttttccattacatttctgtattttccaagtttttgtacnaagcacatanaactattttaatgaaaaagttatgttaaagaaagcatactctgcttcatgtctagttcttcctccacatactcatacatcaaccccaaagactgctgtattatgtctgtattagtcagcattctccagagaaggagaagcaataggacatatatagacataggagaggggatttatgatgggaattggctcactcgattttggaggctgagaagttccacaatctaccatctgcatgctggagatccaggaaaccccgtggtataattccatctgagtccaaaggccgttgtggaggctggaggtctaggatcaggggttggcaaggttggtttcattctgaggatgtttccttggtttgtagatcgccgtcttctccctctgtcttcacgtggtctttcttctgtgcatgtgtgtctggggcccaatctcctcttcttctaaggacacctggtatttgtcatatgcctcggctcctcaaactgcagcaaacaaactctatggaagagaaaaaaatgggactccagagacttgaaatcacngccacttgtcagatgcagcccccaactcagctgcaggagcttagccaaatttctagtcctctctgagcctcaatttccttatctataaaatggggctctggatacctctcttgtagagttcttgtttagattacatgtgagcacttctataaaacactgaac

SEQ ID NO: 511212 - DNA, 122 bp, Homo sapiens
gcgcactatagggcgagttctccatcacctacaagcccgtaaagcatggcctggcccggcatcggggcacccactcctcccgcttcatccctcccaagtattgctcagcggggtaccgagct

SEQ ID NO: 511213 - DNA, 135 bp, Homo sapiens
gtagtcaatcaaagctgtggtgtataccttaatgaagaacagcatgtcaaaagacaagatgaggcagaaagctaggcctcttttgcaaaacagccaatgttgtgaattcacaggaaaagtctccagtgaaattta

SEQ ID NO: 511214 - DNA, 2887 bp, Homo sapiens
  misc_feature (2725)..(2725): n is a, c, g, or t
ggacgcgtgggtcgacccacgcgtccggaagttccctgtgggaggctgttttctgagggagctgagtgtttacagccactcagccctgctctgctcagctgaagcagaaaacagagaccttttgcattactttggttcaagagcaagacaggaggcgactgcatgagaccatggctgagacacctagtcctccaggcactgaggaactccagggcattctgtgggtctcatgggaagccagcacctctacctgttcctcagaagatcgtggccacctgggaagccatcagcctgggaaggcagctggtgcctgagtacttcaacttcgcccatgatgtgctggatgtgtggagtcggctggaagaggctggacaccgccccccaaatcctgccttctggtgggtcaatggcacaggagcagagatcaagtggagctttgaggagctggggaagcagtccaggaaggcagccaatgtgctggggggtgcatgcggcctgcagcctggggacagaatgatgctggtactcccacggctcccggagtggtggctggtcagtgtggcttgcatgcggacagggactgtgatgattccgggtgtgactcagctgacagagaaggacctcaagtaccggctgcaggcgtccagggccaagtccattatcaccagtgactccctagctccaagggtggatgccatcagtgccgaatgcccctccctccagaccaagctgctggtgtcagacagcagtcggccaggctggttgaacttcagggaactcctccgggaggcttctacagagcacaactgcatgaggacaaagagtcgagacccgctggccatctactttaccagcggaaccaccgggggcccccaagatggtcgagcactcccagagcagctacggactgggttttgtggccagcggaagacggtgggtggccttgaccgaatctgacatcttctggaacacgactgacactggctgggtgaaggcagcctggactctcttctctgcctggcctaatggatcttgcatttttgtgcatgagctgccccgagttgatgccaaagttatcctgaatactctctccaaattcccgataaccaccctctgctgtgtcccaaccatctttcggctgcttgtgcaggaggatctgaccaggtaccagtttcagagcctgaggcactgtctgaccggaggagaggccctcaaccgtgacgtgagggagaagtggaaacaccagaccggtgtggagctgtacgaaggctatggccagtctgaaacggttgtcatctgtgccaatccaaaaggcatggtggatgatgagggcaacgtcctgcctcctggagaagaggggaatgttgccgtccgtatcagacccactcggcccttctgtttcttcaattgctatttggacaatcctgagaagacagctgcatcagaacaaggggacttttacatcacaggggaccgagctcgcatggacaaggatggctacttttggttcatgggaagaaacgacgatgtgatcaattcttcaagctaccggatcgggcctgttgaagtggaaagtgccctggcagagcatcctgctgtcctggagtcggctgtggtcagcagcccagaccccatcaggggagaggtggtaaaggcatttatagtccttactccagcctactcctctcatgacccagaggcactaacgcgggaactccaggagcatgtgaaaagggtgactgctccatacaaataccccaggaaggtggcctttgtttcagaactgccaaagacggtttctggaaagatccaaaggagtaaattgcgaagtcaggagtgggggaaatgaggtgcaccccaggaaggccccgtagacctccgaagactccacaagaaactaatggatcactggtcagtccccatggggagcatcatctcttcgaccctaaagatgtcaaaggtgtgcagcttccaaacggcatccccaggatcactgggcaatgctggaaagagcaaaagaatatcattggccctgatcacatagatgctgcgccgcctagcaaatgcttggtggttcgacttctccctctgtctgggggcaggctcagcatctgcccactggtctcactaagagctttcagatttccctccataggacaggttaccatagacttggggcacttgtgggtactcattttctgccagtgggaatgtaaaggcttcatcctttgtatgtaaccatttggcaaaagtatgcaggaacataaaataaaatatcctttagctcagaaattctatcttcgggagtcaccacaaaagaaaaaaatcaaaatgcagaaaatgtgtggtgcactaagatgatcacacagcattaaaatcgattttggaggctgagaagttccacaatctaccatctgcatgctggagatccaggaaaccccgtggtataattccatctgagtccaaaggccgttgtggaggctggaggtctaggatcaggggttggcaaggttggtttcattctgaggatgtttccttggtttgtagatcgccgtcttctccctctgtcttcacgtggtctttcttctgtgcatgtgtgtctggggcccaatctcctcttcttctaaggacacctggtatttgtcatatgcctcggctcctcaaactgcagcaaacaaactctatggaagagaaaaaaatgggactccagagacttgaaatcacngccacttgtcagatgcagcccccaactcagctgcaggagcttagccaaatttctagtcctctctgagcctcaatttccttatctataaaatggggctctggatacctctcttgtagagttcttgtttagattacatgtgagcacttctataaaacactgaac

SEQ ID NO: 511215 - DNA, 2234 bp, Homo sapiens
ggacgcgtgggtcgacccacgcgtccggaagttccctgtgggaggctgttttctgagggagctgagtgtttacagccactcagccctgctctgctcagctgaagcagaaaacagagaccttttgcattactttggttcaagagcaagacaggaggcgactgcatgagaccatggctgagacacctagtcctccaggcactgaggaactccagggcattctgtgggtctcatgggaagccagcacctctacctgttcctcagaagatcgtggccacctgggaagccatcagcctgggaaggcagctggtgcctgagtacttcaacttcgcccatgatgtgctggatgtgtggagtcggctggaagaggctggacaccgccccccaaatcctgccttctggtgggtcaatggcacaggagcagagatcaagtggagctttgaggagctggggaagcagtccaggaaggcagccaatgtgctggggggtgcatgcggcctgcagcctggggacagaatgatgctggtactcccacggctcccggagtggtggctggtcagtgtggcttgcatgcggacagggactgtgatgattccgggtgtgactcagctgacagagaaggacctcaagtaccggctgcaggcgtccagggccaagtccattatcaccagtgactccctagctccaagggtggatgccatcagtgccgaatgcccctccctccagaccaagctgctggtgtcagacagcagtcggccaggctggttgaacttcagggaactcctccgggaggcttctacagagcacaactgcatgaggacaaagagtcgagacccgctggccatctactttaccagcggaaccaccgggggcccccaagatggtcgagcactcccagagcagctacggactgggttttgtggccagcggaagacggtgggtggccttgaccgaatctgacatcttctggaacacgactgacactggctgggtgaaggcagcctggactctcttctctgcctggcctaatggatcttgcatttttgtgcatgagctgccccgagttgatgccaaagttatcctgaatactctctccaaattcccgataaccaccctctgctgtgtcccaaccatctttcggctgcttgtgcaggaggatctgaccaggtaccagtttcagagcctgaggcactgtctgaccggaggagaggccctcaaccgtgacgtgagggagaagtggaaacaccagaccggtgtggagctgtacgaaggctatggccagtctgaaacggttgtcatctgtgccaatccaaaaggcatggtggatgatgagggcaacgtcctgcctcctggagaagaggggaatgttgccgtccgtatcagacccactcggcccttctgtttcttcaattgctatttggacaatcctgagaagacagctgcatcagaacaaggggacttttacatcacaggggaccgagctcgcatggacaaggatggctacttttggttcatgggaagaaacgacgatgtgatcaattcttcaagctaccggatcgggcctgttgaagtggaaagtgccctggcagagcatcctgctgtcctggagtcggctgtggtcagcagcccagaccccatcaggggagaggtggtaaaggcatttatagtccttactccagcctactcctctcatgacccagaggcactaacgcgggaactccaggagcatgtgctgccaaagacggtttctggaaagatccaaaggagtaaattgcgaagtcaggagtgggggaaatgaggtgcaccccaggaaggccccgtagacctccgaagactccacaagaaactaatggatcactggtcagtccccatggggagcatcatctcttcgaccctaaagatgtcaaaggtgtgcagcttccaaacggcatccccaggatcactgggcaatgctggaaagagcaaaagaatatcattggccctgatcacatagatgctgcgccgcctagcaaatgcttggtggttcgacttctccctctgtctgggggcaggctcagcatctgcccactggtctcactaagagctttcagatttccctccataggacaggttaccatagacttggggcacttgtgggtactcattttctgccagtgggaatgtaaaggcttcatcctttgtatgtaaccatttggcaaaagtatgcaggaacataaaataaaatatcctttagctca

SEQ ID NO: 511216 - DNA, 130 bp, Homo sapiens
agaatggcttaacccgggaggcagagcttgcagtacgccgatgagaggcacggcggatcacaaagtcaggagttcgagagcagcctgggctattcaagcgcctctcggggtaccgacgctcgaagttcga

SEQ ID NO: 511217 - DNA, 1071 bp, Homo sapiens
aggagaccatgtccgggggcagcagctgcagccagaccccaagcctgggccatccccgccactcgccggcgtggtgctcggcgacggcgtgcagcatcccgccccggggactacagcacagaccccggccgtccaacgctctttcagcaaccaccccgggagggtaccaggcatcatcctctgaccgggaacattcctgatgcgcacgtgtcggaactcaccttgtgaccaaaaacaaccccccaagggaatctgcccaaccattccgggggctcaccaaggccccttttccagtgatgaagccccgcctatggaaacgccatgcccaagaagcccaccttgcgccacataagccgccagaagagcattaccgcgagcccgcgacctggttcgacacgacgtccacacgtttgtgcacacattgcgcccattgcacacccgccacccaggccaatccgttgctgcacgcacactaccccaagggggcgcccccttccagcgccccctttcccttggcggcacgggagcagtttccccaagccaaggccccatggcgcccctctcactgcgaaccgctgaactccactacccttggctccccaagaccgttatccagccgatttgcgccgctccagcagaagaaccccgaaacgcccccctatatctctcccccccatcacaacattcaagggcgcacaccccactctcccacccccatctccccatacacttccccatcagaaaaccacccataatgccacagaaatatacctcacccatcattttgaccgccccatcacaaacattcgcatatccccatgcacacacccctgccccaccaccccacaaaagggctgcgacctcggataggaaacccgccgcacgtggccccaacgacacacacgccccccctatcgacaacgcccaacacgagggacgccacagaggcggacacacgccgtggcgaccaaccgcgcgtacacgcgaaaagacggccgcctgttgaccgcatttaccccggacagcaggttggacactcccgtgccataatagtgtcgccgaggacgcccc

SEQ ID NO: 511218 - DNA, 456 bp, Homo sapiens
ttcatccagtagatatggatgggattggtgtcacccttgacatgatctacagagaacatacttcatttctattctcttaaatattttgacactctgttttctgaaaatcagattttaatttattgaaggaatcatttattgaagaattgtaaatggtcatctccttccaactgtcctaaatattcattagctctggtcgagccaggtgttaattcagtataaatgattcaacaagaaggggtctgatagtgctgtatgtacagaaagtgggttgtcctgggaaataaagtttcccatttttgcatagccaagggaatagcatgctacagtgtaaaagagcaatcttttgagttgttttttcagatattttcctctattttttatggttcttttgttatgttttttcggtttctaacatgtttttgattacatatttagcattgtttccatgtgaaa

SEQ ID NO: 511219 - DNA, 116 bp, Homo sapiens
agtttcttcactcctaagcttcatatgtgtccttccggcctcaaaatttctgctatcattactgttctttcctcctttggatcttcctttggttccccagatgccagcaacttcca

SEQ ID NO: 511220 - DNA, 107 bp, Homo sapiens
aagccgcttgttgtagacaagtagtgtaaggaccagaggctaccatcctccccgaagggatctgagtccaagatctgggttatagctggtagatgtttagagttcga

SEQ ID NO: 511221 - DNA, 656 bp, Homo sapiens
aatgggaaagctgtcttcaagctaccaagggaatttgtgaaactagaagaactagcccttatggggaggagagtataacgagccccctctgtgtccacacacacgtggcctacaaacccacttttctatgaggtttcgcactaagcttctctggaaaatgtacacggaaggaggctgcttcctgaagcgcaccggtggccaaaggaggcttgcccaacacaccggggagtcccgagcctcaccctgaggctaacctgtccaagtggctgcaccagccctaatgtggaggaagcgacacgcacggctgcatctggagagcactgctgctggagacaggccacccgagctctctgacgtcctgagacggctgcggacactggctccttccacgtctcaccaggcagacacgtctgcctaggagcccacgtgccgcaggcctggagtcagaaccccacggagtcagagcctttcttggggttcttcctggccacgagcttgtgcacccagccccatggcctcttccaggcgtgctcatgcgccacaaacccgcggccagccccaccggggtggccgctcagaccttctctgcccctccttgggaattctgtcaattcgtgggtgctttcagagtaaaatcaatgagttttctgagcaga

SEQ ID NO: 511222 - DNA, 373 bp, Homo sapiens
gcacgagcaaagtttaaaaaatttatatagattagataatgaaaatatttatgctcataaagatgaattaattgcaatgtttgataatgatttaacatttcttacttcaacatgcggtgatgtagttgaatctgaatatggttcaaagtacttgttttgtcaatcaggtatagaaaaacttcaaacttatgaaggacctttgtatgaatcaccaaatgaataaaagggaaatatctacatagatattatcaaactataaacattcaatttatgaaattcttttggtaaaggcaatgaacatgaatactggttatgacactcggaccttattctttttggaacttacattctgaacaacaattaaaaaaaatta

SEQ ID NO: 511223 - DNA, 287 bp, Homo sapiens
cctcgaccaagacggttgatggcctccagtcatgaactgtggctcatgccatgcagagctctctcctcgtcgagcaggtcgccatgccatggcgtgctataagacctccagtgcatcaacatccatcttgcagagagaacaggggcactgaagcagctatgtctgccatggtgctaggggctcccttgcagactcgccaactgtctacaatatacgtgacacagaacggtgggggaggtgggaggagccctactttttactcaccagagtccaatcagcatcttgtg

SEQ ID NO: 511224 - DNA, 152 bp, Homo sapiens
agagacagatagaatgagctggacctagctgatatggtgttgtagcactgtgaacgctctgtgtgctgtgtgttgatacgcaccgtgtgaagctctctggtcctgggtgttgatagcaccgtgtgaagcgctctggatctgggtgttgatag

SEQ ID NO: 511225 - DNA, 413 bp, Homo sapiens
caaaagttgagcagtagctgtgagttgctggcgctggaggaatttcggtggcacgtggaagcaggcgttggaaggtagggggctgaaggaaggcaagagcgggcaagggccttcttgctaagccgcttgggtctcgggaatacccggtttcttcctgtaggtgtgggacgtgcgtgcggcgagatggacactcccccgctctcggattcggagtcggaatccgatgaatcccttgtcacagacagagagttgcaggatgcgttttcccgagggcttctgaagccaggcctcaatgtcgtgctagaggggccgaagaaggcgtgaacgacgtgaatggctgaagcaatgtttggcagaattcaagcgggatctggaatgggttgaaaggctcgatgtgacactgggtccggtac

SEQ ID NO: 511226 - DNA, 281 bp, Homo sapiens
  misc_feature (41)..(41): n is a, c, g, or t
  misc_feature (65)..(65): n is a, c, g, or t
  misc_feature (85)..(85): n is a, c, g, or t
  misc_feature (114)..(114): n is a, c, g, or t
  misc_feature (117)..(117): n is a, c, g, or t
  misc_feature (137)..(137): n is a, c, g, or t
  misc_feature (166)..(166): n is a, c, g, or t
  misc_feature (185)..(185): n is a, c, g, or t
  misc_feature (194)..(194): n is a, c, g, or t
  misc_feature (223)..(223): n is a, c, g, or t
gccccatttttcttaaaatggcttccaaaaaagaatgtaancaatttgtgatctggccagttgtncttttagctcccaaaggganagttggtggtattatgagttgagtaaaanccntccaggggaacttgagggancagtttgttgccagtaatgttccttgtgngccattaaaccccctccanatgagtggnggaacatccctttttaattttttaattgnatttggaattgttgccgggtattaaaaacttgccctaaataaaatcccccaaagtata

SEQ ID NO: 511227 - DNA, 128 bp, Homo sapiens
  misc_feature (85)..(85): n is a, c, g, or t
  misc_feature (90)..(90): n is a, c, g, or t
gagggcatcccgttggggatccttccgcacactgaagagtacgtcttcgggtctacccctaatcacataatgaaaagtcccctcnctganggctgtttcggatatgaccaaagagtttcgaatttttt

SEQ ID NO: 511228 - DNA, 86 bp, Homo sapiens
gaagaagatggggaaatgagagaatagcatctttgtgggggatttttttatatatatttctagacaataaagattgtatgtttttc

SEQ ID NO: 511229 - DNA, 320 bp, Homo sapiens
tgcctctactggacaggccctttgatgagactacctatgaagagacagaagactgagcctttctggtgctcctagagggggataattcctcccaggacagtgtgtggcctttctgagccaattccaggaaccacacttcagtgaccacttcatgtgaaagacatttctgaagctactgaaggtggccaccttcactccaaatggcattttgtaaatagtaaaaaaaccaaactgcttcacattcttcctctgtttgctaagtctcacacacacacacacacatatgattactttgtccattaaaaatgttttattttata

SEQ ID NO: 511230 - DNA, 126 bp, Homo sapiens
  misc_feature (54)..(54): n is a, c, g, or t
ggtgatctagaggatcccggccggtatgaaatactatctacctaatctctaggntctggcatagacttataacattcatcacacactatgtatttattgagctggcaagttagatggtgatatcta

SEQ ID NO: 511231 - DNA, 325 bp, Homo sapiens
acatacaaaaaaaggcctctgattgtctggatactgacctcctcggcatctctccccttcccctctgcttgcgtttgcctgtgctggcctgttcctttttcgctcctgctcatccccctgtgctgcctgtgtgctctgcctgcgtctgctacttctcctccggcctctgctcttcttccctccgcggtttggcctccctgtcctcttgctattgtctcccctccccctccccacccctcctctataatcatcaccctagtttattttcttcatagcacttaatcactatctcatactacattatttatttgtttacttatcatct

SEQ ID NO: 511232 - DNA, 1020 bp, Homo sapiens
  misc_feature (967)..(967): n is a, c, g, or t
  misc_feature (989)..(989): n is a, c, g, or t
  misc_feature (996)..(996): n is a, c, g, or t
  misc_feature (998)..(998): n is a, c, g, or t
  misc_feature (1000)..(1000): n is a, c, g, or t
tgtacgcactcgaaatatgtcccactcatgagtcttaaacacactcctcggcaagtgggcagcggtaagattcacctccagaagttcccttggtttggtcaaactcgcttatttgagtgcgtaatagggaaacacggcttgtttgggccactgcttagggccaagttcgcgagctcgataatgtcctgccatcttaaaggggaacattgtagcgccgtaccgtgtagttacctgtgccaagatcttttttttcacactgtccaattgacgaataatgtatcttcggacggaaatccctttgggattaaagttgtggttacaaactgttcggttaacgtgaaagcctgttgattccttgcagaactcaaatcgtgtgggtcctcggtatccaagtccaggtatcacacttgcctagtgcgaagccatagcttagatcttgtctgggtaaagctgtctttgtggaagttaataacaagtacttgaggcatagacttgcggtatagttccagttgcaaacccactggttaaccatgtgcttatcccatgggaagcagttggttaccgattcttattctataagaaacagttgagaggctatctcatggattagtcttctgaatgaaggtaatatttgtttgtttatccttttttttttttttttttctttttttttttttttaggcatagaagccagttcagggtccataatatttagtgaccaacattttaaagtatagcagcaacctggttcttaaacacaaagtaagttgcccattaacaaatggcttttatctttagcatgaaaactttccacaggtctaaaaattgcttccattttataatttgaggtgttgcatgggaattctaagctgatccatcatgatgtaaaagttcacaatatggttcaaatgtaacagtgcagaattgaatatggaggcatgcataaccttcctcttagaaaatggcnggtgttgtaatttccaattttngtgcatnanantaaatcataatgccaccgta

SEQ ID NO: 511233 - DNA, 861 bp, Homo sapiens
  misc_feature (446)..(446): n is a, c, g, or t
  misc_feature (453)..(453): n is a, c, g, or t
  misc_feature (464)..(464): n is a, c, g, or t
  misc_feature (474)..(474): n is a, c, g, or t
  misc_feature (487)..(487): n is a, c, g, or t
  misc_feature (490)..(490): n is a, c, g, or t
  misc_feature (808)..(808): n is a, c, g, or t
  misc_feature (830)..(830): n is a, c, g, or t
  misc_feature (837)..(837): n is a, c, g, or t
  misc_feature (839)..(839): n is a, c, g, or t
  misc_feature (841)..(841): n is a, c, g, or t
ctgctggccaaatcttttgttccgtattgaccgggtcgtctgccatctataggcagattgggatccaagaatcccccatttagggacctttagacccgacacttggagttaccgccagattttttttcaacgtcaatgtgaaaaatgttttgtggagaacccgtgggataaaattttgggtacagagtggttcgtgtaagctggaacccgtgtgtttccggccacagctcacaatctgctgtggagcgttggggacccaagatccaggtatacacactccctagttgtgaacccacacattatattttcttgtaaaaggcttttgaattataaaatattagcataattgggtatagtcagttgaacccccgggtgacccctgttcttatcccctgggaacccttgggttacacgagtcttattttatacagagcccctgagaggcnctatggnttagtcttctnaagtgaaggnaatatagatgtcnccnaagtgatagttaacccttttttttttttttaggcatagaagccagttcagggtccataatatttagtgaccaacattttaaagtatagcagcaacctggttcttaaacacaaagtaagttgcccattaacaaatggcttttatctttagcatgaaaactttccacaggtctaaaaattgcttccattttataatttgaggtgttgcatgggaattctaagctgatccatcatgatgtaaaagttcacaatatggttcaaatgtaacagtgcagaattgaatatggaggcatgcataaccttcctcttagaaaatggcnggtgttgtaatttccaattttngtgcatnanantaaatcataatgccaccgta

SEQ ID NO: 511234 - DNA, 623 bp, Homo sapiens
aagttctgattctggattaccacttcccataccacggctggaatattgaaatctcccacgagctcatatttcactctccctcgagtgtcacgcccacgtgaggagaaaatccacgtgtaccacctctcttaaaaggagattgtccacgtgataaaagttctccgattatccaaacatttgtatagcccgccttttaaacccagttgctgttgacgccagaaagaggagttaagagccgccatttgtggctacctgtgaaaaaggacttatgaataatgatcacccaaaactcaccagaacgccacaccagacctggagctgtccaccccttgacttaaagaagagagaaactcgccgcgccggacgccaatatccaaatttccacccatagcccagattttatgaagaaatggaccttggaaagggaattcttacaccagagaagagcgttaatatccgggagaaattttaggaagatgtcttgttaacccctgatgtctagagattgggggctggtgaagggggtttggcttccatgaactggataatgatatctttcactgagagagattataagaagaagggccgataaatatatgaataagttccgccccaaggatcca

SEQ ID NO: 511235 - DNA, 609 bp, Homo sapiens
  misc_feature (252)..(252): n is a, c, g, or t
  misc_feature (286)..(286): n is a, c, g, or t
  misc_feature (302)..(302): n is a, c, g, or t
  misc_feature (324)..(324): n is a, c, g, or t
  misc_feature (348)..(348): n is a, c, g, or t
  misc_feature (397)..(397): n is a, c, g, or t
  misc_feature (441)..(441): n is a, c, g, or t
  misc_feature (469)..(469): n is a, c, g, or t
cggctaacggaactttcgtgacacatgattaaaaagtcatggaacattcaaaaacgtaaacagaaacatcaggacataggcatgagatgtgccacacaacagttcaacacatgccacctattgtttaagagagtacctgagaacacctgctctgtggaactagtcgtgtaaatactagattaaaaacggcacttaagtatcaagcaatcatgtactcatctatgttccacccgtgtttactttgactaaagncagtgttattactgtgacaatgacttatgggccnatttctaagaatacanagcttccccatgtaaaatgtgntgatgaaacaaggtacatctaaanactgcagaaaggaattcccagaatgattctaagtgattctccacaccgnatccctgtggtcacatttaagcgagattaacttctcgtcatganacgccttcttgtggacaacagatcacanctattttgatgtagaaattgttttcaaactagggaccctacctgacatttacatggattaaaagaagaaacaggttgctataattactaaccctaaactcctctgatttgaaagtccgttgaagccgtcgggtaccgagc

SEQ ID NO: 511236 - DNA, 626 bp, Homo sapiens
  misc_feature (211)..(211): n is a, c, g, or t
  misc_feature (218)..(218): n is a, c, g, or t
  misc_feature (229)..(229): n is a, c, g, or t
  misc_feature (239)..(239): n is a, c, g, or t
  misc_feature (252)..(252): n is a, c, g, or t
  misc_feature (255)..(255): n is a, c, g, or t
  misc_feature (573)..(573): n is a, c, g, or t
  misc_feature (595)..(595): n is a, c, g, or t
  misc_feature (602)..(602): n is a, c, g, or t
  misc_feature (604)..(604): n is a, c, g, or t
  misc_feature (606)..(606): n is a, c, g, or t
aactcaatttttgtgagctttggtcccagtccccgggtttaactttcctttttgaaacccatactttttttttcttgtaaagggcttttgatttattaaaaatttagcacattgtgttgtagtcatttattccccccgtttgccctgttttttttcctcggggggcagttggttgccccttttttttttttttattaacagctgttaggcnctatggnttagtcttctnaagtgaaggnaatatagatgtcnccnaagtgatagttaacccttttttttttttttaggcatagaagccagttcagggtccataatatttagtgaccaacattttaaagtatagcagcaacctggttcttaaacacaaagtaagttgcccattaacaaatggcttttatctttagcatgaaaactttccacaggtctaaaaattgcttccattttataatttgaggtgttgcatgggaattctaagctgatccatcatgatgtaaaagttcacaatatggttcaaatgtaacagtgcagaattgaatatggaggcatgcataaccttcctcttagaaaatggcnggtgttgtaatttccaattttngtgcatnanantaaatcataatgccaccgta

SEQ ID NO: 511237 - DNA, 402 bp, Homo sapiens
  misc_feature (326)..(326): n is a, c, g, or t
aaatatcaatatagaggtttctcaaaagattaaacatagaactaccatacaatgcagcaatcccatttctggatatataaaaagttgaaatctggaactcaaagagatatctgcactcccatgtccattgcagcattattcacaaaagctaagatacagaaacgacacagacatccatcaacagatgaatgcagaaagaaactgtagtagatgtagtcatacaatggaatagtatccagccttgaaaaagaggggaatcctgttacgtaagacacatagataagacttgaggacattatgctaaatgcataaatcagtcacaaagngacaaatgctgcatgattccacttcaataaggactctaacgtcatcaaactcaaagaaaacagaagtagaagggta

SEQ ID NO: 511238 - DNA, 597 bp, Homo sapiens
agagcggggacgccgagcctcccccgcaacctcccccgccgcgccgcgacgccgcgccgggagagcctggccccggtccccgcggcccgcgctacctgccgccgctgcccgcgtcccccgagacccccgagcgcgccgcggggccaagcgagccgctaggggaggtggccccgcggtgcaggggagcggacgagctgccgccttccgccccttgcccccttgcagcccggccggccaggaatgtggcgggcgggccggggactccggggaaggtccgagggcgccttcccggaggcggcagcagcgaagggcgggccccgggggagtctgagggccgggcgcggtgcggcagagcgcagaagcggagggaggcggccggaaaaccagcccgagacgcgctcggttgttgcagcagccgcagaaggcaaggcagttggcggggacggagaccaagcggcggctggggcacccagcacccagaaccaaccagcccattctggcaagatctggctccaagggccgcggagcagggataggttggggacccccttgccgatgtgatgggccagatcggtatacccttcggtttgtcctgta

SEQ ID NO: 511239 - DNA, 460 bp, Homo sapiens
ggccccagctgatactattaacctcgttgggtctcaggcatgctagcctgttcatctgtaattcacacaggcataaaaatgagttcagaatctatttcactaattatttagctgggatttggatttccctgacatgcttaatacaattacaatacctgtgtacaaacagaggcctgaggaaagaggcaaaatttgcttttcatccaaacagcaacaaaaggcagttgaaaccttcaagcctgttggttgcttttaaacctttgtgttattatgatatatattctttgttgagcactgaggtcctgagggatacatatctcttgctgttttctgcctacttttgactagctgtatgtaacaaaggctctacttttgctctgtcactgttcctacagtcctgttctttactagctagattagcctattttgcacctattaaattctaaaaaccttgtttaaa

SEQ ID NO: 511240 - DNA, 1572 bp, Homo sapiens
  misc_feature (990)..(990): n is a, c, g, or t
gcaagaaaccacaagaccccgagagtctgctgcataacttgttcctgatagacttggctctactccttgggtgcatattgggttcacaccctcatgagaattctataagtgccatttacagctaccaatctcataagagagagaggttgacatgaaagcagcgcgtcgatgaatctgaaggcactactcctcacgtaagccatggcatgtgagccccgagacatctcctagcactgatgcttctatatatgtgatgctgtcttcatactcgtcagttgacttaggggactgacaaggccttccttaattttgtcgctcaaaaacatggtgccgattcgcagatagtacggacatatggcatcgataagggccagcgaggcaatcgcatcttcgtctcgagacatttcagttaccatcttcgttcccgtgggtatcggcgagcggacgcgagaggctagtcactagggggacccctccccgagaaagtcccgcagggactagtcgccactgtcatcagacggagaccggcacgcaatgtttaaatttctcctgaacgttatcgttccacccagttggaagaactttgtaacttagtgggatttccccaaagtggcccagatgtttacagtggacaaccaaactgagcggcatcacatccatacacacaattgacctcttccttctaaaagtgttcattacacaaacagattaccagaagattgtccttttgggggggtcaccttgtccgaatagcaataggccccattaaatttgaaggagagaacaggaaccgttcgcgaaaatcgtatgaggaattcccaccacagagttgagttaccttgggcgacgctgataataaggataccttctcccctttggaatacgttaactttacgttgtggaggcacaacattttcctctaggtagtaggctatcattggggtggggaacttggggtacccaaaaacggtaagggtttacacggtgcgnccgctgggacgtatggaaccacataggataggcaatgacagaacggctatagaaaagtaacctacggagggggatatacaacggaaaatctgtttgcccccattgtaatgattggtgcttcagttaacacacaacacgctctaaagtaggtcactttccacagggtgcaaccgaactgcatacacccagaagaggacatctgacagacgaccatgtgtactccaacaacagtggtagcacataaaacaaagtggtataccccgcgttctcaccagtcagctaaaacatttccacgtgtgtgtcttccagccacacagggtataagttgagactcacgcgaggggcaaacatcaccgtaaagtggaaagtatgcgttggaacacatcctcccaacagcgtacatgaacccctaggtgttgcaagcaatggcttggatagtctcacgacacatggtgtgaccccccgcagatgtcccaccccatattgggaaagttggttactacacgcataaattggagaccctgcgggaaataacacaccacccgatgtcaataatacacccgcgcatatttagtaactccg

SEQ ID NO: 511241 - DNA, 419 bp, Homo sapiens
catagtagggtacatggattggctgtgtccccatccaaatctcactttgaattgtaatcatccccacgtgtaaaggatggggctagggggagctaactgaatcatgggggcagttgcccccatactgttctgtggtagcaaataagtctcacgagatctgatggttttatcaatgggagttctcctgcagaagctctcttgcctgccactatgtaagatgtgactttgctcctcattctcctttcactgtgattgtgaggcctcccaaagtgctgggatacaggcacaagccactgtgcctggccaaaattaatttttgagcccagcacagtggcccacacctgtagtcccagttactcaggaggctgaggcgggaggattgcttgagcccaggagtttgagtttgtggcatacgatga

SEQ ID NO: 511242 - DNA, 394 bp, Homo sapiens
cgcggccgcgcgactacggctgcgagaagacgacgagggtacggtaggagactcaccgcggtacgcacctcccacttccccaagatggttttagctgctgggggtggtggtggctcacatctgtaaccccagcactttgggaggctgaggcaggtagattgcttgagcccaggagttcgagagcagcctggccaacatagtgagaccccgtctctacaaaaaatacaacaaaaacaataaaaattagcctggcatggtggcaaacacctgtagtcccagcttcttgggaggctgaggtgggagaattgcttgagcccgggaggtcaaggctgcagtgagccgagatgcgccactacattctagcctgggtgacagagtgagaccctgcctcagg

SEQ ID NO: 511243 - DNA, 487 bp, Homo sapiens
  misc_feature (9)..(9): n is a, c, g, or t
  misc_feature (15)..(15): n is a, c, g, or t
  misc_feature (61)..(61): n is a, c, g, or t
  misc_feature (65)..(65): n is a, c, g, or t
  misc_feature (85)..(86): n is a, c, g, or t
  misc_feature (88)..(88): n is a, c, g, or t
  misc_feature (90)..(90): n is a, c, g, or t
  misc_feature (109)..(109): n is a, c, g, or t
  misc_feature (112)..(113): n is a, c, g, or t
  misc_feature (121)..(121): n is a, c, g, or t
  misc_feature (153)..(153): n is a, c, g, or t
  misc_feature (159)..(159): n is a, c, g, or t
  misc_feature (174)..(175): n is a, c, g, or t
  misc_feature (178)..(178): n is a, c, g, or t
  misc_feature (180)..(180): n is a, c, g, or t
  misc_feature (195)..(195): n is a, c, g, or t
  misc_feature (206)..(206): n is a, c, g, or t
  misc_feature (209)..(209): n is a, c, g, or t
  misc_feature (227)..(227): n is a, c, g, or t
  misc_feature (232)..(232): n is a, c, g, or t
  misc_feature (272)..(272): n is a, c, g, or t
  misc_feature (280)..(280): n is a, c, g, or t
  misc_feature (327)..(327): n is a, c, g, or t
ggtttcctnttttcntcctacatagaagtgaggacatgaaatatttgtcattctgtgctgncttntttcatttaatatacagacnngnantctcatccattttgtctgnagnngagaggantttcttcctttttaggctgaataatacttcantgggtntgtataccacagttnnttnantgaaacaaatttctnaagagcaaatnttnttaaaatgtctcggaatntgaancttcagggatactgtgcccattttattcttttctatttcncatcttangtatatgcaagtgtataacaaagcagcaatcaatgtgtgtataaatntataacttcaacaaatgtaaaatgtaaatgctaagtggtggctgggcgcggtcgctcacacatgtaatcccagcaatttgggaggcggaagcgggcggatcacctgaggtcggaagttcaaggccagcctgaccaaaacggagaaacactgtctcatact

SEQ ID NO: 511244 - DNA, 894 bp, Homo sapiens
cgccatgtccgccgttcctgctgcggcggggcctggcagctgctgtgccggcgctccgaggccccccgtggcaccctccaggtcaggccaagccgcacgaggggctccggtgacaaccggccccggaagacgacacgccaatccaggccccagaaactgcgcgaactcgcgccaaggcgaaaggtgcccaacgtcggcaactggaccgagctaccgcgaagccgacgagctgctcgagaccacactcagagctaacaccctgcaccgctccccctggaccaagggcaccgccagcaagccaaccgcacggcctgcagctcctgccgcagccgaacgccagcactccctgggcgcaccacgcacaccgcggcgcccgccacagccaccatcgtggacaccgagcccctggaatgcggccccaaggcacccaaaggcaccggaacacgcaaaagggctccgacccggccacccggcggccaccaaccccgcaaccggccaaggacgctgacccaaggaaacgccatatacccacggcgcaagccgcacagacttaccgctaatcggcgcacaagaccataagcgcgcaacaccccctatggacgccaccggcgccacacccgaggataggacaacgccaagggggcgcccaaactcacacaagcgccccgcgactggacgacggcgcacccgtcccagcgtaaaagccaccacgatggcaccagagaagcaaccacaccacacgagcgaaacgagcgcggggcacaccggaccgcccacctggtgagagactcgggcacaccaaaaggggcaaacgtaaaatatggcgcgcacgagaacagcaggaggcaagtgcaggcacaccccgacaggccccccaatgatggcaacagaatc

SEQ ID NO: 511245 - DNA, 309 bp, Homo sapiens
gaacacattttgatagaatcagagtagaggacattggtgtcttctaaaaagacacgatatggaaaatgacaatccctttcgtctccttcctccgcgtggttcaactaaagcagactcctgactccgcctttgtttcatagtggaggattttattttgcacgggggcctccctcttaatatctaacctaggattattttatccttggcgctcacttcttaacatattcctgtgtctttgtaatggggcaatttttcctttcactcgttcgcacggtacgtcctcctgggggtcattttattccctaccgg

SEQ ID NO: 511246 - DNA, 408 bp, Homo sapiens
ccaggccgagaaaacgcataaggtggaatatcatgagggtgcaacacgcagccctgcatccttaaggcatactgggcctaacataagcatgggcgcatgtgagtggaaagtgcataaaacacagccaacgctccactattctacgcaggagcaggcctcctagtgttaacacatgtgcactggagtctacctaccctcacaggcctggatgttactatagctctgttttctcagtatgcttcctcttcaaatcctctgtaaccacagatggctgctgccaaaaacctggatgacaatcacagagatgacccagtgcagcgccatctttatgactgaaccagttgaggtacctcctgggtagtatttacatgatgcaaaacacgctcaagcatcgccaatactgaagct

SEQ ID NO: 511247 - DNA, 1283 bp, Homo sapiens
gaaggtttcagcctctccccactccccttgccccagcagcctttactccccagtccagagagatgctgcttttaccaggaaagactattgaaagatgttgttattttatgtttctctgacctttccatccttgaacaaacatggggaaataacgaagaagaaaagacataaattcgaccatagagatgagcctaaagattatgatgagaaagaacagatcagagaactgctcccacagcttagtcttccctcgagaacgatatacgtggttttatcccgccatccccttggcatgttgagcgtcatgtggtattctcggacagttactttacttcttgtgtatgcagcacagtgttggcgctttacttgcgtcggatgctggcgcactctctagatacttcccgccacattctagcccatggtcttcaccctccgcgctgggatttccagatccctgatagacccctcgcctatcctttcgtcctgggttgtgtcgccttgggcttgcgtaagcatggtccataggcatatcttcatatatacctccgtggggacccgtgttttggcattgtttaccaatgtgtgccccttcacaactccccgtgggcaagggccaccacgcacgacacgtctctggagaaagttggtctctcgaataatttctagaaagcccccgttgtccccacaaagaaaattatttccccctgtgcctgtgcttgagccaatctcgtgagtctcgtggatgtcgcctgtgtaatcagtttccgccagtcgtgtggctattccgttgtcgtcacccccgtcgttgcctgtcgcccccacctgttgacttgtgtcttgtcttcccctttccggcacatctactattgcctcttattgcctagtcgttgtgtggacgcctttacagacggcccccatagtgtgtgtcccccgcgggtcttctcctgttgtcctcttgtgttgaactcaacccccccttttctcacatatcctctaattaagccgccactgtttgtgagtgaatacaccccacccaaataagggggggtcccccaacaagtagtagtggtggtcttactccacaaccaacagtgtgtgctttgtgcggaaaagaaacacaccaaaccgacataggttttggggcgccacccttgcgacaattttcccgttgggggaaaacaaccaaccacatctgcttttgtgtgttccctctctcacaagtgttgtttattaaacccccaaatagtcgattctccccgtttcacaaccaaccccctgctcat

SEQ ID NO: 511248 - DNA, 437 bp, Homo sapiens
aggacagagaaggcagaaagaaagagagaggggtaacagatgagaagcaaagcagaagggagaagcgcacaaacaaagcaaaaggaaagagaaagaggaggacaagagacagcgagagaaagagcgagagaaacaagacaagaaggagaagaggagaaaagaggaacagagagacaaaggggcggaagagagacaaaagaggaagaataaaagaaggaaatcagagagaaagcgaaaatatagggaggagagaaagagcagggagataaaaataggagaggagagagagaaggaggaaggaagagatacaggtatgagagaagggtgtctgtatgatctctctatgactactcactctctctctgtctctctctctctatctctctctctatctctctatctctctctctctatctctctctactactctctctcta

SEQ ID NO: 511249 - DNA, 579 bp, Homo sapiens
ttgcatagatattaccgaagaggatacatagatggcattagcacacaaaaagatactcaacatcattagccattggaaatgcaaattaaaaccacatgtggtatcattacacacatctatgtgaatggttaagataaaaaatagtagtaataccaaatgctggtgaggatgtgaagaaactggatcaatcatacattgctgtctgaattgtatgagtggctgtatgtaaaaagtagagccactctggaaaaagagtagggtagtttcttacaaaaatatatgtgtttaccatacaacccaacagttgcccttttgagcatttatcccagaagatgaaaatgtatgttcacataaaaacctgtacatgaatgttcacagcagctttattagggcaaaaaactgaaaacaactcttatgtcctttagtgggtgaatggttaagcaaactgtggtacatccataccatggaatactactcagcaatcaaaaggaactgcccccacttcaccacgatacaatatatgcatgtaagaaatctgtacttatacccccattccccccccggtaatatctatgctgc

SEQ ID NO: 511250 - DNA, 353 bp, Homo sapiens
cgatggtagtaagacgtatacgcccagatggtctgaagtaactgaagaatcacaaaagaagtgaaaaggccctgcccaagcttaactgatgacattccaccatcgtgatttgttcctgcccaaccttaactaagtgattaaccctgtgaatttccttctcctggctcagaagctcccccactgagcaccttgtgaccccccagccaaatcctataaaacagccccaccctaggtcccttcgctgactctcttttcggactcagcccacctgcacccaggtgaaataaacagccttgttgctcacacaaagcctgtttggtggtctcttcacatggacgcgccatcgtgcgctt

SEQ ID NO: 511251 - DNA, 205 bp, Homo sapiens
ttctcgtactgtcatggtctggagtcagtaacgggaagttcacccccaagtcttaattaatcaaaatgctgaactctgttcaatcttcatgttaacagcagctttaaagctgggtgatttcttagtccaatgtataacgaagcttttacttatcaatttctttttgggagggagaatgggctgaagtgtgttctggtcgttgtct

SEQ ID NO: 511252 - DNA, 551 bp, Homo sapiens
cggtccgaatacattccagcgtacgtggaggctgggggctcagtgcctggttatcagcagtttgggagtgcgaggcgagctagatcacaaggtcaggagatcaagaccattctggctagcacagtgaaagcctctgtctctactaaaaatacaaaaatattagccaggtgtggtgggatgcacatgtaatcccagctagtcagaaggctgaggaaggagaatcgcttgaacccgggaggcagaggttgcagtgagccaaaattgtgccactgcactcccgcctgggcgacagagcaagactgtctctgaaaaaaaaaaaaaaaaaaaggaccggtggaagagaaattaagggggtcaaacttgtttcttatcagagttatagaagagaaaggtgttagaacattattggaggaattatccctgagatttccaggattatggagggatttaacagaatcgggaagccaaaggattctgaggtgggaaaattcaaaagaattctgcttttagacacttattaaattcctagagctttagggacaaggagatta

SEQ ID NO: 511253 - DNA, 128 bp, Homo sapiens
ggtcactctagagagatcccctccatattgtgtgccagctattatttatgtatatattagtagagacggggtttcaccactgttggtcagactggcctcaatactccaaacctcaggtgatccacctg

SEQ ID NO: 511254 - DNA, 151 bp, Homo sapiens
aggcccgctcctggacttccatctgtcatcaggagaacatgaccatctggcgtcagtacagatcatcaatccttccacatatccagttcattttaaatttttaaaaatattatacaactgagacgtcttcattaaattgttctggtggtac

SEQ ID NO: 511255 - DNA, 891 bp, Homo sapiens
ggaccgacgagtagtaggatctgacagcaagtgtcgtagaatgggtttagtatgagtacaagcgtctttatgaactcttgtgatagatgcccctttgttcaacgcgcattgtgtatttccgtgtatctcaattgtggcaatcttggtaccctggtttcaacgcggcaaccccgtgatattccgtgacttgcctttggaagccgcaaacaggcaatgttacggggcgagtcgcacaccgtcgtgggtctgtactcccacctgctggggattatttggcccccgctaatggggccatttattcctccatgggtcagcagctccccaacgggtaaagagtccgtgtcccccccaatggctatgtctagaagctcgtacgtgggagggcactacttcgcccccacagccgcacttttgttatgaagatgggggcgcaataccaaatactagtgcaaattgccgccacgcagttctgttatgtagcccgccacgaataatttgtgtggagaggagacgaaaaatgcaacatttgggcgcgccccctgttgttctccccacagttcaaaggaacgcgtggtgtttaagagccccccccgctaagagcagcacggttatctgcaattaggacaagccccctcatattagtgatgtgacattgtcccgcgacttggcccccccgtatataggttattggcttctcaaccaaaaccagtgtacttccgcatatgaaaagaggcagcaattttaaatgtggagactcacagatttacagtgcaaggcttggggaaaagcccataggttagaataagtcgctctttcaacccacggccccgcgtttttcccagtggcctaaacaaaggggcgccaaccaaaaatttttcaaacaaaaataac

SEQ ID NO: 511256 - DNA, 214 bp, Homo sapiens
aaggcatcattagcttctgtggttagcaagagtcaggctccctttcaccctccccaatcttctctgcagggtgagccatctcagtcatcattcattcattcattcctactgcaagagctgcacgcagccacagacacaaggcagtccaggcctcagctcaggagggacatgtggagacagagagagctactgctagggttgatcagcataccag

SEQ ID NO: 511257 - DNA, 1661 bp, Homo sapiens
  misc_feature (756)..(756): n is a, c, g, or t
  misc_feature (1319)..(1319): n is a, c, g, or t
tggtgaaaaaaaaaaatttaattaggcacaaaggggaaggggtaggcagttacaaaagggtctagggggtcttctcctctcccaagcgctgtggaaagtatagtataccccgagggaaaaggaagggcaaaggaagcgtgtgtgtgtttttcttctgtgcctttctctccctttcagaggcgtgtgcattacaatatgtggccccatctccagcgcggaattaacctctctctccatgttgagaggaagagtgggttctctctcgagagatgagagtggcgctgtgtcctagcgggaggtgtggacccatatcactctcagcgagaggggtctccccccgagcgctgcggcctatgagggaagagtggccccactgtggcgcgtgtggcccacaaacaagtggtgttgtctcacacacctgttactctcgctgtgtgagagagagcgcgtgtgcctactacgccacgacggtgtggggtgtggtcaccacacacagagaacctcctgatgtgtgtgcgcagcccccacagaatctctcgcgagagccacaagagtgtgggcacgagcgtgtctctagtgctctccaccactttatctctcccgccctctgtgtggacacacgcccgagagagtgtgtgtgccaagcctgtgtgtctctcacacactctgtgacacactctctcagagagagcggcaaacgcccacacacagtgtgcgccgagagtgtcgtgtgacagttgactagtgaccaccccnccagagctgtgtgtgcggcctctccgcgctggtggggtctccgtcgggcatcaccaatatctgtagtgagcgccacaccatactctgctacacccacaggggcacaacacacaagggggcggagagacacttcaccacaattttgtagacaggtcgttgtcgcccaccagtgtagaagaaaatttcatcacacatttctcaacagaagaaaatctctccgggtgtggagaacaatgttctctcctccttccacccagaggggcgtctcttgtggggcgtttctggggcgccccgctctctctgtctacaacaaggtcgtggtggacaacgacgcgccttcagttgtggacctattaagcacccacaaccgccgacgagaaaaagatgccgcctgttgaacaaacatgaggtgttgtagaaaccaggttctgtctacgacaatttccacccacacacagcggtgggcacacaaaaacattatttatcccccaattaatgctggcggcagcatcaagaagaagcgcccctaaacgagaaagcccccgtagtcttatggcgacgancacaccaacaacttccgcagatcctactcatcacaagagaaggcgggtgttccacccgacgcttcatgcggaagcacgtgggaaggtgagcagaacaacaagcggcgcagcaagtgtgtggatctaccaccaataacaacactcattgtgaacgcatactgtgagggacccccccccccaccaacccccggaaaagattgggcgcacagacggggtccaccaactaacacacaccacccacgcagacagagaagcgtctcaccactgtacgccgcacaaaaaaagagtgactgccacctcacccggctgggtgccccaggaggcacccaatgtgccccaggg

SEQ ID NO: 511258 - DNA, 529 bp, Homo sapiens
cagtgggttcgagatcctaattcttgtctttgatttccttttttgtcttcccttttcaaacaagcacatcctgtaggcttttttttggggaatagcctccaagaacagaattcccagttgaagttataacaaagaaacatgagacccagtgcctgagcccaaagtgtgggtgctgctccgagggactgcagggaacatagctctactgtcttcttatctcaagagagagcagtgtgcaggaggagactagaacgtgggacctggaaggaaactggtgcagcctcacatggactcacagaagcaggaactcttggctcccaagtgaacaagactttttcagtccacccaaaggctcaaggctagctgaaaattcatgacacgacaattctcctacattctcatttttctctgttaaaatataactcctctgaacacaagccattccaaagcttgagttcacagctctgatacttaaacaccaattctgacttcataagaggggtagaaaaatacaaagccattttggggg

SEQ ID NO: 511259 - DNA, 342 bp, Homo sapiens
cacgaggatggatgcgcatccggtgaacgacttattgccacggtcggcgcgcgcccggaccatgcgcacaactcatcttcccgggtccgcatcatgatcacgctgcgccagctctaccgctaccccgtcaaaggtctgtccgccgaaccgctggtgcgcgtcgaactgcgcgccggcgaaggcatgccgctggaccgcctgtacgcgctcaccaacggcagctgggacttcgatgccggcagctaccagccacgcccgaagaccgacttcatcgcactgatggaccacccggcactggccgcgctgaccacccatctcgacgacgacgcgcgccgcctcacc

SEQ ID NO: 511260 - DNA, 1029 bp, Homo sapiens
gccgagctggaggagctgggtgtggggtgcgttgcggctgtgtggcggatgtgcctagtttgggtgcaagatagttgtctgattgagcttgtgttgtgctgagagggacagcccctgggtctagtggtagagagtacctgagctgtgatgagcccagtcgttccaccgaggtccccagacgcgctcacgaagtatcctccgcctccatggtgacggggtcactatccctgtgatcaccgcagacagtcgaatagacactgaggtgacagttaatcaagcgcaagtgtcggaaagttgtcctgggaacggctggcagcttgtggggacacatagtttggggaacgtggcacccagtgaatcctcatggagacgtcgtccaagtgtgtgactagtggctcagagggagaagtcaagccttgtccacatcgttacctagccagtgttgaccactcgagagaacggcttgagaacgagaataacgaagcttgcgatgagagcatagtgcgctcaatgtggaaggtgcgatgggttctcacatgtttcccttgctctggagtcattggggacggagcctgggataggatgtcgacacagaccatggcacttacccaaagaccaaaggaaattgggggagtaaaattttctttgtgcagaggccagtgtggcattgatctgctcgcctctcgcaggggatatctccccaaaagcattggcaagccatcagtgtcaatgcgctggaagggtccgaaaccaaaccaaggggatgagagactttgggcgacccaacataatttgtaggaccgaaagcgacgatattaatcgttggcacttaaccaaatcgggaaggaagtttcctaaaagaacgcaaaaggcaactgtcaagaattgaaacgaaacttccgttgtgaaggaacagggggaagcatcccgttgataaaaaggcacctcctgagagaaggggtattcccaagggacagcaggatttaactttgaaacatgtccccactcactttacccaggagacagaag

SEQ ID NO: 511261 - DNA, 336 bp, Homo sapiens
  misc_feature (64)..(64): n is a, c, g, or t
tgctgattaatggagcacttgtgacccgtcccaccttctgctggtagagaggtaagatcacctnaattatcatctctctagtgtgctcacattggctcagcagtcccagcacgatcacaggtcaccctctcttcttgcactgtcccccaacttgctgtcaattccgagatctaatctccccctacgctctgccaggaattctttcagacctcactagcacaagcccggttgctccttgtcaggagaatttgtagatcattctcacttcaaattcctggggctgatacttctctcatcttgcaccccaacctctgtaaatagatttaccgcatttac

SEQ ID NO: 511262 - DNA, 283 bp, Homo sapiens
atcgctctataggatcccaactgcatccgcactgataggaagagccgacatgaaggatcacaaaagcgacgtctcgagtaacgcatgacagcacaaccgagtatatccctagtggtaccttttctgacacctcctgcttaacacccaaaaggtcagaaggatcgtgatgccccagcgttcacggtctgtattcgtactgaaaagtcacgatcgagcgagcttctgcccttctgctccacgggaggaatagcgtgttcatccgcgagctcgccttagagacatc

SEQ ID NO: 511263 - DNA, 509 bp, Homo sapiens
  misc_feature (184)..(184): n is a, c, g, or t
  misc_feature (208)..(209): n is a, c, g, or t
ggcccagtcatcgaatgtgacatcgtgaagattatgcctttgtacacatggagcgggcagaggatgcggtggaggcccatcaggggcctcgacaacacagagtttcaaggtgggatgtgtgtgggctgaaatccccaagctgcggttgtgcatgagaaataccacccttcgtggtgccccatcntccggggacgttctcggctctgtnnattcagtccccaggaaccgtggaccttaatttaccttgttaagttctttctctttcctattctctctcctgctcaatttcctgttctcctgtttgctcttctgtagcttcccctttgagttctgctctcccagcatgcctcctatgcagaaaccggtggggctgtgctgtctcctcccttcctcctgactgcagtcagtgggtattggatttgggagtgaccttgttgagaatcactgctcctagttttcttattttggcccaaagactagacttagaaatttggagcaccttcccagtg

SEQ ID NO: 511264 - DNA, 457 bp, Homo sapiens
aataagtccctactcgcggatgaagaggcctccgaaagggaacgagattctggagtaaatatcacagccaaaggaattcctgtccacggcttcaaaataggtgatagagtggagtttttatctcgttaggcttatggtcagtgatgctcggaagctgggctggcatgattgccaactcagatctcggtgtcatcagaggctcctcagccttcagacagcccgacgacgacgcttgacgctagcggcttgctgtgcttgctcactcccctgcactcacgagatgttattactgttacttgagggcgtctttcctcgtgtctgtcatgctgtgagcaaatcataaaaagcttatattatttttcactataaagttactttattaaagcacctaataaactgaactgttaatcatatatattaataatattcattgcattattatatttctattgtattg

SEQ ID NO: 511265 - DNA, 251 bp, Homo sapiens
  misc_feature (202)..(202): n is a, c, g, or t
  misc_feature (214)..(214): n is a, c, g, or t
  misc_feature (237)..(237): n is a, c, g, or t
cggaaaagaagagaaatttaaattagattatttatgacagcttagaagtgagaccacaggaacaaatttaaataccaagaaaatgttcctgtagccaaatgaataaataaaatcttcagcttttagaaattcagtacttgggtaaaaccaccaccaagagacaattaataattaatatgtatacttaaggtaggagctttcntatctccaagtncttgaaaggacaggttgcagganaagaaggaaggagg

SEQ ID NO: 511266 - DNA, 1449 bp, Homo sapiens
aattgtattatccttttacatatatatttcccggggatatattatagaggaatcacccaacttttgtggggataatcacaattatgggtgtatacagtcggtatccctttgaacgcactattattgtaagtatgtttaccaaatgtttggggcgcctttatccccttatatgagggcctacttaacacgtccgcttgtgttgtggtggccaatcatcactccgctaagtagtttatggtgtgtaacaacacggtgttactgcgcaacatttatacaaatgctgcttagtgtgctcacccagtgggagagagcccatataaattatttttcccaccactcgctttcgctccggctgtttagcccccatgatagaatgtgtccagttgccggcagtaaatattcgcctccactacttcttcgggggacgtgcttcacaacaataaggtgttacgtgtttttaatcgtctttggagacgcttcgctcgacccccacacaacactgttgctccatcccctgggtgtagatatgccgccataatttatttgcgacacaagtgtggaacattctatctgagcttgcacaacagatagctcttctctttggaagagttcccccttatatggcgaactgttccaactttactggttgtcctcttcttgttcccacccactgttaatcattatgtggcccctgtgggaatacgtgggcgccacctgctcgtataacattttatggccacaaaatacttggcatgtgcacctctatgagaaactctttcggttaaacttaccccgccgcacacacccggtgaaatattaacacgctttcgctaatgccacccaacgcttgtggccccaccactaaatggggttcccctaatatcccgagttaaggggagagcctcggtgatatttttgtccacatctctacatatagggaggggtcctttacacatgtcactctcggagctttttcccccctaattgtttctcccacgggtgtatcacccgcctaggagccccacaaacccctacgcgccccccaagattcccactgtgtgcacctatctccactatcttccactcgcggggcgttataatattgtaacgcgtggttgtttcccacacaacaaccgttgttctcggcccatatttccgcgaatatgcccccgcgagacggttacactccggagcgtatccctcgatgtggcaataccacccaccgacgtggaaacactgcctattcactctgtaggctcacttcactttctctaaccacgcacgtaaatatttacactaacttttcatgatttgatgaacgccttcgccttcgaagcgaaaaagtcctaaatacgtacgtacgaacccctccataatacctggagtgactatatggatgccccccaccctttccacacattcgaaaaacccgataatacataaaattta

SEQ ID NO: 511267 - DNA, 477 bp, Homo sapiens
acgcgcgggaggaaaaggcggcgtggagagacgggacgcgcgggagcaaaaggcggcaccgagacgggacgcgcgggaggaaaaggctcccaaggaagatctctggaagaaaagggactccgtgcaatacacgatgtaccacagagaggctggatacaattgataaagacattcaagaaaaagaggcaagtagaaaccccaggagatgggattggaaggcagacaaaatcaaaaacaacaaaagataaagaaactccaggaaaaacaaagagctgtacaataaatgttacaaatatgatgcaaagtaaaacataccatgattataagaaactgacagttaaaaaaaaaaaaaagcaagcaagaaagaagcctggccttcatgctacgataacctaacaaaaatgctccgataatatgaacagtcaattcataggaaaaaaaatacaatgatcagtaaatatctggaaagatgctaga

SEQ ID NO: 511268 - DNA, 137 bp, Homo sapiens
ttataactggatatttcttcaaacagatgtctggagatggtcataagggtggtgaagaagtaagttaaaatgtatggacagattttccgcaaatttgtagcattatgtcttggctaatagtcaagggtaatatgggc

SEQ ID NO: 511269 - DNA, 842 bp, Homo sapiens
  misc_feature (36)..(36): n is a, c, g, or t
  misc_feature (104)..(104): n is a, c, g, or t
  misc_feature (140)..(140): n is a, c, g, or t
  misc_feature (186)..(186): n is a, c, g, or t
  misc_feature (215)..(215): n is a, c, g, or t
  misc_feature (217)..(217): n is a, c, g, or t
  misc_feature (277)..(277): n is a, c, g, or t
  misc_feature (332)..(332): n is a, c, g, or t
  misc_feature (384)..(384): n is a, c, g, or t
  misc_feature (418)..(418): n is a, c, g, or t
  misc_feature (422)..(422): n is a, c, g, or t
  misc_feature (426)..(426): n is a, c, g, or t
  misc_feature (438)..(438): n is a, c, g, or t
  misc_feature (460)..(460): n is a, c, g, or t
  misc_feature (462)..(462): n is a, c, g, or t
  misc_feature (501)..(501): n is a, c, g, or t
  misc_feature (519)..(519): n is a, c, g, or t
  misc_feature (533)..(533): n is a, c, g, or t
  misc_feature (542)..(542): n is a, c, g, or t
  misc_feature (587)..(587): n is a, c, g, or t
  misc_feature (656)..(656): n is a, c, g, or t
  misc_feature (674)..(674): n is a, c, g, or t
  misc_feature (679)..(679): n is a, c, g, or t
  misc_feature (685)..(685): n is a, c, g, or t
  misc_feature (720)..(720): n is a, c, g, or t
  misc_feature (723)..(723): n is a, c, g, or t
  misc_feature (755)..(755): n is a, c, g, or t
  misc_feature (842)..(842): n is a, c, g, or t
gggagaaaaggtctcatccaaaatatagaaatctgntacatgtttgccacaatcaatatacttgaactgtacaaatttacaccagttcataatttaccgaaatnatagttgactaacaaagttcacaaaatagatggtgngttgtggaaaagacttttacccaattaagtactaggaaagttacanaccagacctccactttctaaaaataagangnttactcagtcttagaaaactacaagctagcaaatgtacagagagctggctggtgctaacnccacagttgagacagtgtctttttaagggtcttttttaaagcctgttgccatggnaggattctggtcacttgctactttcgaaggccaaaaacacaatacaaggtcngaccatttccccaggtcatgcttactagtttgtncttntgtnactttctcactntttaagtgctaggtcaaaagtncntgtaaaatttccagtatctaccatgtttaaaaacgtttnaactttcctattgaaagnctgccggaaaaggnataacaatnaacaacttttcaagtcgtaatagttgcaaattcccctgcgagagnttactgcagagaaagattctttgaaatacagattttctttaaaaggattgatgtaaaaatttaggtatntctgggagaaactgaaancaccntagganttccctccctagcaaataaagtgatcatttacttngantcacaggcgataaattaatcattgaaaggtangtccaaactatggcactgtcacttaaaatttttttttttttttaccattctatcttgtgccagatcttcacagctgtgacatggttn

SEQ ID NO: 511270 - DNA, 140 bp, Homo sapiens
ccgccagtgtgaggggatgtagctatagtggagcatgggacaagcgacattcatgagctctgacttgatggtgccaggttgctgtgagcctggacccggcccactcagcggcccacattggccagcattcatctgcacgt

SEQ ID NO: 511271 - DNA, 320 bp, Homo sapiens
tagctgcatacactggtctggagtactgacgactccttagtcacaaatgcaccatatcctgagacttgctggcgtcgtccgttgagtccacttggatttctgtcctccacagctccattgccactgttgatcactagctttttcttctgcccacaccttcttcgactgttgactgcaatgcaaactgcaagaatcaaagccaaggccaagagggatgccaagaggatcagccattctggaatttggggtgtccttataggaccagaggttgtgtttgctccaccttcttgactcccatgtgagtgtccatctgattcaga

SEQ ID NO: 511272 - DNA, 377 bp, Homo sapiens
gagttttgagttggctaggaaaacccaaggcccaatggacatggggcaaagtccccttggtggacattggtcccttccccttccaagctgtccatcaggctgaaagatttggaatgcatccccccccctttgaaaatgaggaagggcgagtttctcaaagtgggggggtgtgtttctcttttaatctgtaatggtttctgccttttgaggtaaaaccaaaaatctcttttttgagtgggccccctcgggggcggctttttagtcttgttgatataataaagcccatgccccccccccatggagtggaaaggagaaaattttaagggaacgtcctctgaatgcaaatgtttttgagattaacccctagtcccttgtta

SEQ ID NO: 511273 - DNA, 516 bp, Homo sapiens
  misc_feature (109)..(109): n is a, c, g, or t
  misc_feature (397)..(397): n is a, c, g, or t
  misc_feature (475)..(475): n is a, c, g, or t
  misc_feature (507)..(507): n is a, c, g, or t
cccaaaatatttttttcactcttttcaaccattttttagttgattattattgttattattatacttgcttttgctttgaattttctatatatttttgaatattaagctnttctgatatatacagtttgctgttgtgaacatgctgcaataaatgtgcaagtatacgtatcattttcatataataaactatttttctttgggtagatacccaatgatgagatttctgaatcaaatgatggttctggccaggcgtggttgtcacgcctgtggtcccagcactttgggaggtggaggcgggcaggtcatgaggtcagaggtttgagaccggcctgggcgatatggtgaaaccccgtctctactaaaagtacaaaggttagccgggcgtggtggcagcttntgcggccccggctcctcgggaggctgacacggaagaattgcttgaacctgggagtcagtggttgcagtgggctgagantctgccactgcactccagcctggacaactaantccgtctca

SEQ ID NO: 511274 - DNA, 645 bp, Homo sapiens
gatagcacgcttcgaggtggaccgcgcgtgaccaggttcgtaaatgagaaatgcccagtaggtgttgcctagcgaacactggtggtgcagtgccgagtgctggcggtcgtcaccatgtgcaaacagccggggaaacgtgggaccgttctgaagaaccatccagatgacgggtacatgagggtcgtaactgggagtctaatacacccctggagtccacaagctgaagcctgggataatcacacctgagggcccctgaaaatggcgggtttgccgcagaagggaagccccagagaaaagcgtcaccgggcggagcccaggagggacccacaaagaggagagtcccgaaagggctccccttacgcccataagggaacacacgcgaggaacacacaaaagtgccggacccaggaaggggggtgccccaaggagagaccaagaagagcggtatggcacccgaaagatggggccagacggagtcttacaaaatcctggcgagacagacacaagacccggaaaaagcttccggaaacaaagcggggccagcaaataaggcgaacagaaccgcaagaggggcaacacacaggcaaatttaacccgagactatacacaggggccacagaccacacacaagactcacagcaatac

SEQ ID NO: 511275 - DNA, 216 bp, Homo sapiens
agcgataccggactgtatacttcaattgcaaaatcattattatttttttttcaaaacttatatgtcattgatatgtatgttgcgaatttttaatcttctatttctgactatgcatctactgtctccggtccggtacattatattcttcgggacaatgtctcaagattctccttctgaattgcattttatttcatgccggataatactctgggatac

SEQ ID NO: 511276 - DNA, 295 bp, Homo sapiens
agtagtccctgtgagattacttgccctgtacgtctctccgatctggtggatctgcacctgctgtgcgttggccagcgcgtagtgcagggcctgcggctgcaggctgtggctgcgggagctcgctggcaggaggtggggtgctcatcatcggctctgaagggcagtaggaggacgagttgggcgttctccgcgagaagctctcggggaaggccccatcggcgaagaccatcagcagcgacgtcttcttgcagccgccgtcgcccaccaggaccaccttgacggaccgcacgcctgg

SEQ ID NO: 511277 - DNA, 706 bp, Homo sapiens
ggggctgaggacctgcattaatgaatcggcatgtagacggcgtgccgggtcatcatagaaaagtactacacgcgcctgggcaaagatattccactacgaacaagcgcgtgttgcgaggaggatcgccagttatccccgagcagaagaagcgtccgcaatcaagatagcaggttagtgtcacgcagtcttgagtgaagcgatagttcagagcagggcccagttaagaggtatctccatcaagctgccaggcgggagagagagagacaaggagtagacacattatgttccatgaggatctcagctctatgggatcagcgaggattattgaagtagatcctggacagctaaggaaatgctgaaagtgctctaccgggcaccactcgagtcaaggtcctgatccaaaacacatatcagggtccaaatcaaggccctaccagagtatgggtattgagagtatccaacaaaacgcacatcgaggagaaccatagccattgacattattaacacactgatagatgcttgctattaaattgtaatccaagttagaagctcgttgaggacaaaaaccgtgacacagacaacaaagaatagatcagaaacaatcaccaccacaagaagacacaaacaatgaataactcacgatgcaatagacaacgaaaagatagacaaaaaccgacgcacaccacctagtccagaatagaggaaa

SEQ ID NO: 511278 - DNA, 565 bp, Homo sapiens
  misc_feature (565)..(565): n is a, c, g, or t
ctagaggatcctatgagaccaggctgagcctactcagctgtactgtctgctggactgtccctgtcccgcatctccctgggacagctggagggcacatgcacacacagcctagctgcccccagggagctctgctggccttgctgggcctgcccttcccacaggtgaacagggctcctgtccaaccagcacactcagttctcttccctgcagtgttttcattttattttagccaaacattttgcctgttttctgtttcaaacatgatagttgatatgagactgaaacccctgggttgtggagggaaattggctcagagatggacaacctggcaactgtgagtccctgcttcccgacaccagcctcatggaatatgcaacaactcctgtaccccagtccacggtgttctggcagcagggacacctgggccaatgggccatctggaccaaaggtggggtgtggggccctggatggcagctctggcccagacatgaattactcgtgttcctcctccctctattactgtttcaccagagctgtcttagctcaaatctgttgtgtttctcan

SEQ ID NO: 511279 - DNA, 331 bp, Homo sapiens
gatccactacctaccccccgccgggcttggggtaaacacaggatcagttgttcacaatcagagaaagcaggtcgtcattgttgttcgtagggaggtcgtttgggcccaagtaggacagtcgctcatcagggttggtcagttccgggagcaagtccagagctggttctgcggcctccccggctccagacatgctgatgggccccatcacgcctgtggcaggactgaaggccagttcacccatagcttctaagctcgcttggcccaagtactgccagaacgctgatggagggtttgaatgttgcagctggcgacctggagccgccccaaggtt

SEQ ID NO: 511280 - DNA, 267 bp, Homo sapiens
  misc_feature (170)..(170): n is a, c, g, or t
  misc_feature (240)..(241): n is a, c, g, or t
aagactctgctagtacaggatgctgcagagaggggggccatatataccggggccttcctggagggcagtttattccccttcttgaatcggaagcaggatctgaagaagctgaagaaaaacaggacagtgagaaaccacttttagaactatgagtactacttttgttaggntgtgaaaaaccctcacagaaagtcatcgaggcagaaagaggcaggcagtggagtctccctgtcgacagtnngcgttgtgctggtgacgaccactact

SEQ ID NO: 511281 - DNA, 91 bp, Homo sapiens
cactgtctcccaggctggagtgcattggcacatcttagctcactacacatactgtcacagtatgggtgacagagtaagaccatgtctacac

SEQ ID NO: 511282 - DNA, 317 bp, Homo sapiens
ctaccagatcccctttcatcctggggataagccactgagtggtagatagcattttgaggtgatgctggattcaatttgccaatattttattgagaatttttacactgatgttcatcaggaatattggcctgaagtttttttcttttgttgtatctctgccgggttttggtatcaagatgatgctggtctcatagaatgagggaggagtccctccttttcaattttttggaatagtttcagtagaaatggtaccagctcttctttgtacctctggaagaattccactgtgaatccatcttgtcctgggctttcttttt

SEQ ID NO: 511283 - DNA, 593 bp, Homo sapiens
agcacagtttttgatgccaaacgtctgattggacgcagatctgatgactgctgttgtccaggtctgatatgaaacataggccctttactggtggtgaatgatgctggccggcccaaggctccaatgatagaactaccagggggagaggaaccaaaaaggcttcttaatccagggagtgcaggatgtcttactatgtgattctgagctacagactgacaggagaattgcagaagcctaccatagggaagactgttaccacgtgctgtggtcacagtgccagcttacatttaatgactctcagcgtcaggctaccaaagatgctggaactattgctggttctcaatgtacttacgaattattaagtgagccaagctgctgctgctattgcttactggcttagacaagaaaggttggagcatgaaagaaacgtgctcatctttgacctgggaggtggcacgttctgatgtgtcaatcctcactatagaggatggacatctttgaggtcgaagtctacagctggaggacacccacttgggtggacgacgattttgacaagcgaatggtcaagcattttatagctgagtttaagcgca

SEQ ID NO: 511284 - DNA, 317 bp, Homo sapiens
ccccccggtttttccccccgggggttaaagggtaaagttttaaaagggtccaattttaccccccgcccccccctttttgggggcgggggggggttcccgttaaaaggggctttttggccccttcccaatttttggggggggggggaaattgtttcttttcccaaaaacccagggggggcagggcttttgggttccccccttttttcccccccttttgggggggtgggggggggggtttttttgggcccaaagtttaaaacccccctgggtcaatttaccgggccccgttttttttttaaaaaattttgggcgggccg

SEQ ID NO: 511285 - DNA, 687 bp, Homo sapiens
gtactaaaaacttaagggacaccagaaaatttgtactgaagagaaagacatgcatatgattaaaaccctgtgtccaacagagaaacctgcagcagagataatggtgaaagttgaggcacattttatacgtaattagtgggaacgagaaaatggagtgcctgttatttagattgctaccaccagtagagtctgggatgatcttcgccagtgaacaagaaagaattaggtggtagatattggcaaaggaacagataatgacatagatgagatggtcatctacagactaatatgaagactcctgtggtagttgattgaagcagagcagaagagatttgacagaagaagacctatgcatttattacgaatgggaatatgatacagtgtggcactcaggaaatgaggaagataatggaacgtatttgttcaaaagtggaggatagtccagttctcgaagggggaaaaatagaccatgaagtatacatcaagagagtgaatcgatgagattaaaagacagacactatgtgaaaatgctaggtactagaatgatatgagccttgggaatagggaacaggttcctttggaagcaagtttgggaaatacttagcggttgctactttatgagtatgaggtgttcaggaaatagcggcactgagggatattttagtgggggttagatttggtgaaaca

SEQ ID NO: 511286 - DNA, 1037 bp, Homo sapiens
cccaatttgaccgtccctcaattcccgtcacaggcttgaagactgccggaatacctagggcgtcgtatcacaatggtcttttggtgtggttcctcaggagtcgtgtcaaaccaacgtgcaactctatgctcacgagccagccgggcatactgacgtggaaaaacgctgcacggacgcttcaccatttccggcttgactcttcggttacctcgtgttcctagtcatctacaagtggatgtgtactctgagctgcccagggccgcctcggcccccagcatcctcatccacttcatcaacatgttcctcttctcccacagccccagcaacaggctgctcgtacccccggcaggaggtggtccaaggcacacgctagctggtcctaggcgttggccataggtgcccatcctgctgcttggacacacccctgcacctgctgcaccgccacccgctcgtccgcctgcgagaggacggccacgctgaccgacaggaggaaaacaaggccgggcttgctggaccgtgccatgacgcatctgtgaactggctggagtctccgatgaggaaaaagggcagggggctctggatgatgaagaggaggccgaagctcgtcccctcacgaggtgctcatgacaccaggccatcacacaccatacgagttctgcactgggatgcgtctccaacaccgccatcctaccttgcgccatgtggggcccaagagcctggccaacagccacagactgtccagaggttctgtgggaccatgttcgatgcagcagtaggccatagggccatggcgccagggaaggctgggcgtggcggctgtggtgctggtcacccatctttgccgccatattgccgtggtgaccgtgcgctatcctagactgtggtgatggaggacatcatcagccttcactagacgaccctgcagagcatgcactaggtggaattccagaacaagttctaataaggcacgggctacaagctgagtcccttaccttcgctgcacagatactagggcaaccgcgggcgctgcaagcctc

SEQ ID NO: 511287 - DNA, 364 bp, Homo sapiens
ctagtactaataaattcgcggggctcgacgacgcgactcatgcttgtgatcccagcactttgggaggctgaggctggagaaacacttgagcccagaggtttgagaccagcttgagcaacatggtaagaccctgtctctaaaagaattgttttaaacattagccgggttgccaggtgcagtggctgacgtctgtaatcccagcactctgggaggccgagatgggcagatcacctggggttaggagttcgagactagcctggtcaacatggtgaaaccccgtctctactaaaaatacaaaaatttagccgggtgtggtggcgcacactgtaatcccagctacttgggaggctgaggcaggagaatt

SEQ ID NO: 511288 - DNA, 749 bp, Homo sapiens
cagagactcatgctgactcgtggatccaccgagtaagctcaatggctctaacttggtggctgctatgatgtaaagaaagcattattctggggaaccattcctcgactcaggatccagatgtccaccacccaagagtgaaattgcaaggaaaggaagttggtgttttatgaagctctgaaagatgaccctggctcacagggagaatttgtcacgactgtgccagccagcgtggcgctgctgtcatccaggctcgaaactatcccgtgccctgtctgctgccaaagccctctgtgaccccgtcagggacctctggtttggagacccccgagggagagtttgtgtccctgggtgttatctctgatggccactcctatggtgttcctgatgatctgctctactcattccccgttgtaatccagataagacctggaagtttgttgaaggtctccctattaatgatttctcacgtgagaagatggatcttactgccaagggactgaccgaagaaaaagaaagtgcttttggatttctttcctctgcccgactagaccatgatgttactaaatgcttccaagctgaagaatctaaatgtcgtctttgactcacagtacccaataataataatgctatacttaaattacttgtggaaaaccacaccttttaaagattacgtgcttcttggtaccggtttgtgaatgaccgtttatcgtcatgctgttagtgtgccttctaaataaatatatattcca

SEQ ID NO: 511289 - DNA, 357 bp, Homo sapiens
tttttaaaatccccccgggagtccgggaatggtgggcccatttttccctccccctcagcttggggaaaaaaaagggcttggggggcttccgaagttgggttttgggcttttcctgcccccttttatttttttgtaaagccgttgcccccattttgcccattaaggggttagggttggaacccatttttaggtttccaggggaattttgaggaaaggaaaaaattcccctccccgttccccttcccctttgggttcaaaaaaatttgttttgttgtcatttgtttttcctttttccctgtgtggggaggggccctcaggtgtgtgttttttggacaataaatggtgttatgactgcca

SEQ ID NO: 511290 - DNA, 243 bp, Homo sapiens
gctcgacgttcaacagcgtgatcttcgacggcgcgcgtttcgaccagtctatctatacctggatggaaatcggcggcctgaagatggaggtcggtttcctgatcgacagcatcacggccatgatgatgtgcgtggtgaccttcgtgtcgctgatggtgcacatctacaccatcggctacatgcaggaagatgacggctacaaccgtttcttctcctacatctcgctgttcaccttctccatgt

SEQ ID NO: 511291 - DNA, 854 bp, Homo sapiens
cgccgaaggttgtggggcccagttcccgaggggcgtccccaaagttctgggacctcccggctccacagagtttgggccttccctcccccccaggggtggctctgcccttccgcttcccaggagcaacgcgccgggtgtgccaacgctgcctgttcttttggggcgccaaagtgttgcagcgtcgttctattggtgctacattgggcgaaaccccggtgttactgtgtgctcgttccttcgggggcgaagacattggaagcccatttccccctccaaaggggtctctcataactgggtcttttttgatttgccccgccccgcagcgtgtgttgcagtcgtagatttgaccaacgcccgtctctccgagcgcctcgtgaagtaaaacaggttgttgttggtgaacgcgcctcgtgttgagaattcgtttcgtctccgccgaacaaccctcttgttgggggatattccccccccccgctcggtgccagcctttgataatgtcccctcgcgagtgcaatacccggcatttcatcttgcgagaaacatcaaatagaccaccaacccgctgtacggggggcgaagaccccctgtggggctgcgggaccctggatctctcagtaccacacagtccgtgtgcgccccacattgcccccctaatagaggggtcacccccgcaccatgctcggggcgggggtatcaaaaatgcgaatgtggacgccacaccctcagcccaaaaaggctacaaatagggaagaactgggacccagacaatagacagatacaagggggggagagagacctgggagcgaccccttcttcctggcgccccaccgccagtaattcctccaacaaaacgc

SEQ ID NO: 511292 - DNA, 414 bp, Homo sapiens
ggtctatctagaggatccctaagagaccgtgttgcaatgattaactttcaaatatgaagaggagctgtagagcagtgagctccacttccctctaagcaatccgcacgcttctaggagctcctggctgtacagctctgggcatccccaggattaatgctcaccggtcagtgctggtgtgacatgatggctgagcaccggaactgtgtccagcgcattgctaggccactagacacgtgctctttcatttattcctcaaattgctttgtgctgtaaacgctacccagaacggctcatgttcattactcaagtcacttcaccagaaagtgacagagccagacttcaaccccaggtctgccagattccaggtcccttgcttcttctgttgttgctcattgcaccacggtctctcaggta

SEQ ID NO: 511293 - DNA, 531 bp, Homo sapiens
tgagatttgggggcgaataaccggagtaggtttagttcctgttgccttggcgagtcgccggcctgctgggaacgggatcttctaaaaggaactgatgtctggatacggctgtggtccaaggccattattctgctggctataatgacggggtctccggaaccatggggagcgacacagctcttcttagtacattgaaggtgtttacgcgccgagatgaaacagacattctatttgggccaagagatgcgcttatgtatatcaaagcaatagaataacgactagtcgactcctggcggcgaatcctaaacggaaaagcagagtctatctggggaaaagtaactcgggcccatggaaacggtggcatggttcgtgccaaaattccgaagcaatcttcctgctaagggcattggacacgagaatccgagtgatgctgtaccgccgtcaagggatttaagactaacgaaatgatcaatataaataaggatgtggattggtgctcttgtatatggaagtggattaaaaaagttacta

SEQ ID NO: 511294 - DNA, 298 bp, Homo sapiens
tttatatgctgtctcatcttttaaaaatcaaagtacatgataagtgatactttatatatgtaacatgtttacctattatacatttctaatttttttttttgggagacagagtggcactctgtcactcaggcgggagtgcaagggtgctatctgggctcactgcaacctctgcctcccgggttcaagcacttctcctgcctcagcctcccaagtagctggaattacaggcacccaccaccatgcccagttaattaaagtttccttttcatttaccataagggaatctggacactaaata

SEQ ID NO: 511295 - DNA, 178 bp, Homo sapiens
cctgaggatcccccctcacggattactcaagacccgctgtcatcagtagtttcactggtatacaagacctggtagaaatatctcaaatggaaaacttaatgtctcacaatgcttaagtatgttacctcatggtacaattaagtggggactactagtcttacaaccgggctctgtgctg

SEQ ID NO: 511296 - DNA, 274 bp, Homo sapiens
gtgataaaaatcgcaaatctatacctataacgccaggtgggagggcgtttttaaaaaaagccatgtcaaagggcattaagttggcagacatcagtttgtggggctagagggataaaaaacgctgtgtgaggtggcaaaatttaaaaaacgcaggcccacttggcgttttaaaataaccccggcccaggcagctttatttaaataaagctctgtcatacacctttattttccaccctagaactttgtaggtaatataattacgctggtttgtaaa

SEQ ID NO: 511297 - DNA, 149 bp, Homo sapiens
caattccattccagcgtatctaaaggcctgcaggaaaagaagagggaaaggagtggattttctggctctggttatagagagcccaaaaggagggcaaccggcgtcccggccacgcccggctgggatttaggtacgcgggaatggaatgg

SEQ ID NO: 511298 - DNA, 505 bp, Homo sapiens
tggtgatagggggaatcctgggtgtagaaggaagatgagtgtgaggtgatggatgattactcggggggtgatgaggattaagggagagagaatgatttcgagtccttcggttgcttatggcttaaagcaagacagagctaaggctctgtgcgtgtctttgcattctttatattgctgtcctggttgggttgggactctcgacccagcataatgctacaggttctcctcagattcaagttctgaagaagagaagaaacccccaactaaggcagtagtctctaaagcaaccactaaaccacctccagcaaagaaagcagcagagagctcttcagacagctcaggtaaggcatatggaggccctcagttcagtgagatgctctcaggcagctgctaagggctcccctgaatccaatttggggagctgttgattccatcccttctgtgtctagactctgacagctctgaggatgatgaagctccttctaagccagatcaccaccaggaa

SEQ ID NO: 511299 - DNA, 502 bp, Homo sapiens
  misc_feature (11)..(11): n is a, c, g, or t
  misc_feature (31)..(31): n is a, c, g, or t
  misc_feature (51)..(51): n is a, c, g, or t
ttcccaagccngggtacttttggtgacgtanggaggtaacttatgataggncttactttcttctcctaaagttatttacggatttggctttaaatataaaagttcagtaagtgtataccgaagcaaaaattagtcacttgagtaacttggccgctaatatttaaccatctacctctgtttttaattttctttcctaaaggcagcttgagatgtcggtcctaaccttgtctttctttttcctctttggtagacttatgaatgtccatattacttcttttttcctaaatgggacaaagacataggcaaaaaacatggatcctaagtagaatcagatatttatctctttttctaaaaaaataaaataaataaatttgggtgtttttttttaatttgcttttatcagatatttatctctttttctaaaaaaaataaaataaataaatttgggtgtttttttttttttaatttgcttttaaacaacctcgactatgcaaacactgaa

SEQ ID NO: 511300 - DNA, 864 bp, Homo sapiens
gaggattgaggcagccagcgcagggttctgtgagggggcaggggagtttgaggaaaccgagataagttttctctttgaaagatagagattaatacactattaaaaaatatcgtcaataggttcctaagatatggctaaagcgtcaagttttcaacgtaatttaatagcttaagatttaggagaacatatgaagacttagaagagtcgcatgaggccggaacacgatcccaaaggtttctaaaacatgaggagggttgagatgacgcttcttcatgggtcaccaccactgtctttaaaagaccttctgagagaaaggactaagagcccgaattaatcccaatagaagggcaatgttttagattaaacctgagggtgacttaacgagctcaagtccagttcacaagtgtcggtgatcacatactgtgaaggcgatctttacaacaggagattcccgcgaggtgattaaagactgaaatcatgagcaggaacattgcgtcatttaaaggctagtaacgctatttataaccggcagaccgaacattgcacgatcattcccagcggtcgccctcgccccctgtggcgcaccactacgacgttcgccgtgccactggacccgaagtcgggcagggcacacaaacacacaccaaaacaacactcgtgggccgctcgccccgacaaatactacccactgtgggcgcggccagcagtaatgaaccgtccacgtgtccagaacctgctcgtctgtgtcttcccaccaaaaacgccgggcgcgtctcacaccacggtcggcccggctcacgcccgctaccccccccgtccctacacgcacatctaaacacaaacaatgacaaaccccgcctcaca

SEQ ID NO: 511301 - DNA, 650 bp, Homo sapiens
ggagtcgaggccatggctgagaagttcctggagggcgaggtgcccctggaaacgttcctggagaatttttcctccatgaggatgctgtcccacctgcgccgggttcgcgtggaaaagctccaggaagtggtgaggaagcccagggcttcccaggagctggccggcgatgcccctccagccagtccagcaggccctgggtgcgcccagtcccgcaggggaacacgccctgtggtgtgaagagcaggcgcagccaccatcagccatgcctcccatacccttatgcgcctacagtccatccccacagactgccgtgtgggcccaactgcccatggagccgctgacagcggatccctttcccagtagtgtaccagacctccttctacagcggggcctctgggccccacttagcccggaaagacccagacttggacccaggggtgctgacgggttacctcctggatccacagagaggagcatgtccaacccggacggtgctatactgggaaccccaatggggtggctcctgggccaagggtacccctttgcggggaaggcatggggcccacccagtacactggtatccttcaacaagtccccgtaccccaggaaacaggaggagacactccctaacgcatactgtctcagatcac

SEQ ID NO: 511302 - DNA, 260 bp, Homo sapiens
  misc_feature (191)..(191): n is a, c, g, or t
  misc_feature (212)..(212): n is a, c, g, or t
  misc_feature (231)..(231): n is a, c, g, or t
  misc_feature (251)..(251): n is a, c, g, or t
agcagcccggatcattatttgatttttcatagagaaggggcttcatcatcttgccaggctgctcttacactcctgggctcaagcagtcctcctgcggcggccttccaaagtgctaagattgcaggcgtgagccaccgtgctggcctcatatttggctctattccttgttaaatgatggtctgccctccagnggcctttggcaccttcacctngaggttatgctcagctggngagtctgcgcctctagcggngatcctcta

SEQ ID NO: 511303 - DNA, 261 bp, Homo sapiens
tggcggcctccttgggaacgtgtaggccacgctctagccaacactagatacctgatgagggcgctgctctgcagatcagaacaacggaggatagctttgtgcctggacccagagagtgtgagaatacccgcttaatccccaccgtcacactccacagcattccagaaacattccctggcaaacaaagagaacactaggagaaaaaatggaataacccttacagtaattaaaaaggaagaaaccaaagaaagaaaaaaaaaa

SEQ ID NO: 511304 - DNA, 470 bp, Homo sapiens
  misc_feature (362)..(362): n is a, c, g, or t
tattttccacagggaggatcttagtgtgctgcagtcagccagaagaattttggtgatgtccattattgatgaggtttattgtcatctttatacatttttattctattcattttgtttataggtagaatagagcatgaggtacataacaggatgtggaatcaggactatagtggttaaaagtaaataaaattaaaaagcaattttaaaatagaattacattgttgggttgggtgacagaagtggaaggccagttggccatctcgatatgttcttatagtgtggcattatcctggagggttcactacagtacagggtctggccctcaattttatagggccagacagtatatcataggggttaanagcaaagttgggagccaaactgactttcgaatccttgccctgtctttaattgctatgtgaccttactcaaattgctcaactgttctgtgcctcagttcctaattcaaa

SEQ ID NO: 511305 - DNA, 391 bp, Homo sapiens
  misc_feature (110)..(110): n is a, c, g, or t
aaagttaattgcttgtcaacgctataaccacaaaaataatgaattgatgagaaatccattgaagagccaatgtccttctcaaaatccggctttcacaaaacgcagattanaagcgaaaagaaatgaaaatgtcacttcacattaatcctgaaataaaagaagccgaaataattgagagataagttgggctcaagtgaattgagaagcttgtcctgtgtgccaatgtttcgtttgcctcacacaggtatctcttcgttctcagaagagttgctccatttcatctgaacgcagaaaacagcagcacagctgttcacagataagtttaacgcgcatccacagtagcgcatgataggtatgagtgcatatttataagatctgtagagctcttaaa

SEQ ID NO: 511306 - DNA, 268 bp, Homo sapiens
aaaaaaagggggtggtggggccggacatgcccccaatgttgaaccgaccaaatgcctttcccctgtagggtaaagtggcccctatggatccctatgtatgagaggagggaggcaggcttcagcttccgccccagaatgggggctatggaaggcagccggggctcctttcctttgccccttttgggtgtttgacccgggggggggttttaaaaaaaagaaggccggggtccccttttgggttttaatatttaaaatgattccccctgga

SEQ ID NO: 511307 - DNA, 221 bp, Homo sapiens
ggctcattctgtccactttttctttctagtatctggaatctctctctaccctcttcttgtcatctctatggtgaagcaaaaaaaaaaaattctttggctctatttctacccccaccatgattggctatgtggccttggataagctgttaaccttcggtgtcagatccctcatccggtacagggcgaaaataccagaactcaaccttataggggtgtggaag

SEQ ID NO: 511308 - DNA, 215 bp, Homo sapiens
  misc_feature (206)..(206): n is a, c, g, or t
tcggcccttttttgttgcctacagattttcacacgcttttctctgccatattaatctcgcagtcatgccctctcgtgccatcctacgccgttcaacgtgctgcagctgaggttattacttctttgacgccacagtggatgtcattctcctgctgagtattcctctcatattcttcatgctgcatcactgccggagtgagggatccntcctacgaa

SEQ ID NO: 511309 - DNA, 326 bp, Homo sapiens
  misc_feature (163)..(163): n is a, c, g, or t
  misc_feature (297)..(297): n is a, c, g, or t
  misc_feature (304)..(304): n is a, c, g, or t
gcaaatttcaaactgtatgccagacctggccctttgcagagttaaaagaagccaggtgtggtggctcacacctgtaatccctggactttgggaggctgaggccagagaatcacctgaggtcaagggtttgaaaccagcgtggccaacatgacaaaaacccatntttactaaaatagaaaaattagccaggagtgatggcgggcacctgtaatcccagctacttgggaggctgatggaggagaatcacctgaacccaggaggtggaggttgcagtgggccaagattgcaccactgcantcctgtntgggcaacagagtgagactgtc

SEQ ID NO: 511310 - DNA, 818 bp, Homo sapiens
  misc_feature (643)..(643): n is a, c, g, or t
gctcccgccagttgcgggactgggaggtgctggtcctaggtgaagctcaagtgggacctggttgctgtgatttgcacatgatttcctggccttcattctgcagccggctctctctgccccgtgatcgacaggccttggtcaaaaagcatgccccagacctttttggccctctgtgctacagattataccttggccatgtacccgccatccatgatcgccacgggcaggattggggctgccagtagcaaggccgtgggtgcctgtttccatgtgcggggatgagctcacagaggctgctggcagaggaatcactggcactgaacgtggacttgctgcgggcctgtcaggagcagatctgaagctgcatcgtcacgggagagcctcagggaagccgtctacagagccagctccagcccagcggcgccaaagccccccggggctccagcaggcaagggcccagcagaccagcactcctacagatgtcacagccatacacctgtagccctggagaggccctctggagtggccactaagcagaggaggggccgtgcaaccagctccctggctccaggaaaccagaccagatctaagcctgaaggggcgtctgttcccccttcacaaagcccaagggatctggttctanccatccccgcagtgtgcactaaggggccctggcagcatgtctgcatttcggtggctagtcaagctcctcctcctgctttgacaggaaggcttccaatctagctgggggtgggccgttgtgggccgaattggtcattaaccagggttctttgaagccccccacctggggcctcagt

SEQ ID NO: 511311 - DNA, 258 bp, Homo sapiens
cgaggaattcgtctggttgaaattcagtgattctccataggcgttgcagttattatggatccagctatcaaattttactgacatttcccaatctgattctggtatagggcattggagaccggtttcactctgtcgcgcaggctggagtgcagtggtgtgatcacgggtcactgtagcctcgaattcccaggctctggtgatcctcccgactcagactctcaagtgggtgggactacaggcacgcaacaccattactgg

SEQ ID NO: 511312 - DNA, 161 bp, Homo sapiens
tatgctggtgaacagcctgtatgctgatggctcaagcccggtgaacgtgcccgagaacccaccctccatggctcttcaagcagcactgcgagcaggtacctcagttcctgaaggcggctgaggactatggggtcatcaagactgacatgttccacactgtt

SEQ ID NO: 511313 - DNA, 151 bp, Homo sapiens
agaagcctcaaagcagacataacccttaactgtgtgtactccatggacgaagaaggaaagatcaatgcttgaataccttagattgatttccaggaagagggcggcagagcaaatgacacttaacccctggccggccctgctgacagcatcc

SEQ ID NO: 511314 - DNA, 1480 bp, Homo sapiens
  misc_feature (80)..(80): n is a, c, g, or t
cgagttctatacctccattaccgcgtgcccgattgtgaagaagtgaatgcatgagctctgttccgtggacaccccgtggnatcccaggtagacgaaagccgcgtgtcgagagtggccaacatgctagaacaacggtcatgcagagttgcattgaataattgctccgtggattggatggcttctaacatcgttcatccccaaggattcatgatacgctctcgtcgcaaggcacgttcgttcaagtggagagaaggaacctgacatgtgatgaggtcgagtcagagccgcatggagtgagaggcttgtattgctttaatggatgcacgcttgatccatgcgctagcctagtcattggtctggcagacaaggtcgtgaacggagatggttctagagatttgggtgactcgttgtggatgtccacttccctcattctccgcttggtttatctggacaatctgtcttgggatggcagttcatggacctattcgcgtcgatcaatagactgctagtacacaccaagtttccataccacaagcgaggagcacacagactcgttcacttatctcgtaattctagactatacccaatgctcttcggatagttgcgtatagttccatggtctcaaatagaaagcgggtgagagctggtgctcaaatagatcatacacgggaaattacacgaacccgtgactattggggcaccgaatatttagtagacttcaatcaggggccattgaaaccttcgcatgacgatacaccgcatgggtggtgtccattcgaggaatatggacacgtccacctttttgtggcatccagttagaattgccccaattggggttaataaccttccaaattgattctgcgttggctttgttgggggagccatatgaaggttaacgaggggacaaataagtaggataaccaaaggagttttaggctgaatatcactttcatttggagcatatgcggacccggttaatgagagaccaacgggacatgacctctttgtagaggggtcaattgaagtccgcagggaaaggactggcggacagttagagaacggctctggaattagtggacggaaaggcaggaaccgcgaccaacagggtgggttcacatccgaaaggaactttgcccctatggaagattccctatagtgcccctttgaaacaattggagagccccaccttggtctgagcagaatcgcatcaaaactcggaacggcaaaggagagtccaccaatcacggagccaaccagcagacaatcctgaggaagggaccggaaatcatacacacgacgtcacgagagaaaacagctcgcgggaaggcaaaatatggacatgcacccaacaaaacgcggcccacgatcagcaccccgacatacgagcagcacaacgagaggcatcacgcaaaagcacggcagacaaaggacagacccacgaggggcaggcaccccgaaaggtgacgcgaggacgagcgac

SEQ ID NO: 511315 - DNA, 320 bp, Homo sapiens
  misc_feature (216)..(216): n is a, c, g, or t
ccaacacagtttgctcacatgccagttactccagcataaagctgaaatctattcaatactactgtcccataactgatctgactttgtatgtaaatacagaaaaagcttgttcacctgtttttcctctattttgtccactggctgaattcaagctgtgaagctcctgtcatatagtctgagagaataccatgctgaaagcaactagctggttcccanatccccacgatctaaacatggaattgtttgcgtttatttaaacgtaaattaggctattttttctgtactagggtctggctttctactggcccttcgtcatacgt

SEQ ID NO: 511316 - DNA, 206 bp, Homo sapiens
tacaggaaagtgtcctttatcaggactccactaactcacatctctagaaaatggagtctgagaattccttgcaaaaaaatatatactgttcctttgctgattataaaaggaagacatattcattgtaaaaaaaagacttgcaagcacagaaaagcagaaagaaatatcatgattttcctaccattcaggatcttgcactgttcata

SEQ ID NO: 511317 - DNA, 121 bp, Homo sapiens
ttactggcatttagaaaccataatgtctgaatgcctttcccattaatattcttctccctacccccaaacccttcaaatactacagagctgtactgcaaatgaacaacaatcgaaaaagtct

SEQ ID NO: 511318 - DNA, 280 bp, Homo sapiens
gcacagtggcagccccaggtggctacacagcatggtgctggtggtggcggtggtggagcacggcatacagccttgtgctggcagctcgtgagaccctcgggggcacatgtggcggctcctgctggcctgggagcagggccatgagcatccagatctgcaggaccaactggtgcacctgcgcgttctgcagcagcagcagctccaccatgtcatccttaatacttcctgaccgttgagcagagaaggcctggcgaggagcaatctgtgctatgagtgcctg

SEQ ID NO: 511319 - DNA, 177 bp, Homo sapiens
tgtgttcttcagaggagccggaagtaatcacattggaaatgataatggaagaccaggaggagctcttcgtagttccagaaacggtagaatgctgggacgtagtattacttaacttcttagctgtcactaccatgactattcacctgtcactcccttgtgctggcagcggcgcagttc

SEQ ID NO: 511320 - DNA, 121 bp, Homo sapiens
  misc_feature (102)..(102): n is a, c, g, or t
  misc_feature (106)..(107): n is a, c, g, or t
tgcgcatcttctcccatcagcggatttctatacattgacctcttattggttatcaaacagcagtccaacgacgtgtcacacaatgagctggtctgatggganaaanncgggatcctctaga

SEQ ID NO: 511321 - DNA, 257 bp, Homo sapiens
  misc_feature (25)..(25): n is a, c, g, or t
  misc_feature (33)..(33): n is a, c, g, or t
  misc_feature (42)..(42): n is a, c, g, or t
  misc_feature (75)..(75): n is a, c, g, or t
  misc_feature (96)..(96): n is a, c, g, or t
aaagaggctggcccagaaggcaggntaacaggngccaccggnggttccaaactggttaaaaattggatcaggggnccatggaaaaggaaacttggngcttcaccggaggaaaaatatctaaacatcgaaaaacttaaatattaatgggaaaaaaacattggcaaaatataaaaataaataaaaaagggaaagggaaactttgaaccttatgtaccgagcaaatgccaggctaggcaaacataatgctagcctagatt

SEQ ID NO: 511322 - DNA, 102 bp, Homo sapiens
ctcccagatgaggaattgctcagagaccctctgtacatctggctgaaacaccagcgcgtgcacggcgaaggcatacgatgacttgctggatgagttcagtgc

SEQ ID NO: 511323 - DNA, 994 bp, Homo sapiens
  misc_feature (21)..(21): n is a, c, g, or t
  misc_feature (103)..(103): n is a, c, g, or t
  misc_feature (165)..(165): n is a, c, g, or t
  misc_feature (181)..(181): n is a, c, g, or t
  misc_feature (237)..(237): n is a, c, g, or t
  misc_feature (245)..(245): n is a, c, g, or t
  misc_feature (247)..(247): n is a, c, g, or t
  misc_feature (249)..(249): n is a, c, g, or t
  misc_feature (257)..(257): n is a, c, g, or t
  misc_feature (264)..(264): n is a, c, g, or t
  misc_feature (299)..(299): n is a, c, g, or t
  misc_feature (308)..(308): n is a, c, g, or t
  misc_feature (312)..(312): n is a, c, g, or t
  misc_feature (318)..(318): n is a, c, g, or t
  misc_feature (323)..(323): n is a, c, g, or t
  misc_feature (326)..(327): n is a, c, g, or t
  misc_feature (335)..(335): n is a, c, g, or t
  misc_feature (349)..(349): n is a, c, g, or t
  misc_feature (358)..(358): n is a, c, g, or t
  misc_feature (362)..(362): n is a, c, g, or t
  misc_feature (366)..(366): n is a, c, g, or t
  misc_feature (370)..(370): n is a, c, g, or t
  misc_feature (375)..(375): n is a, c, g, or t
  misc_feature (383)..(383): n is a, c, g, or t
  misc_feature (386)..(386): n is a, c, g, or t
  misc_feature (397)..(397): n is a, c, g, or t
  misc_feature (399)..(400): n is a, c, g, or t
  misc_feature (402)..(402): n is a, c, g, or t
  misc_feature (417)..(417): n is a, c, g, or t
  misc_feature (419)..(419): n is a, c, g, or t
  misc_feature (421)..(421): n is a, c, g, or t
  misc_feature (424)..(424): n is a, c, g, or t
  misc_feature (426)..(426): n is a, c, g, or t
  misc_feature (430)..(430): n is a, c, g, or t
  misc_feature (492)..(492): n is a, c, g, or t
  misc_feature (653)..(656): n is a, c, g, or t
  misc_feature (670)..(670): n is a, c, g, or t
  misc_feature (682)..(682): n is a, c, g, or t
  misc_feature (695)..(695): n is a, c, g, or t
  misc_feature (703)..(703): n is a, c, g, or t
  misc_feature (711)..(712): n is a, c, g, or t
  misc_feature (719)..(719): n is a, c, g, or t
  misc_feature (722)..(722): n is a, c, g, or t
  misc_feature (726)..(726): n is a, c, g, or t
  misc_feature (746)..(746): n is a, c, g, or t
  misc_feature (751)..(751): n is a, c, g, or t
  misc_feature (761)..(761): n is a, c, g, or t
  misc_feature (784)..(784): n is a, c, g, or t
  misc_feature (788)..(788): n is a, c, g, or t
  misc_feature (790)..(790): n is a, c, g, or t
  misc_feature (795)..(795): n is a, c, g, or t
  misc_feature (800)..(800): n is a, c, g, or t
  misc_feature (811)..(811): n is a, c, g, or t
  misc_feature (830)..(830): n is a, c, g, or t
  misc_feature (859)..(859): n is a, c, g, or t
  misc_feature (864)..(864): n is a, c, g, or t
  misc_feature (876)..(877): n is a, c, g, or t
  misc_feature (885)..(885): n is a, c, g, or t
  misc_feature (890)..(891): n is a, c, g, or t
  misc_feature (894)..(894): n is a, c, g, or t
  misc_feature (899)..(899): n is a, c, g, or t
  misc_feature (903)..(903): n is a, c, g, or t
  misc_feature (915)..(915): n is a, c, g, or t
  misc_feature (923)..(923): n is a, c, g, or t
  misc_feature (938)..(938): n is a, c, g, or t
  misc_feature (946)..(946): n is a, c, g, or t
  misc_feature (951)..(951): n is a, c, g, or t
  misc_feature (953)..(953): n is a, c, g, or t
  misc_feature (957)..(959): n is a, c, g, or t
  misc_feature (978)..(982): n is a, c, g, or t
gtgtgacgggggtggtgggantgtggacgtggcatggggagtgagaggttgctctggtgcagctggaggaagaacagggaacctagggttggggagagatgtntagaggaaaactcccccaggcacacagcctccgctctggaccaacgcaggcttcagtgagtncacacaaaggaactgntgtcaaggccctttctatgacccttcccattctagcaagacctcccaccccagtcntcttgggntntncagccacntgaaatncagacacatcgttcccccaagtcaggccagttttnggccattgngttntggggnaatgnttnntgggatgnatgaaaaacaaatnaaataaatnaatnaatnaatncactnaagccttnttngccaggcgtgntnncntgcccaacactcctncntnccngnactntgcacagttcacggctcatatgcaaagtggaagacacgtgggacaagagcaaagcacaagtnacacatggtccctctctaacacctcagcacaccaaccctgacgctcccatcacagatgctgatcattcttccacggacccccttttataataatcctcattcacatttctagtttcttagggaagagagaaagagaaaggaagaagtggaaagtgcggaannnnaatgagtagggcanagaaaggagggngagaagagaaagnaagaggtnaggtaagnnaaggagnagngganagggtaaataagggaagttntgggnaaaatggggntaaggggatataagggggtgaantatnanagatnagganagcaaggttcnaggaggatgagaaagaggntaaaagtataaaggaaagaagaggaaatnaaagnaaaatggggatnnagggagtnatgtnnggnaaagngagnttaataaaaaanatattaanaaattataatgagangggggggnggggnanaagnnnagaaaggaaaggggaaaannnnngggggggagggg

SEQ ID NO: 511324 - DNA, 116 bp, Homo sapiens
tgacaggacgattgttattcatggtgatgagatgtatgacattgacgtgtgctgactgtccaagttggtttctacaggcgatccgcacgacccccgcagctgcatgccttgtccct

SEQ ID NO: 511325 - DNA, 305 bp, Homo sapiens
ttttttccattcccgattttttattttaggggtcccgggaagaaaggggggtagaacctttttcctccttttttcaaatcctttcttgccccccccccattccccgggaacattcctggagctggtccccctccccgatgggtttttccatagcccagggggaaagaacggtctttttttttgattttttaataaattttctttttagaataggccccagtttttttcccccccggggttaaggtttttttaatggggaggccccttaatgttttggaataaatatttggctctgttttatgcca

SEQ ID NO: 511326 - DNA, 458 bp, Homo sapiens
  misc_feature (49)..(49): n is a, c, g, or t
  misc_feature (239)..(239): n is a, c, g, or t
  misc_feature (329)..(329): n is a, c, g, or t
  misc_feature (404)..(404): n is a, c, g, or t
gtgatgtgtgcctgtagtcccagtttctcaggacgctgaggtgagaggntcactagaccccaagaggtggaggttgcagtgagccacgatcatgccactgcactccatcctggacaacagacgcaaccctgcctcaaaaaaaaaaccaaaaaaaaaacagagtatgtccaagatggccgaataggaacagctctggcctgcagctcccaatgtgattgacacagaagacaggtgatttntgcatttccaactgaggtagctggttcatctcactggaactggttggacagtgggtgcagcccatggagggtgagctgaagcagagcggnggcatcgcatcacccaggaagtgcaaggggtcgggggatttccctttcctagccaagggaagccgtgacagactntaccaggaaaatcggggtacttccgcccaaatatttgtgcttttccaacggtct

SEQ ID NO: 511327 - DNA, 261 bp, Homo sapiens
  misc_feature (69)..(70): n is a, c, g, or t
gaacctcctactcctcattgtacccattctaatcgcaatggcattcctaatgcttacctaacgaaaaanntaggctatatacaactacgcaaaggccccaacgttgtaggtccctacgggctactacaacccttcgctgacggcataaaactcttcacctaagagcccctaaaacccgccacatctatccatgaccctctacatcaccgtcccacctctagctctcaccatcgctcttctactatgtagcccccctcccca

SEQ ID NO: 511328 - DNA, 783 bp, Homo sapiens
  misc_feature (39)..(39): n is a, c, g, or t
  misc_feature (46)..(46): n is a, c, g, or t
  misc_feature (51)..(51): n is a, c, g, or t
  misc_feature (198)..(198): n is a, c, g, or t
  misc_feature (216)..(217): n is a, c, g, or t
  misc_feature (229)..(230): n is a, c, g, or t
  misc_feature (234)..(234): n is a, c, g, or t
  misc_feature (256)..(256): n is a, c, g, or t
  misc_feature (301)..(301): n is a, c, g, or t
  misc_feature (305)..(307): n is a, c, g, or t
  misc_feature (310)..(310): n is a, c, g, or t
  misc_feature (315)..(315): n is a, c, g, or t
  misc_feature (318)..(319): n is a, c, g, or t
  misc_feature (322)..(322): n is a, c, g, or t
  misc_feature (325)..(325): n is a, c, g, or t
gtatgttgcagaaatccggcaatcgagctgaggacttgngagccgntcagntcccgggacgtatggagctgctgctaaataatttctgctcagccatgtcgccggctccagatgcagccccggctcctgcgtcgatctccctgtttgacctcagctgcggatgctccggtctttcagggcctgagcctggtgagccangcgcctggggaggctctnngcccgggctccnngtanttcctgttcaggctcagggganagagaaagcccagaaagaaagctactccagggtcctatggatatntcannncangtcantcnngtncancttgtgaccagaccttccagaaccaccaagaacagagggaacattatacagcttgcactgggcatcggtttaacctagaagcaacgtcctcaaggaccaagccgtctccttgtactgccctgggactttgcaacacagcagagctccaccaggcagatcttcccaagcattctcgggatcagaagactcagactcaggcaagtgcaggaggacttggcacgacacactgggatcggggacgagggctacattggagcaagttgagccgaaccctaaggctttgtaccctcattcgcagttccttttccagaatggccagtggcaagtatcttaatgccctaccggttggtgccctagggcctccatacggatccccagaaagaggcacaactgctgctacatgaactgcaatgtataggtccagaagctgggtggtgtcctggtgcagctgggatcta

SEQ ID NO: 511329 - DNA, 300 bp, Homo sapiens
ccagaggattcgtcgaccggaagcatattttgtaacagccactgtgccacgtataaaaagacctggtttttgctattcaggagcttgtgctctggttaaactgagtgctaagaagtgctggcagactgctgtgaaggtgaaacaggaatacagagaatagagaaatggggaagggcgtctgtgttcgaaacccaggtctgctcagaggtcaagcaagtcggagtcagaaaaagtaaagtctttaacatcgagttttccatatttatttgtttacaatgcgtcacattctgcttccggtcg

SEQ ID NO: 511330 - DNA, 867 bp, Homo sapiens
agcggggggtgctggaccagagctggagtgcatgtggcgcgatctcgagctcactgcaggccatccgctctacacaggggtgcaggcgattcttctgcctcggcctcccgagtaggtgacagcgggcatggacatatgccccaggacttgcctgctggaggtccatccatgagcactgacatgggttgcctcttcatgagatgtcgcccgatgacactgaccctggaatggcttggcttgagaagtcttctctgtgaggaggagcttacggcgtcaatgctgagctgagccagctgcagatttaccgcgatgccttgtcgtgagcatcatctacaatcgcgcagtggcagtatagcgattgggagccagatctgcaactacgtgacttcgcgtactagccaagggtcgcacatatggaaggtactcattctcttgggcctggaatcgcctggaccattgtgtgtgtcatggcccatgacctggcggtgcccaatgtggcggaaggtaaagcatgggtccgggaatcggggtctgagaggcagtcgatggagggcatgatggcttgatgccctctccgcaaaggagtcactctcgtaacaccgaatgcagattgcaatgggcgagcctggaatgatggcgcactagcgagttcgagacagttgagtgagttgcccgatgtatctggcgcgctttgtctcctggaaacgcatcctgatgggaacacgtcctggaggtcgtatcttccgagcagctggttggtccaccaatctatgccctactgggtattggcctggctcccccagggggcgcacgccttactcctgcttgagctgactggccaagccgggagaacagcttctagggatc

SEQ ID NO: 511331 - DNA, 286 bp, Homo sapiens
agcggctcatcatctagtctcattctgccttttatactggtctaacacagcaaagtatacagtgcatttgaacaactgtacactaacatctgaaggctatatatcctttaatcacatatatatattagatctacacaatactaaccttagaaaatattataactggatatttcttccaaaccagcatgtcctggcatgcatggtcccatcaagcactaatgcaagcaagtcagtaaaaaatgtatggcacagtttagcctggcacacaatttgtagctatatggtc

SEQ ID NO: 511332 - DNA, 410 bp, Homo sapiens
cccaccgaaatatccgggcccttgcagttcagcaaagaggcagaccagggcccaactttggaacagttatgccttggagccttttccagatgccttggagtcaatccccatggccctttcagaaaatagtggcatgaatcccattcagaccatgactgaagttcgagccagacaggtgacggagtctaaccctgccctggggattgactgcttgcacaagggcagtaacgatatgcagtatcagcatgtcatagaaaccttgattggcaaaaagcagcagatctctcttgccacccagatggttaggatgattctgaagattgatgacatccgtaagcctggagaatctgaagaataaactgtaccatttaccactgtgactaaataaagggtgtgtctgttgtgctgaa

SEQ ID NO: 511333 - DNA, 368 bp, Homo sapiens
taaagcctgaagtagaagtcaacaaatgtatttccatctacgtaaattgggggtacatgctcaaaagcttttttactgaatatttaataaataaagaaagtttggagaccaccgtatcagcctacagatgccaaagttcatcttttctctcgaggtgtccgctgacgctacagcctcagcccaagaaaggaaaggttgggaaatgataactaaagggtacaaggtctcctttcaaagtcataaaaataatccaaaattgatatgggtgatgcttgcacagctctgtgaatatactgaaaagcatgatttgcatattttaaattgataaaatgtgtgttatatgaattatttctcaataaaactgttac

SEQ ID NO: 511334 - DNA, 152 bp, Homo sapiens
gggccaaagctcatctcagaggaagcagcttcaggaaagggccaaaggccatgcaggagcggggtttcaaagtcataaaacaacactggggcaaggggtttcaatgcaaagcagcaacaacagcaacagaagcaggggcaagggcaggccct

SEQ ID NO: 511335 - DNA, 116 bp, Homo sapiens
cacgaggtttttttcatttttcttattgtctttttttcagactgaaacaggagtgctttatggtctgattgccctgtttgggaggattttctcccggttcctgacttctggctcac

SEQ ID NO: 511336 - DNA, 213 bp, Homo sapiens
cagacgtgggcgtcagaagctctctggcctggtccgaccagcatcgtctaatgtgaacttgtgacactgtggtcttcctttccccagcgcccgtgagggccagaggcagatgtggggtacaggctgcacagcccgagggtctctgtatgcgggcgctgggccccgtcatggggctcacatggtggattcacattaagccggtttctgtgggca

SEQ ID NO: 511337 - DNA, 210 bp, Homo sapiens
ccgagcgcccctcggctgccacccgcctcgctcccgctttcacgcctcgctgcctaagcctagccgcccgctcgctcgctctccccttcagctcgcccatcatgcattatctaccggggcaccctcatcagcccacgcatgcagcatgctttctccgcacaatctaacaagcatcccgggcgcatcgcggcacgggtttgctgccctggc

SEQ ID NO: 511338 - DNA, 1272 bp, Homo sapiens
tgcccccttctgagggtctccctggcgccccgggcgcctttctctgggttatcctttcgcgggcccggtccgttggacgctttcgcgtgggccttgcaccccccttcccgcctcgtccccttgtcgggccccgtttatgcccgcctttctgtatcgccggggccccgtaggcccacggtttccgcttggccgccactttctcccgggggcgcaaccctctcatgcctttgtccgggcattcctcccattccggcgtggttcccattccggggttaatacctgggccccctcccccgattgggcccctttgtgaaagcttctttgtcgtagattttttccgggtccacgttcgcccccgaccgaatcccgactgggttccttgtttacaccgcccacggtgattttgggccgttttgtcttcctctgagggtagatggccccctgcggggtgaactttttcccccccccctaatctcccccaaggggcgtatgtcctggcctttgcaatgcccgcgggcccccctccccccccccccgctttaatttcgccccctctccgtgtctttttgtccccccccctctttgggaactcttcccccggtttcgcggtccccagtcccactgcggtggggtccctcggttagaggccccacggagttgacgcccccggttgccccccctttttccggggctcttgggggttgacccccctgcgcccgaggcgccccttgggcccgcgtgtcccgagacctgcttggaaagagatatgagataatggtccacccatccccgcgcgtctcttgggacgcccccttctcacccctccaagcccccctgggccccacgcgataacctccattcttctgcacccgccgcgcctggtgccccccccaagggcccggatcccctccccccctgtgaagggccccccttattgtaatggaaggtgcgccccttggtgagagcctctgttccccgatcccgatagtgtggcgacaccctggccatccactgggtccacacccccctgggccagccttttaccccggggtcaccccgagagagatgtgggaaaccccccctgtagaccttcctgtgagagaatgtttgggatccgaccagggatccccatgcaccagctttgtagggcctctatcacccaggcctatggccgggtatgaagcgtcggggccggggtcttataccttcctgagattctgggaaaggtgctccaagatgtactgagaggaggggtaaatatatgttttgaga

SEQ ID NO: 511339 - DNA, 276 bp, Homo sapiens
  misc_feature (69)..(69): n is a, c, g, or t
tgaggaccccactaccgctaagaaaccctcttgaaagcccttgagcatttgttctgtgtttagaaaggnttgagattcagagcaagttcagagttggatggtctaagaatggaaaagccctccattctattagaagagccaggtagcaatttctggttatggaaccagaagctctcaggcttcaaataaaacagcatcacttgtactcttataaaactgtaaaaacagaaaaaccgaaaccgtatctacatctgtcctataaggcagagagtactt

SEQ ID NO: 511340 - DNA, 349 bp, Homo sapiens
caatcaatcagacctgagctagctctaagtggacggagatgctgaacttgactccctctgcagctcacaccatttacccagcttcctcaatatttatagcatgaatagccatgaagttttctgtgctcttgatgaaaggaggaagctggtgacttctgaaaaatattttgccactgtctcatagcaacagatgttccagttaaatatttgggagtcgtgaactgaacatcttctgtactgatacggtgtgatgttagtcagtggctccagacagttagcaggaggctgccaactctaagctttttggcagtggggctgcaacaggtccccagggttctctgcttcatct

SEQ ID NO: 511341 - DNA, 1039 bp, Homo sapiens
  misc_feature (667)..(667): n is a, c, g, or t
ggccgctggttccgtctgttggggggcgaagcaagccgggtcctcgtcgtgtgaagtaagaactctgctatagaggaaatggtgcttcactcatgcatcctacctcagctggtgcgggatcatgtggaaggattctgtgcacgtggcatctggattacagtggtctcaacgaccgtatgccctcactgccagcggaaatgctcgcttttctcaccttaactcccgaaatggcaatgccttgggagagcatgttactaatgatgcgctctgagaagattcactctggcgaaagttctgtattattagacatatcacagtggtcatccaaggcttaaagcagggtgaacacatcgatcagtcaaaagttaagctcgggacttggatgagatactacgctggattatgcgcgctagaaatggatgcatcggaatgggcatagaactggaagtggccagtggtgttaagacacactagtacgaagctatgcgttgcttggtgactttcaaccacccttcctattcaatgcgttttgaagtaacttgccatgagaattgggttcagcgctcctggatggcgtcaacgtcacagttggtccaaacatgcccattgggggcggggaactattacatgcatcaaggacatgtgaaccaattagtccaattgcccnagtaaggattctcatcaggacataacgattcacttgaaattgtgctgtgaggtggccgaccaattttggttactgtgggtttaacctccagttattctaatttcaccaaggtgagaacaaaatgactttattattgatggtgcaattcttgttcatggggaaaatgctgcgagcgattattttgcattggtttaaaagaagcttattgtgggaaaaccaggatttaagaggaaatcccagtttgtcaagtaggaacccaggggagggaatggagggatataaggaaagaataattcccaaaaaaattttttcccacaaaagtccaaaggtaaaggccattaatattccaggaatttagggcgaaactggaag

SEQ ID NO: 511342 - DNA, 184 bp, Homo sapiens
gctcgtaccgacgacagggcgactcctcgaacacgtggcccgcttcttcaaaccccgtagatgccaccgatcacctgctctggacactggatctccacataggtagatgtggctccatgacggcgtggctgggcggtcagcacactggcgtagatggcagcgcctgtgctgtggcggatgatct

SEQ ID NO: 511343 - DNA, 1276 bp, Homo sapiens
  misc_feature (357)..(357): n is a, c, g, or t
gaccacgcttttcatctgtcccgctgcgtgttttacctcttgatcgggaagctcctgcttctccttgccctcgatcatgtgagccccaaactgtctccgtggctcgaccatgtttggtctactcattgtgccactgatgtccgtgctccgtagcagaatgtcatacacgcagtagctagagatgtcgaccttcgctgcaaggatagagcttgcttgctcgcatgctgccactgctggggctgtgacgcgaaggtgttgcctccagggacttgcatcatgcgaagaagggacgtgtccggacgaagtgcagtcctgtctgtgcgctgtatgcccgggacagattgtgtgactctcagnatgctgacgatagagacataatctactttaaatgctggcactttctacttcttttcatggtgtcatcgtggggagcaccccgtgtagcaccgggtttgtttgcaccttagaccttaatgtttcccttgtgagtgaactgcctctttgtccagtatgcgggcttgtcaccattggccaatgtgtgacatactttagagccaacatatatcaaggccctttataaaccctttttggcatgggaggcttttgtggcttaattgggccaagacttagtccacccggaatgatgagggccaattctttgccaaacacggccatgtttgtggcccatgtggccattgtgtggggacaacgccctccagttggagcgccatttgtgttgtggaacctagttccatgtacccctattggagacggacaacctctcggagttgggtaattggccccttcgttattaggcccattctttgtcgcttgttggtcaagttgtcccaatttccaggtcttttcaacacaaactttacacgggacaggacaaaataaacccagggaatttacacgcttcccaaatttgggattggtgaaccaaggtacccggttgtccttttcccttgcgttgatgagaaattcccaacagaaggggaagatatctgatttttctctcacacgacaaagagttttgttcaacactcaccttatgtgggaaggggcacacgaccaagggggttcttcgagaagaaaggcgccacccccacgccagcactctgcccagatgacgagaattttgtgagagacaacacactgtcggcggagattctcccaaaaatatttcctctgggtgtgcagagtcttcaactgggggggaggttgtggccgtccccccaacgagtccctgtgttcatcaagcgacgcgacaccg

SEQ ID NO: 511344 - DNA, 232 bp, Homo sapiens
cagcacagcacagcgccgacagcacagaacagacagcacagcacagcacaacacagacagcacagcacagatagcacagcacagcacagcacagcacaggacagacagcacagcacagcacagacagcacagcacagcacagcacagcacagacagcacagaacagcacagacagcacagcacagccccacgaaagacaccaagcagtattgtgataacatcaggtcgacgc

SEQ ID NO: 511345 - DNA, 184 bp, Homo sapiens
ccttccgctggccaaatggcagtgatctcattctgcatctgtcggcaatgcaggatacattgtggtgctgcagacagcactgtgttggcgtacaggtctttgcggatgtcacgtcacacttcatgatggagttgaaggtagtttcgtggatgccacaggactccatgcctaagaaggaaaggtg

SEQ ID NO: 511346 - DNA, 112 bp, Homo sapiens
ctagtctttggtaacctttgtaactggtaaactttgttgtgctctctgtctgtgtgaatttgcctattctaggggcctcatataagtgtaatcatacagtatttgtcttttt

SEQ ID NO: 511347 - DNA, 372 bp, Homo sapiens
  misc_feature (34)..(34): n is a, c, g, or t
  misc_feature (67)..(67): n is a, c, g, or t
  misc_feature (84)..(84): n is a, c, g, or t
  misc_feature (149)..(149): n is a, c, g, or t
  misc_feature (154)..(154): n is a, c, g, or t
  misc_feature (227)..(227): n is a, c, g, or t
  misc_feature (300)..(300): n is a, c, g, or t
  misc_feature (331)..(331): n is a, c, g, or t
  misc_feature (347)..(347): n is a, c, g, or t
  misc_feature (364)..(364): n is a, c, g, or t
aattgatctgttttggagggtgctatagtgccangcagttatatattttgtttttaaaagggggggngccaaaaaaaccccagngttagcttaatcttaatgtctggggtttgtcatggggaaattataactattccagggttgggganccccnaatatgttctctgaatgagcctttgtgctttttgtcatgttatgcagtgaactatttttaaggtctaaccagngattatttttccagccccgggtttttttaaggaattttttcccccccgggccctctttagcagtttccccagngatggaatatcatgaatgtgggtccttatgnagctgtgggcccttgngcaaataaacttccagntttgccca

SEQ ID NO: 511348 - DNA, 316 bp, Homo sapiens
cagtgtgatgactgaagacgatggagtgatgtggccaccaggaaggagccaaattatgtctgcagtaggagtgggaagaggcaaaagatggaagcgctgaagcccgccaaaagtcaatcagacctgcggacaccttgactgtagaccattgatatgggtagtggacttctgatgtccaaaactctaagataatagagtcgtgttgtcttaagccaccaagttggtggtaactagttacagcagtaatatgaaactaatacacatgtctaccatgtagtacatgggaattcaatcaaaccagtcacatccgtactgg

SEQ ID NO: 511349 - DNA, 1208 bp, Homo sapiens
acagagcctcgccatttgccagatcctgccgccctgtccacaccctgccgccagctcaccatggatgatgatatcgcctgctgctctgtcgtcgacaactggcatccgtgcatgtgcaatggccggcttcgctgtggcagacgatgcccccctgggccgtcttccccatccatcgtggggcgccccagtgcaccagggcgtgatggtgggcatgggtcagaaggattcctatgtgggcgacgaggcccagagcaagagaggcatcctcacccatgaagtaccccatcgagcacggcactcgtcaccaactggtgacgacactggacgaaacatctggcacgaaaccttctacaatgagctgcgctgtggctcccgaggagcaccaccgatgctgctagaccgaggcccccctgaaccccaaggccaaaccgcgcagacgatgagccagatcatgtagagaccttcaacacacccagccatgtacgtctgctctccagcgcatgtgcatactccctgctactgccatctggccgtaccactggcatcgtgatggactccggtgaacggggtcaacccacactgtgaccatctacgacgggtatgccctcccccactgccatcctgcagtctggacctggctggacgcgaaccttgactgataacctcatgaccgatcctcaccgagccgcggactacaagcttcacaacacggccgagcggaaccgtgcgtgacacatcacgcagaaagccggccacgcacaccccgggacccgacgcacatgatggcccacgagcggcaccagcacaccaggagaagaagaaacgccccccaccggcacggcatcacagcgccacccaccgaaccgcggcgcgagagcccgccacacaccaccggaccacaaccggggacccccgaagagccctcaagcccaccgacgcggcggccggccgtccgcaggcacggtagcgccgagcgcgcttcggcggcccaccgtgtcacgacgtgcgcggggggccgcggcccgtgctccaccgaaggaccagagatccggcgcgacaggagcacacgcggccaccaagagtgatgaacggccgactggcagcgctgattaacgtgtttgttctgccactctctcggtcgtcggccatcaaagcgacccgacagcgacagcggaggaaacgagagaacagccggccacgcggcaagc

SEQ ID NO: 511350 - DNA, 106 bp, Homo sapiens
gctgttctagaggatcccaagtacgcactgactttcccgtattgaatacaagtataatattaagtatgcatggacctctagagctaatggaactcggtcagaggtg

SEQ ID NO: 511351 - DNA, 364 bp, Homo sapiens
  misc_feature (359)..(359): n is a, c, g, or t
gatgcctagcttccgataactctcacagtggaagaaggcaggaatgtcaggcctctgagcccaagccaagccatcgcatcccctgtgacttgcacgtatacgcccagatggcctgaagtaactgaagaatcacaaaagaagtgaaaatgccctgccccgccttaactgatgacattccaccacaaaagaagtgtaaatggccggtccttgccttaagtgatgacgttaccttgtgaaagtccttttcctgggctcatcctgggcttcaaaaaccacccccacttgaggcacctttgcggacccccattccttgccccgccaggaggaacaaaacccctttttgattgttattttttccntttac

SEQ ID NO: 511352 - DNA, 848 bp, Homo sapiens
  misc_feature (9)..(9): n is a, c, g, or t
  misc_feature (70)..(70): n is a, c, g, or t
  misc_feature (158)..(158): n is a, c, g, or t
  misc_feature (174)..(174): n is a, c, g, or t
  misc_feature (201)..(201): n is a, c, g, or t
  misc_feature (215)..(215): n is a, c, g, or t
  misc_feature (228)..(228): n is a, c, g, or t
  misc_feature (247)..(247): n is a, c, g, or t
  misc_feature (253)..(253): n is a, c, g, or t
  misc_feature (256)..(256): n is a, c, g, or t
  misc_feature (283)..(287): n is a, c, g, or t
  misc_feature (296)..(296): n is a, c, g, or t
  misc_feature (298)..(298): n is a, c, g, or t
  misc_feature (305)..(305): n is a, c, g, or t
  misc_feature (315)..(315): n is a, c, g, or t
  misc_feature (347)..(347): n is a, c, g, or t
  misc_feature (350)..(350): n is a, c, g, or t
  misc_feature (353)..(353): n is a, c, g, or t
  misc_feature (355)..(355): n is a, c, g, or t
  misc_feature (381)..(381): n is a, c, g, or t
  misc_feature (421)..(421): n is a, c, g, or t
  misc_feature (430)..(430): n is a, c, g, or t
  misc_feature (456)..(456): n is a, c, g, or t
  misc_feature (462)..(462): n is a, c, g, or t
  misc_feature (472)..(472): n is a, c, g, or t
  misc_feature (474)..(475): n is a, c, g, or t
  misc_feature (492)..(492): n is a, c, g, or t
  misc_feature (503)..(503): n is a, c, g, or t
  misc_feature (505)..(506): n is a, c, g, or t
  misc_feature (510)..(510): n is a, c, g, or t
  misc_feature (512)..(512): n is a, c, g, or t
  misc_feature (590)..(590): n is a, c, g, or t
  misc_feature (628)..(628): n is a, c, g, or t
  misc_feature (631)..(631): n is a, c, g, or t
  misc_feature (648)..(648): n is a, c, g, or t
  misc_feature (710)..(710): n is a, c, g, or t
  misc_feature (737)..(737): n is a, c, g, or t
  misc_feature (753)..(753): n is a, c, g, or t
  misc_feature (793)..(793): n is a, c, g, or t
ccacacaanacggggtcacacaaaaatttgaaaaggcggagtgaggagacgacggtaggaggcgccacancctggccggcgcgcgagacccaggatgtctgcctccaggaaggactccatctgtctccccgtaatgccctccacgcgtcccaggcccnccacctggctgaaggngccgtggagcccccgccagcccacgantagctgggcctccnccgggccaatccnctgaagactgccgagaccncgggcngancctccgtccagcagacccagtattttnnnnngcccataancnagtagcnccgggctganctgtagcccccagcagtcctcagccttctccncangcncnagggcatccagggactccagcctccnctcccggccttcatcctccaggatgtggatctcggcattnggggatgcngcctgcccctgaataagctgtagggncatcancacacccttnannaggggctttgccctgtnaactgtccgangnnaaangngccggaccattgtgggacaatggttctcctttccctcagccttctgggccaacaccttggcctccagtcctctttgcntcgcctaaagcctctcaatctctaggtcctcctctccnacngtcttcattagcaccanccgctctcgctttggggtactcaacacacgggccccctggctcccctggcaggcaagccganggtccaagccgaggaggcgctccagcntggccgggtccatgcngcttagcttctgtcgggggctgagtttctgggaggcagangctggagccgccatgggctcagggctcccaatctcctctccctcagggcctcggg

SEQ ID NO: 511353 - DNA, 112 bp, Homo sapiens
ctccaatggaatccaagacctggttgttttggaaggtctgctccaccatctaagagcactgttttttttttttggtgatggtgttgtttacgggctttggaaggaattttat

SEQ ID NO: 511354 - DNA, 341 bp, Homo sapiens
gttgatattgaatatgcacttcatgcagcatggacagcacaggtggctgcagtcccagcaagggcatgtctggcattgttctgtgcgctgctgtccctcctcacagcaacaacaactggcagcagcatggtgtgtgggcatgcccgcagcatctctgtggaagtcttgcaagcaaagtggtgcggtcacgtgcaggtggcatcagcagccatcagctgtgtgcagatggttctggccacacgcctggcaagcagttcctcccaatgcaggcagccgggatgctctattcatgcagagttatgttgtacaggcacagcatctcgcactcacccagaccacac

SEQ ID NO: 511355 - DNA, 320 bp, Homo sapiens
cagagatgatgccactgcactccagcctgggcgacagagcaagactccatctcaaaaaaaaaaaaaaaaaggctgttgaattcaggcagggcttttaaaattccgggcccaggtgattcggtaactctgggggcaccctgggatacgggccctttccataggcccttgcaattaacccttctttccttcaatttatatgcacttggggcccattgtctcttaacattctcctttacccatgttttaacaggggccggtgtaaagagccttcacccatgggaaccagtacaacccggcggggggggggggatcctctaaga

SEQ ID NO: 511356 - DNA, 1060 bp, Homo sapiens
aagttctagtagtgatgcttggttgttaatctggcactgaggctagccttccattgcttcctgctccacctgccgcctttgacaatgcagcctgcagagcctgctgagctgctggatcacgctcgatcttgggcttctcgtgcttctcgtgtgcctgctgccctgtgcgcctgctgtgtctgtctttgccctgatgttccatgtgcatgctgccctgatgtgcctgagccctgatgccctggtgctgatgccacgttgcattcatgtgtcactgctgtgtctgacttgcccctgtgtgcactgcctccctcatcctggaccatcatctggtgctgtgtggcccagatcattgatcttgatgatgcttggtcatctgattgtgaccaatggggattgcatgaacccatgtcatgctgtgaattgccttgttgatcttgttgccatgattgcactgccagaatgcttggtctgtgtgtgcttgaaacaaaaatagacctcttacctgacatgtgaaatgatgacatgtgcaagacaaattgataaagatgaccaagaaaatgcatgaatgaccctatgagaacaaccaaatgttcctgatgtgcaacctgagttatagccctgtggatgttgccaatgcaccgggtaggtgaaccatgatgtgacccctgaaaagcattgaaaagctaccagacatgtggcaattcccaagaaggcatcaattatgaggctccatgaacgtacacaagaaataacccagacaccaaaaactaagatgaacaccatctgtaagaactgttccatcattgtactgtgagaccaacatggtatcatccaagtcaaattggccattggcacttggtttatggaattgacccaaccattaaaaggatccaatacaaagtacaggtatgaaaatgtaagaaaacaagaccacaaaggtagagaaaaaaagaaaaagcacaagaaaataataacatatcacaaagaagaagaagagacgaacagattgactacaagattcttatgccttaatataaatgacagtagtatagaaagacga

SEQ ID NO: 511357 - DNA, 229 bp, Homo sapiens
cgaatccactgtcaaatgctccctgctggggtttcctggagtctctccccaagccaggggcttccctagtgccagctgaacatctttcccaagcacgacaaactcactggccacctgaacaaattccttagctgatgtctttctctatcgaggccagggtccccagtgccattcccacctctcttaaatctctaataacacactggctcgccatcttggtgttcctggg

SEQ ID NO: 511358 - DNA, 648 bp, Homo sapiens
agaagtatttagaaagaataggatggtcggaaaaggggagatgctggaaagatttggggaatttaactgaaaaagtcctctttgaacataagcccttataatgatatagtatccccaaaatttctctatttcaagagatatgaccaaatctcaagaaatggaaatatcctatatccaacaaataatcaaatgtaagtcccaaaataaaagagtataaatctgaatttacctaacggagatatgctaaacatgctttcttttaaaaatcatggctcacacctgtaatgccaacactttggaaggctgacatgggcagtcacttgaggtcaggaattcgagaccagcctggccaacatggtgaaaccccgcatctagttaaaaacacaaaaattagctgggtgtggtgctgcatgcctataatcccagctacttgggaggctgaggcgggtagattgcttgagcccaggagttcaagaccagcctgggcaacatggcgaaactccatctctacaaaatatacaaaaaattagccaggcatgctgatgtgtgcctcttgtcccggctactcaggaggctgaggtgggaggattgcttgagcccaggaagttgaggctgcggtgaattgagatcgctgcactacactccagc

SEQ ID NO: 511359 - DNA, 154 bp, Homo sapiens
ccgactctatgaggatcccctgccatttactccatggctgggcaacagagtaagactccgtctcatgataaaaatataaaccaaacaaaaaaaacggggggcttttttgcgggggtaaaaaaacacgtgagcggggcgaccccgtctttggggg

SEQ ID NO: 511360 - DNA, 876 bp, Homo sapiens
tacccggtgaccgggaccaacagggcccacggccccggcccgcaagaagggggtcccccacccgggttcgccaaatgggggcacaccggactggccgccgcgctaagcctgtctttgacggggtcgcccgaaagggggacaaaaccatcgcgcaccgggggtccaaatagcaacaacaaagacaatgtgccgccgcctggcgcaaacggcgacggcacaccccgtcgagggttcgccgccccgggtccggtgaataccacgcccctcctgcggataagaacagtgcgccgctggcgaaacgagtgagtagtagcaaggccgccccgggcgagtggtaaaaacgacgtttggcggaagttatcgacgccgtcgttgaggaatatgcactggttggctccccctcgggatattaaacacggggcaagagggttggtatggtctctgcggagatttcttattacaagcgctggccaacgacacccggggttggatgttccctcttcgccgggggtctagtcacagagggtgtgaaaattccgaccacgcctttgagcgtccccgtaccctcctttctttgcggaaatactacatgggcgccagaaaacccgcgcgcggtgttaaccatgcgcttgagtcgggagacccgctgccgattagcccgcgctaaagggtagagtcacgagtgatacattaaatgtataaagggtttcttgtgcagaccacacatctgtggagtctcctttagaagaagagcgagcccacccaattgttgcgggattatcactcggtgatagcgcgtgcgaaacaccattcggcccccccgcaccacaccccctcctgtgcaggaggaaaaatcaaaacccgccgccccacata

SEQ ID NO: 511361 - DNA, 719 bp, Homo sapiens
  misc_feature (323)..(323): n is a, c, g, or t
  misc_feature (345)..(345): n is a, c, g, or t
  misc_feature (467)..(468): n is a, c, g, or t
  misc_feature (537)..(537): n is a, c, g, or t
  misc_feature (543)..(544): n is a, c, g, or t
  misc_feature (553)..(553): n is a, c, g, or t
gatagcccctggtaatgactagcaggagaaagaacagaatcaccggatgtttgggtttggtattgtgcttattttcctctgtattccttccaagttccttctttgataatatctgatggcgaaacttcctcaatactagaagacctgtagtgtgattatgtgctaacactcagcaaaaactaggttgttgtatgtgtcgcaatagggatgaatttaccaagacattcccttctttatgttgcgcctcttatatatttgtgcatgttccataaatcgacggtacatagacttccgtctgtatttgtctcggaagtatgacacancgttctgatatggtgaggactngctcttaataacgtcgtggaccagaatttctgtctatttgtagattagacgtggatctacgtttgagtgtaatagaatatttacaataggctctctactttaatagaaatgatcctatctcnnattagatttggtgttccttgctgatatgcaatataattccttttggcgaaatatgttatggaacccaangtgtcnnattttacangcgttaagagaccacagagcatgggcaaatttagatagtcccttgatttacatcctttgataacggaggtctgtgatcacaaagcttgatctaacattagccaggtcatcattagactagtcacatgcgtgttacctcattatcctttaaaacggttaaataccgt

SEQ ID NO: 511362 - DNA, 322 bp, Homo sapiens
catgataagtaaaatcctctgttgatcattatgctatggtcatgaattgaagatttatctatgtaataatccccaggtctcagctacgaagtatgaagagcgaaaagctgatttggcttagttgctaaactgttgggaaagctctgtagagcatggttccagtgaggctaagattgaaatatggtactaaaaaggccaactagctttttgcagataacaatacaaggaaagctattccaagactcagatgatgccagctgtctcccacgtgtgtattatggttcaccagggggaactggcaaaagtgtgtcaggggagaaga

SEQ ID NO: 511363 - DNA, 183 bp, Homo sapiens
agaatagcttatgggaaattactcttcaaaaggtctaggctaatttacatatcaatccagcagcctctcgtagacaagcttggttttctaatagcttcttttgggggcttttccccggtcctggaagaaccttctgggattttagtggtggattggtcccagcccttttggatttcgagagca

SEQ ID NO: 511364 - DNA, 856 bp, Homo sapiens
cgcggtggctcacgcctgtaatcccagcacttgggaggccaaggtgggcggatcacgaggtcaggagatcgagaccattctggctaacacaatgaaaccccgtctctaccaaaaaatacaaaaaaagttagccgggcacggtggcgggtgcctgtagtcccagctactcaggagactgaggcaggaaaatggcaggaacccgagaggcggagcttgcagtgagccgagatgagccactgcactccagcccgggcaacagagcgagactctgcctcaaaaaaaaaaaggaccggggggccaggcacggggctcaccaccggtaaatctcaagcattgtgggaggccaaggcgggaggatcacctgaggtcaggatgttcgagaccaacctggccaaattgaaaaaccccatctctactaaactatacaaaatttagctggcaaggtgggggggcacctgtaatcccagctactaaggaggctggggtgggagaatcgcttgaacccaggaggcagagttacagtgagctgagattgtgcaatgcactacagcccgggtgtcagaagcaaagagtcctctcagaaaaaagaacaagaagaggaagaaggcccccgcgcgtgaaacacaatatgggctttcgcagggtccaaccattctcacgtggtgtggcacatacaacggtttgtaaccggcccaccgtggggacccttaagaaacaggccggtgggcccgcgatcagcccaaaaccccgatttggggcaggccggggtaaagggtggttggaccgcggccaggggacctccttaacacacggggggcgggcgacacacagaggggactacgggggggacatcctc

SEQ ID NO: 511365 - DNA, 771 bp, Homo sapiens
  misc_feature (597)..(597): n is a, c, g, or t
gaggagctgaagccgtggccagctcgacgccggacagtccagcgagcagacacggcgggaaccggtcagccggagcagtcccggagcagaagcagcaggagcagcagtagccctcgtccgtttcgcggcgtcggctccgaggccggccttggtcgttgtcgatgccgctgaatgtggctgacgggcgcgagtgcacagggatgcccctcatcgggctcttcgtcaaggctggcagtgatggtgaacagcataggaaactgccccttttcccagaggctctctcatgattctttggctcaaaggagtgtatttagtgtgacgactgttgagcctgtaacagggaagccagcaggacctgctagaactgtggttcccggtgagccagcccagccattttataactttcaaccatgtgaaacgtcaacatcggctgttacaattaaggattggacggaatttctctgaaggaaagtcttatgccctcccaagtactttaaatgctttcacgcaaataatcacccagaatcaaattacctgctggaagtgggacgatctttgacaaaattcttctgcatatatcgaggcatattcccgggngcagaaggcttaatgcaaggcacttgcatgagggtggtctcctgaataaacctgtagaaactggcatgaaatatctgaaattctcctctccctttatgacacttgctgcaaattaggtttgggggacataaggtttagcgacatgttacctttcttggggtgggcatgacatgc

SEQ ID NO: 511366 - DNA, 319 bp, Homo sapiens
tcgatacgactttttttattttgtatgttattatgtgagacagtgtctctcacccagtctggaatgcaacagcgtggtctcggctcactgcaacttccacctcccaggttcgaaggattcttgtgcctcagcctcctgagtagctgggactacaggcatgtgacactatgcctggctaatttttttgttatttttaagtagaggcggggttttgccatgttggcccaggcaggcggatcacttgaggccagaatttgaggccagcctggccaacatggcgaaaccctgtatcactcttttagacccttctgtcgtcttc

SEQ ID NO: 511367 - DNA, 440 bp, Homo sapiens
ctccatataaagcctccatgctgaaataaaggaggagtcccatcttcgggtcattccacttcaggcttagatataactaatcccttttcttcttactttcctgtatggaagctttcggaaacaaaacaggcaacattttgtgatcataaatatcatagttgccacgcaggccagcaggaatgctatcgcatccaaagagtggtactggatccaggtgaggttgtgggctgcgacccgaacggtgcttggctcctttatggcgcatgacacactcaatccagaagacctgctcgatccagggcactacaccgcgaagatcactgctgaactacttgactactctcatgatattctcttaactagactcggtcattactgactgacttccatgccttgagcaaatctctacttgacaatggtcctgatagtcacactgcggg

SEQ ID NO: 511368 - DNA, 227 bp, Homo sapiens
caatgagacattgaggacacacactgatgtctgcatatgtggatcagagcagatacctagatctgttctagtctgtcataccggcttgtgtgatctcagcaaagttaataatcaaggtgggtgcaaaagtacatggtggtttttttggtcatatttttaaatgggcaaaaaccgcaattacttttgcgccattctaatatcccagagactcagttttatcatctgta

SEQ ID NO: 511369 - DNA, 714 bp, Homo sapiens
cgtaccgccttactgttccccctatgggttcttccccccgagccgtggccggagcttttgcgtggacccccgtaacttgggttggcaccacttcgagttcacttccgggccccgcaaaattcccggatctgccccctctctcgcgcggtggccacgagacttccgttgtaccccgcggggcggagagggtccacatgaacacaaacacaaggcccgattcaccaatcagcccttcgtggtcacacccgcaaggtcctcctttcccaaaagtaaaaaaaaaaaaaggccccggcccactggctcaaacgccgtgtatccccgcaaccttgggaggcttaagcgggcggatcacccgagggtcacacgaattttgagaacaagccctggccaacacccgtggaaccccctcctcgtgctggaaaatacccaagtagcccacgcaatgctggcacacagcccgtatccccgctactcgggaggctgaggtatcgagaatcgcctgaacccgggagggccgaggaaaccgtgaggccgaggagtcacgcccttgcactcccacccgggggaccaagagtgaatctgcgtctccccccaaaaaaaaagagaaaagaaagaatgcttaaccaaggttactctaagcccccaattcatgaccaccttatccctccctttcacatagaaaaaattcaaacccccaaaaattttccccgcttt

SEQ ID NO: 511370 - DNA, 142 bp, Homo sapiens
gccttcctgcagggctttctcggcgcggcctggggcaccaggacacgagggagcatgctcccgggtacgccatcgacacggtgcaggtccatggacaggagaagtacttgatcctctttgaggtgggcccagattgtctgct

SEQ ID NO: 511371 - DNA, 143 bp, Homo sapiens
  misc_feature (4)..(4): n is a, c, g, or t
ctanggggcacctagaagcagagttgaggctgggagcataatgctgtcctcaaagtgaagagtcaccacttcttgtcaagtcatgtcatctctgcagcctcgtgcattttgtaaactgggaagaataaacagacatttctgac

SEQ ID NO: 511372 - DNA, 203 bp, Homo sapiens
tgatcaaccaggacatataccagcagttgctgaacggaggttctgtgctgctatatactgtgtcgcaactgctgatgtgagcactgtgctcgcttcctggcttgaccgcttcgtggagggcgtgtgtcccttcagtggactataggaggctcggggagaccagtgtgacaaggtgtgtgcaacgctcaatcaatgaagacaga

SEQ ID NO: 511373 - DNA, 287 bp, Homo sapiens
gggttttaaaattgggggggggggggttttcccccctttgaatttattaaaaccccgggattggccccgtttaatgggggaattgggggggggttgaatttttttcccattaacccccccaaagtgggggggtccccccattgggaaagggggtaataccttttgggcccttttttttggcccattttttccccccctttaaatagggggggggttttttgaatttttttttcccctttctcttgtcccggggtgggtttttggttttttacccagaggccgaaata

SEQ ID NO: 511374 - DNA, 294 bp, Homo sapiens
taattttgcggccggtcgacctcttatgcctactatacattaggcactgtgctgcgtatcaagagtatagcaatgaaccattatcatagacaatggaattactgcaatagaggtatgaatagactacagcagtgggacaaaagaggaaaccatgataactcagagacccatcggtgataataggtaaccacagagaaggtttgatttcatgcctggtgcgtgtgaagcttcccacccaacttcaaggaactgggaacaaagtggagcttctcgtctcaaaaaaaaaaagtcgac

SEQ ID NO: 511375 - DNA, 472 bp, Homo sapiens
tctctactaaaaatgcaaaattagcagagcttggtggcatgtgcctgtaatccctgctactcaggaggctgagacaggagaatcacttgaacccgggaggcggaggttgcggtgagctgagattgcaccaatggaattccggcctgggcaacaagagtgaaatccgtctcaaaaaaaaaaaaaaaaaaaaaaaaaaaaagaagctcagcaccaccaaccccatcccatccctatttcttgtcttatgcatcttttccatttggctgtttctgagttgtatcctttataataaactggtaatagtaaagccatttcttgagttttgtgagctattgtagcaaactatcaaacctgaatgtgagtggatggtcataggaactcccaatttatacccagttacagttagtaagaagtacaggtggcaacctgggacttgtgactagtgtctggagtgagggtggtcttgtaggac

SEQ ID NO: 511376 - DNA, 1423 bp, Homo sapiens
gtaatatagcgtcatactattgtcataaggacactgtctcatacttcttctggttactaacgacgggtctttatataatgcccgttaatcgctctcgagatatctagtggcacgacacgcttcaatctaccacacggggttcttattggcggcgcacaaagaattttatgggaacccagcagtgtttttatcatcttgctcccaaattacggtgtatttttccccggggatcattaggaataatgtctcgcatacccctatgtttctctcctacaaaacacatggtatgcgtctttataatacttcgtccatgggtgtgtggatacgtcttacgattcaagggaatatatggcccccaaagtatttcgtctaaccgggcgggatgatagttaaaagctttgtcccctcttgtaaaaatcgcatcttttagaagcttcatggggatgcctctgccatgctaattccggcgctggaactctgtttaggggcccttataccatggtacaggcttcttcaatgccagggtttgtttctccctgtggcttttaccaataaagtccaggattttaataaatccgcgcctaaacctgtggatataacatcattcgggggcctcctgtgtctttcccataaattttaccggatattggtactctactggcctggaagtgcttaccaacttccctaggcaagtattaactggagcatctaaaaaggttttttggtggaagtctccatggacctatgaagggcaaaagtctgcctcaagctcctggactaattacaatggctaattttggctacaaagcgcactggaacagcaaccccagggtcgcataagaattatccttggcgcgctaagaggatactaggcaaaaactatgaggattatctgagattattcctgctggtactatttatctggagggatcgctttaggcttctattgcgaaataactactcgtaataccctttaaaagagccttgaagagcttaagccgagtactacagagttgatgccacgtgatgggataccctgagctagtagccattaggtaaatacacggtaagtaagagtgtttcaaagaagaaagatgaatggaatgttaagccattacttgatttggagcctcatagctctatctcgatgttaatctttcacattcgtctgggtagcacgttacacaccttaggtacagaattggtcgattctgcctgatacagtaaataggtgagtaggggatggtgcaagttgtaactgcgctttcatctatagaagcccctctgtacagatatatcacaattgcataagttgtaaagaatcactaagcagccacagttatgtaggtctgattttgaatgtctataattgcagtcgagctgagatcacgccattgcactccagcctgggcaattaaactcg

SEQ ID NO: 511377 - DNA, 259 bp, Homo sapiens
cccgactagccgacaggtaggcacacgctgagccagtcagtgtagcgcgctgcagcctataacggcgttgcctgcggcctgggacggcactctgatgaccgggtcttgttggatctgtgtgccttcctcaagaccattgcactgaatggttgtggaggacgtgcgaaccgtgcttgagcaactatgccctggaggatgacccgctgtcgggctagacggggcccaaattagccagaaggaaaggcatcaaaaaccccgg

SEQ ID NO: 511378 - DNA, 416 bp, Homo sapiens
tggaggaaaggattttgcactgttgcagaacgggcgagttttgaaagaagcaggcccacttgtggtgcccagggtcgactcaagaaagaagataccgccccacaattgcaagctttaactctcgggttcaaacgattatcctacctcagcctcgcgaaaaactgggattacaggggggcagcactatgcctggataacgcttaaatcctcagaccaggaagggtcctactatctagtccagtttcgtcttaaactcccggcctcagacaacccacccgccatggactccgaaatcgcttttattccaggcctttgccacccaccgggacaactttaacttttgaaatttgatttgtccggccttaaacccccgcgcttatattaaccactccccccttctccccatcatcttcttc

SEQ ID NO: 511379 - DNA, 272 bp, Homo sapiens
gttattattttttttatactccaggtagtgttctagatgagacagaggtaagaattaggggaatgggcacaattttggacatcaatcccaaagagccttagttaattacaggcactacgcaaatgacgccaggagtaacaacggaacttcacttttgttacgggatttttatttttgctctttttatagtatcagggagcaactgccttttaccaagcagagaatgcctgtttgatctagttgaccagggatacagagcgagccatatgtgg

SEQ ID NO: 511380 - DNA, 171 bp, Homo sapiens
agactatgccactcttctgctcaaaaacttcccaaagcttgtcacctcactcaggataaaaaaaaaagacctcagccaggcacggtggctcacgcctggtatccgagcactttgggaccccaaggcgggcagatcgcctgaggtcaggagttcaagaccaacatggccaac

SEQ ID NO: 511381 - DNA, 138 bp, Homo sapiens
aggaccgggaagagatagcgtgcagatcctctctatcagattgatctgcaggcatatctcacagatttcctctgcctgttttgcagctgctagaagatccctgccttccagaagtggtctgataccaacgctatctct

SEQ ID NO: 511382 - DNA, 170 bp, Homo sapiens
cggtcgacctctacgacggactccccaccactgacgagcttacctacgacacgtgtgacacacaccgtacggcttggacttaacggcgaccacgcgactttctacggactacgtcacgtacgacacttacgacacttgtgaccgactgactaacgttgtacgacggagac

SEQ ID NO: 511383 - DNA, 113 bp, Homo sapiens
  misc_feature (48)..(48): n is a, c, g, or t
gagacacggagcgccagggacaccgcacagattttccgagttaatctncggacgctgcgcggctactacaatcagagcgaggccgggtctcacaccctgcagtggatgcatgg

SEQ ID NO: 511384 - DNA, 1111 bp, Homo sapiens
aggtttgttatttgtagttattggtatgtaatgtattttttagtgtgtagatatttttgtgggtatttttttttggtgtattctatgtgaggtgtatagtttatttcgagtatggggggcatatatttttgggtgtatatttgtacatgttgtaatgtttgaggaaaacgttgtgagaatttagatggatacgggatcgggtgatattgcagagcttccctggtctggatatgatcgctgaccgatacttgggttatgccatttaatgccagcggattttctggaggaccacgtgtaaagctgcgatgtgactaatataaggtgcacacttccgggattcctttgttcttcaattttgagcctgagtgttttgaattaaagaggggtaaaggtaaagaagttgttgtttatctgtatcttttttgtttatgtctctttctgaattactaattatagtttataacatcactttcttcaaacaagactccaggtaatttgataagatgtgcttactgtatgcatggaattcaattgcatattgtgaaagagggacacatagaaaacagtgtctgtgaataatctaaattactttgaagcctactgaaaacttttatttatttgttttatttattctattttttggagacagagtcttgctctgttgcccaggcttaagtgcagtggtgcagtctcggctcactgcaacctctgcctcctgggttcaagctattctcatgcctcagtctcccatgcacctggaattgcaggtgcgcaccaccacacccaactgatttttgtattttatctgtagagatagggttttgccatgttggccaggctggtctcaaaattccatggcacgtcaaggtgatctagcacgtgccgtccggcgctactcacataagatgccatgcggtattactacggttgatgatgccaacatatagcaccatgcctagtgtgtttatatatctactgatcattagtatctgcagctttttgtgtggaaaaggaaaatgtgttaatgccttaataactgttattatggaggtaaggatttattgacttatctattatgccccaatacctcctgaggcaacacctatgtact

SEQ ID NO: 511385 - DNA, 205 bp, Homo sapiens
tgtggtctacaatcacttaataaccataattagggtggatgtggtggctcatgcctgtaatcccagcactttgggaggccgaggtggaaggatcatgaggtcaggagatcgtgaccatcctggctaacacggtgaaacccatctctagtaaaaatacaaaaatcagccgggcacagcggcacacacctgtaatcccaggtcgacg

SEQ ID NO: 511386 - DNA, 423 bp, Homo sapiens
cttctttctttttttaaagagacaaggtctgtgtcacccaggctggagtgcagtgataccatcgcggctcgctgcagcttcaaccttctgggctcaagtaatcttcctgccttagcttccctagtagctgggactataggtaccactgtgcccgactgatttttttaaagctttttagaggtggagggcttgttatgttgcccagactggtctcaaacccctgacctcaagcaagcctcctgcctcggcttcccaaagtgctgggattacaggcatgagccaccacacccagcctcaaaatatggcccttgttaaagagtgcttactatgactctgtgtccatagaaacattaaagaaaggtcacatagggctgggtgtggtggctcacgcctgtaatcccaggacttatgggacgcagaggt

SEQ ID NO: 511387 - DNA, 114 bp, Homo sapiens
gcgtcgacagatccttcttcatgtcctttgtgaagtagacattacgctctccccatcacgacgcaggagatgacatgtgacagtaagagggttacagcaattccccatctggag

SEQ ID NO: 511388 - DNA, 512 bp, Homo sapiens
ctcggtcctgtacctgggcgtatgactgcgtgtctcactcgaaggtactgggcataaatactatacgacatgtgtaagagtcataggagagagcagtgccttctacaacgccaaggacgtagaggcatgcgcagacggcccttccttgccgacctcagtaaagaaccaactctgctggaatctacattcgggatttccagcccacagtacggcaatacaatcacacgttctagactcagcaatctatgatgctttgctatggaagccctagcaaatgaatacaaagacattctaagtacaaagaaggggaaagaaacggaacgagatggtctcagtagagatcgaactcaggtgcagaatctgagtctcagcacaagggctactatgcagaagtgggtcacggactgagaacactcaggagctcggtgggcacaccgtcatggggactaggcagttccaaggattgaaatacggataagcaggtcgagaacagcgacatccagagaacttgt

SEQ ID NO: 511389 - DNA, 269 bp, Homo sapiens
ggccgagaatgtgccaggtctttatttaatcatacaatgaaatattacgctccattgtggatgctacataaatagcattatataggccgggtgtggtggctcatgcctataatcccagcactttagtgaggctgaggcaggtggatcgcttgaggccaggtgttcgagacgcagcttggtcaacatggaaaaagcccatctctactatcataaaaaaataatagaaaaatgggcggggtcgccgtcggtgagcggggtacgcgaaggct

SEQ ID NO: 511390 - DNA, 382 bp, Homo sapiens
  misc_feature (12)..(12): n is a, c, g, or t
  misc_feature (17)..(17): n is a, c, g, or t
  misc_feature (26)..(26): n is a, c, g, or t
  misc_feature (30)..(30): n is a, c, g, or t
  misc_feature (104)..(104): n is a, c, g, or t
  misc_feature (136)..(136): n is a, c, g, or t
  misc_feature (139)..(139): n is a, c, g, or t
  misc_feature (150)..(150): n is a, c, g, or t
  misc_feature (190)..(190): n is a, c, g, or t
  misc_feature (205)..(205): n is a, c, g, or t
  misc_feature (207)..(207): n is a, c, g, or t
  misc_feature (296)..(296): n is a, c, g, or t
  misc_feature (345)..(345): n is a, c, g, or t
cgcacttcggancaaanggtgctgtncttnctggcctccctctttggcgggaagattgccgtgttggagatcaacccggccgcgctagtcagggctcagcagtncccagcatggggcaggagcctctcggtgccanccnagctcctgtgntcctaccgacctctccactgtatctgggaattgccaaggngaagagtaccaaggntnttagttgaacagcggacgtggtcagtacagggtgctgtgagatctaaggaatacaaggcttgttgcgttcttcattgtggttagggctnctgcatttgctttgcggattcttatgttaaaatatgcattccgtacttnccttccatccttctgtccttcatgtctctgcctctcg

SEQ ID NO: 511391 - DNA, 291 bp, Homo sapiens
ctaatgctagaataggtctgaaggattagattataataatacattaatgcaaatttcctgattttaaacattggagattgattgcacaaggagaatggctttatgtgtggaaaatacatagtcaacattgtgtcttaaagcttctgaaaaaaatcttcttttagggcataaatagaagtggatgataattgacctgttgatttgctactaattgagctgctatctgtttccatggctagctcatgggatgagagaatatatgtagtttggtatgtttcaattctgctctct

SEQ ID NO: 511392 - DNA, 608 bp, Homo sapiens
  misc_feature (25)..(25): n is a, c, g, or t
  misc_feature (72)..(72): n is a, c, g, or t
  misc_feature (82)..(82): n is a, c, g, or t
  misc_feature (280)..(280): n is a, c, g, or t
  misc_feature (318)..(318): n is a, c, g, or t
  misc_feature (361)..(361): n is a, c, g, or t
  misc_feature (402)..(402): n is a, c, g, or t
  misc_feature (421)..(421): n is a, c, g, or t
  misc_feature (431)..(431): n is a, c, g, or t
  misc_feature (480)..(480): n is a, c, g, or t
  misc_feature (607)..(607): n is a, c, g, or t
cgatgcttgggatacaaccgctagnttctgccttccacacacagtggattttactgtaactgtcttgagttnctctggtgcnactgggttccgagccatgtctacggccgccactggctgctgtggctatttctgtggcctgactgtgtacactgggcttcgcttgttctttcattttacaaatgtgacgaggggctgggcgtggggccactcggggtacgactgtgtgtctctgcccatgggtactctctatctaacagcgagacgcggcacaaacggntagcgcaggatagcataacaagtgccacccacggtacnggctcagggtgctacgggggcctgcgagatggccgcctgggcntcgggtagctgggaaggcttcctggaggaggtgaggccctnggtgggggtgtgcgtgggncaggcaaaangcaggcctctcggcgcccatctgtggttcctcaacaccctgtgtgtgcnggcccctcagctgacctgtcttctgtgaaattcttgatcccgctctgttctattcacactgtgctgctttgccttggtggttagcatggttagctttcacaagcacaagctcacactcgaaaactang

SEQ ID NO: 511393 - DNA, 112 bp, Homo sapiens
gagaagtgactttatatagcttagttgaaataggttaatatggttgtgagtttatacagagacatgtgtggtttatctacgttgaagataataggagaattggtgctttagg

SEQ ID NO: 511394 - DNA, 804 bp, Homo sapiens
  misc_feature (10)..(10): n is a, c, g, or t
  misc_feature (63)..(63): n is a, c, g, or t
  misc_feature (67)..(67): n is a, c, g, or t
  misc_feature (73)..(73): n is a, c, g, or t
  misc_feature (76)..(76): n is a, c, g, or t
  misc_feature (80)..(80): n is a, c, g, or t
  misc_feature (86)..(86): n is a, c, g, or t
  misc_feature (167)..(167): n is a, c, g, or t
  misc_feature (171)..(171): n is a, c, g, or t
  misc_feature (175)..(175): n is a, c, g, or t
  misc_feature (207)..(207): n is a, c, g, or t
  misc_feature (221)..(221): n is a, c, g, or t
  misc_feature (270)..(270): n is a, c, g, or t
  misc_feature (299)..(299): n is a, c, g, or t
  misc_feature (305)..(305): n is a, c, g, or t
  misc_feature (309)..(309): n is a, c, g, or t
  misc_feature (331)..(331): n is a, c, g, or t
  misc_feature (339)..(339): n is a, c, g, or t
  misc_feature (434)..(434): n is a, c, g, or t
  misc_feature (591)..(591): n is a, c, g, or t
  misc_feature (607)..(607): n is a, c, g, or t
  misc_feature (637)..(637): n is a, c, g, or t
  misc_feature (691)..(691): n is a, c, g, or t
  misc_feature (791)..(791): n is a, c, g, or t
tgtgctgggngcgggggggctgcgggggcctttgtcatgtttctcagatgcggggggtctgcnaggntttggnggntgcngggctngggcccggccccgggcgggggctccgtgttccggggggggggctggcctgcgtgtgttggggtgggggggggggtgggggngggngggngggcggcatgcctgggcctgggggcgggggcnatgcccttcctggngcccccgcgtacacagctcctccaggggggtttctgggttcctggggcncttggggtcctgggaggcgtgtgggaggnggggcnggcnttgcttctcaccaggggcgganggggaggnccatgcatcccctgcctcccgcagtctcagggacatggcagatgtctgcgacagataatgggctgccctcgaactgaggcctgtctctgaggggnggctgtgaccggattcttccccgacagagtcaccctgggattcctcagagcaagtgctccggtcgcattccagatcatccactggcaaaagcatcacttcttacacgtggttttcagggaagtacctaatgcagaacgcaagggtggggtggcaggngcgaggctgtacaganacacagaggtacactgtacaaggccggggnggcctgggggtcactcaggtggccaaaggcagtggcagtgctgctgaagtgggntgctcccacccagggcccacatcttccgactgccccagaatctcggggggagcggcctgaaggcggcccgggtctcccgtgcccgggtctccgcacccgngacgtgtgcctaa

SEQ ID NO: 511395 - DNA, 1919 bp, Homo sapiens
  misc_feature (1457)..(1457): n is a, c, g, or t
ggcccgccgtaactgactcgctcgctccccgctctggagtctgccatcagtggatgttctcgcatgaagacaaatggaacctttgaacttaagaaccttatgaaaacgctgggtaaaagaccagactcgacagacactggtgatattatcttcaagccgcaattgaagccaatgttcctgtgaccctttggccatgggactacattgggcggcacaacggggaaaccgagcgtttagtacagcaatgcgccccaggaatactttccatataacaatatacagaaggttgcacagggtgagctaggaagaagaattacacaaccccacagtggcatttcctaagatacatcttgctacgaagccgacaacagcgtggaatcacaacgaacgttgagacaccaggccaggataacatagtggcttctcacgcggcatgaggaactacaaccacagggaagatacaagtacatagggggcgggaacacaacaccacgctcacgtccagaatatgagcaactgctatgcacagatccgtgcacaaagtccagatacagatgtagagcaaagaaccttacccccgtatggcaccgcgaggagaccaaaaatagacatacacacgcaaaaacagcacaggacgcacagaaactacagggacggccgaaacgcgacaaaaacgaaaccggtaggagaaactgccagacagccaagccaccacggctacacgacacgaacacacgattgagccaagcacagaacacaacccgaccacactaagaggaagccagccccagatagggagcaggggacagacgcccattgaaaccaaccaacggcaccgccagggacaccgagggcacacaaaccaccaccgccacgagcaaaagcattaggccagtaccagacaatcacccgagaggcgccgccacaggcggcggacacacagcccacatcaggactcgaaaacacggtcatcgggagtagcctgggggcttgcagaacttgtccgtgggttcccttcagtctacactaccggtaatcgggaacaccatccttgtgtggcaactgcacccaccaaggtgttatatggacaccagcagtggatcacaaaaacgcgcaccacagtaatgagcacgtaaagagaacctggtcggtgatcacaaagcatctagaggcaacagtgaacacttgacagaggaatgcaaaaactcccctggggtcgacgacgaccgtggtcagctgcgataagactaccaggccgagcgtccgtagcgccgtgtctgtcagccagcacaacagacgagcacccgcgaacagtaaagaaaggcggagcagacacagcacagactagtctacacgacagacagaaagaccacaaatgacgagcaaagcgacgcacgccaaggaagaacactcgtccggggccgaacagagtgtagacaactcgtagcgaagaactnacgtaagccgacactagcagacatgagggcagctagcccagcgagtgagcacgccagagcagcagccagacgacacgacgttctagaacaacacgagcggagctagctaagcacgaaggaagacagagatactgagtacgagagagaaaggaaggcagagcgagaagagcagacggagcagggtacggagaacagtaggagctgagagcgagtcgaggggcgtaggaaggctcgtccacgcgcagaggggcgagcagggagcgacagctagcgaacaaggagagcaatagtagacaagcagaggacgacagcacagcaaggcaggatcacggctagacagcagactgacagacaagaagatgaaggagcagagaaagaggtggtagagcagacgaggaggagtcgaacaggaagagaagagagaaccggacgaggagagaagccgaacgacgtacagcacgg

SEQ ID NO: 511396 - DNA, 533 bp, Homo sapiens
cggttgtgcaacgcagagttgccacatttaatcagatatgtattggtgctaaatacctgatgaattattgccgcctccgagttagacgcaggctgttcgcatattccacacgacctaccatcaaaatcgcctctatcacttcgtaatagtcacgccagcacccacttaacaccaggactgtgccctgctctttacacatgaccaagcctgccaatcccgcaaaaacacaacaacggtttggccccaaccccttgaagaaagagattaaacgcaatagaaaacctgattttcctctagaaccacatcacagaataggaaattaagaatcctcaggagatatgagccataagaaattcttatctatggaaaacacgcaaaaaaacgccggaagcaggtacttccggcgttacgagaacgatctctaatgagaccctagattacagaacctgaacttggtcagcctgcatacctttctggccttgcacagcaacgaaagaaacttactgaccttcctgaagggacttaaatgggta

SEQ ID NO: 511397 - DNA, 100 bp, Homo sapiens
gagttttacctgagcttcagagaggttagaaagaagggacagcccgaatcatctcttttcctcttccagtggcctccaggcctctcttaagagttgcaaa

SEQ ID NO: 511398 - DNA, 897 bp, Homo sapiens
  misc_feature (19)..(19): n is a, c, g, or t
  misc_feature (193)..(193): n is a, c, g, or t
  misc_feature (211)..(211): n is a, c, g, or t
  misc_feature (239)..(239): n is a, c, g, or t
  misc_feature (249)..(249): n is a, c, g, or t
  misc_feature (264)..(264): n is a, c, g, or t
  misc_feature (300)..(300): n is a, c, g, or t
  misc_feature (349)..(350): n is a, c, g, or t
  misc_feature (364)..(364): n is a, c, g, or t
  misc_feature (384)..(384): n is a, c, g, or t
  misc_feature (420)..(420): n is a, c, g, or t
  misc_feature (547)..(547): n is a, c, g, or t
  misc_feature (555)..(555): n is a, c, g, or t
  misc_feature (592)..(592): n is a, c, g, or t
  misc_feature (601)..(601): n is a, c, g, or t
  misc_feature (628)..(628): n is a, c, g, or t
  misc_feature (644)..(644): n is a, c, g, or t
  misc_feature (712)..(712): n is a, c, g, or t
  misc_feature (728)..(728): n is a, c, g, or t
  misc_feature (736)..(736): n is a, c, g, or t
  misc_feature (747)..(747): n is a, c, g, or t
  misc_feature (753)..(753): n is a, c, g, or t
  misc_feature (760)..(760): n is a, c, g, or t
  misc_feature (768)..(768): n is a, c, g, or t
  misc_feature (805)..(805): n is a, c, g, or t
  misc_feature (853)..(853): n is a, c, g, or t
tataagtcagaaggcaganaaatattaacttcaaagagtttaatgatgaattagtactgtatttctgaaaacattggtgaaactgaaataatacaccaatagacatgaccaatatgatcctggcaaaatgcacatgtcgctggtcaagcagaaatatatccttttacaaatgtgctgaggaacaatgcttaanattatacaagggtttaanatataattttaatgaagtatatataaantgtacatganaaggggaaatatganagctggcaaaagtgttttggctttcttacaaatggnatccttataattccccaactatcagaggatgagatatttttctagaaannataaaacgactgcnatggtatttcctatgaggcnttatgtatgagagtgacttgcagagtctggtctgcngtgatctggcccatcactttccttgtgccagtgtttcatagatgcgcccatcaggaaatcatcacgtaggagcgtccaacctgggcctgcttctgagttcacttcagtgtgtgtggcttttggtttnttcctgcntgaagcagtttcatttgtacttccatccatccctctnaaaacactnatgaaatctttcttggaaacagttganatcaacttagcacgcnttctcatagaacttccagcttccttaaccttttcatcaacattcttttgatgtttctgaacagcattnaataattgcaccacancccttgtngcaattctctnaagaanttctctntgtttctntgttttggacaacatctggctttactctgcacaacanttcccacttcagcctcttatcaagctgttttattttctctagtttttnttgcattaacttttctttttccttttccagcctcttatttttga

SEQ ID NO: 511399 - DNA, 367 bp, Homo sapiens
gaaacttagaacatcatcaatgaaggaacaaaagcagaaatagaaaatgtctgggtagacataacagactattattcttctcttgagttccttaaggtatgtttgatggttgaaagcaaaaattgtaactttatctgatgcagttgtcattgtatctagatgtactacatacataagataaaagggtaaatgtaatgggactaactcttgatgaagtttctatattcaacttgaatggtaaaatattgattcttagtatactgtgaaaagttatatatgtatatggtaatccctagaccacttaacaaccagattgaaataaaccaaaacaagatagacagaggaacatagaagaattaaaaaaaaa

SEQ ID NO: 511400 - DNA, 88 bp, Homo sapiens
ccccccccccccccccccccccctggttccgctttttttaatagtttgtgtgaagggggaagggccggtccgttattaactggggttt

SEQ ID NO: 511401 - DNA, 306 bp, Homo sapiens
tggctaatttttgtatttttagtagagacggggtttcactgtgttagtcaggctggtcttcaattcctgacttcatgatccgcctgccttggcctcccaaagtgctgggattacaggcgtgagccaccgcacccagccctgtttattcttttcctaaggtactcgtcaccatcggccatcgatcacttccttttctctcctccctctggaaggttccatgagggcagagcctcgtacctgctctgtctccagtgcctgttaacagcctctcattcataacaagatcctggtaaatagttgttgaat

SEQ ID NO: 511402 - DNA, 123 bp, Homo sapiens
tctagaggacccccgggatatagccaaaaatatattatataattacggtttcatatctaccttgagtcaaagttctgtcttatagatgggtgactagagtaatactaacactatgggtgtatt

SEQ ID NO: 511403 - DNA, 1118 bp, Homo sapiens
gtgtgccctgtgcatggccctgtgcaggacgcctcgtgaagccgtgtccacctcctcagccccgcagtgcggctggtggcctgtgcagctgctggtgcgtggctccgagaagaaagagtgtggccctggggcgggcgggagtgggatgtgtgtctgatggcctgtggccctgggaaggtggtcggggcctgctgctgtgacgtgaaggggctgcctgtccttcggtcctgctcgtgcggtggcccatgccatgggccctgctgggactcagaccaagccgggggatgctgctggccttcccgcccttgggggcccttccctgcctgggcctgtgagacccaatgcccccgaacggccatgtgcccctgcccttggaaaggctggctctgcgtgccctgggctgccttggcactgtggtgggaggtttgtgacgttggaacgcggaccgagggtagccttgggcggaggggtctgggcggttgtcgggggccgggtagtcggccgtggcagcgcgaagctattcttttagtaggggattgcgcgtggaaacggtcgggccgagtacccggcctttcgaggagctcagttaagacttcaaagacgttgttacctcccgccgaaacgtttaaccccgaggacttccccggtgttgccgaaatctaattcgtgggcggaccttagtggacccgcttggtgggcaattaccggggcgcccgaccttaaatggaacccgagaagtccacgtgggattgtgcccccgtaaggcctccagggttatgcacctgggtggttataccccccgaagaatgggcgcgaccgcgaatttaaccgggagaaacgagcgctcacaggaatcagagataggggcgacgggtagacaaaaccgatttggaaagagctagaggcatttgatgtggacgactttggaaatgactgcggcgaatatgaagcgttgattagcgtttgaaacatgtgggatagtgattatgaagaaaactagagagggaaagacgtagtagatcggtgagagaggagaaattgggagtgaacgaagatagatggcgcccgcatcatacccatcccatgagacaattttagatagataaaagattggatga

SEQ ID NO: 511404 - DNA, 107 bp, Homo sapiens
attggcagatggagttttgcccttgttgcattgagctgagatcgtgccactgcactcggcctgggtgacagagcaatgatctgtctccgataaagaataataaaaaa

SEQ ID NO: 511405 - DNA, 247 bp, Homo sapiens
  misc_feature (34)..(34): n is a, c, g, or t
  misc_feature (137)..(137): n is a, c, g, or t
gcaggaaaaggggatggagctgaaatacacagtncactgtatcagttacctcaaacttaaaacgaccaaaacccacctctgatctccacatcacccagacccgacagtctaccgcaaagcaataaatggccaccttntccctcttcctctggccccaaacccctgagttacatttgccttttccgtctctgccttatgttccatgaccagtaaccgcagtgggcttcacgttccaaacacatccggg

SEQ ID NO: 511406 - DNA, 317 bp, Homo sapiens
tacacgatttgggggaaacccaaatgaatttgatggccaaatggaaacattttcagcaaatctgtaagcagttggtttgtttagtgggggaaatgaagtttttaagttttgggaatagatgacctgtttttacttcctaaccctgaattcgttttgtaaatgtagagttgggatgtgtaactgaggcgggggggagttttcagtattttttttggggggggggggggcaaaatatgtttaaagttttttttccttaaggtctgcctagaatcctaagggcaaatgactcagggtgtaacagaaaacaggaaattcca

SEQ ID NO: 511407 - DNA, 209 bp, Homo sapiens
ccgttatcccaggttatcattacaaatggatccactacacttcagacgttgctaatcctgtcagaatcaaatacatgcaaagatggcaggacacgctgaggagggatccgacgatgagagatattatcaacagcacacgctctattctgtaccctacaatatataccattagttggatattgctttcctccccgcgccggcaggccctg

SEQ ID NO: 511408 - DNA, 493 bp, Homo sapiens
ttgagacgaagtgtcacccagtctcccaggctggagtgcagtggcacgctatcggcgcactgaaacctccacctcccaggttcaagcaattctcgtgcctcagcctcctgagtagctgagattataggtgcccgccaccatgcccagctattttgtagttttagtaaagacatggtttcatcatattggccaggctggtctcaaactcctgacctcaagtgatctgcccgccttggcctcccaaagtgctgggattacagatgtgagccaccacgcccagccatattaagctatttacatcagggacttgagcatcctcggatttggtatctacaggaggttctggaatcaatcccccaggaataccaaagaataaatatagagtgagagtgtgcgtgtatgtgtgcatgtgtgtgtgtgtgtgtgtgtgtgtgtgtataaccacatatataaacatacataaacatatgaacatacacacatatatacatat

SEQ ID NO: 511409 - DNA, 599 bp, Homo sapiens
  misc_feature (58)..(58): n is a, c, g, or t
  misc_feature (176)..(176): n is a, c, g, or t
  misc_feature (388)..(388): n is a, c, g, or t
  misc_feature (492)..(492): n is a, c, g, or t
  misc_feature (561)..(561): n is a, c, g, or t
aggaccatcgcacacttcagctgctgggtctcatcagagatcgaccaaacagagctcnttggggctttaaatcaccatggtgactcagttgttatccgattatatacaagcactcaactttcagcattccatttgatgagtggtatgccattccctaaaagggtatcacatctganattttttgtaaccttctaaaagaagtcatacttaatacagtaactaggaaaaaaacctcatctttataaagatcaaaaaaccaaaacctactaggaatgtgtgttttgctaaacagcttacttatgtttatagttgctacttacaaaagtgacaccaaaaaagaacctgtattctgaatacagtgaccagagcagaatgtctacagccctgnccaatataacaacactaatcatgtgcttatggaaaaggacttccaaacatgtcaggcttctggtttatggaccagcagttggagctgtctgtctctctcacgtnttcaatgctgtcttctttgttttctggttgaatttcgccttcatcctccttgtgttgagttggatcttnttcagcaacctggtctttggtttggggttcatgtgtag

SEQ ID NO: 511410 - DNA, 942 bp, Homo sapiens
ttctaccacaatgttctgcgtgtcgtgcgaccaaaacagcattatgtagaacatgatctagtggcgcaaggctctgttagatgtaaggccatgatggctaaagcaatcacaagagggcatcttacacagattggggatgtcatggaaggccagacatcctgagtggaatcctgcaaaatgtaaaacccaaataggcaaagaaagacggactaaaaggatttccaggacaaactgaggtcacatctagatcctgactttattgtgtctgtttaaagtatctacagtaacctgtatcaacttagtcagtgtattaatacgtaaatttagctccttcaaagcaggttggaactatgtgctacataaatttcagcttcacacaaggaagggaaggagctgaaattaggtgaacaggcagttacagcaaaagaggtacaacataaaaattgaatagctggctctggtgaaatgagacaaggactgttagagtcaaactggcctggactcttgaatcctgatcctcaattgcttgtagctgtatgatctggacaaacgacagtaactgtttctaacctcgagtttctcatactgctaagaatgacgcaatctgtaactcctaaggatagcctgaggattttatctcaaagtgcgtgtacagttccggaaccaagtggtttgtgcctaatgactttatatacaaacatatattacccaaggtacacaaaccttgagaacatagagctgatagagacgttatagcttaaataattccattacttgttaggatagcaaactaacgtgcattgagaaaattaaatcgactttacatgttttagattccagacagatagtgttagacttacaaaggttacccacaaaaaatcacagcccaggcatgtaggctcacagcctggcacttggaggaaccgagctgggagcatacgc

SEQ ID NO: 511411 - DNA, 278 bp, Homo sapiens
  misc_feature (64)..(64): n is a, c, g, or t
  misc_feature (76)..(76): n is a, c, g, or t
  misc_feature (105)..(105): n is a, c, g, or t
accgtcgcatgcccaggtgacggaacagagcccattgggtgagggagcctggctcaattgcccngtgccatagtgnaatgcatgcccccaagccacccggacccntgccttctccatcttcccacctgatgcccctaagctaccttgagaaccagacgtcgccaggcgagtcaccttgagcgtggaaggtccagcagaggttgtccatgacagccagtcccagaggtaacctgggggcctgaaggatgaagaactttggaggaaattgtccttccgca

SEQ ID NO: 511412 - DNA, 885 bp, Homo sapiens
  misc_feature (481)..(481): n is a, c, g, or t
  misc_feature (487)..(487): n is a, c, g, or t
  misc_feature (574)..(574): n is a, c, g, or t
cctgtcatcgagtgactgatttccgcctttcagagcctcagcaggttaaaaaacaaataggacatggagacagtggaagccactgtgcactcctgctacggaaagacggctgtgccttgttgaagatgatactatatgattcgctaccagagtggggccatccctgcttcaggctgttcctagatgtttaaaagaacattccaaacgacgttaagaaactttgtgctgccattggtgtattcctttccaaatcttttctaaaatgttagaattcagaccacagttcctgagctttggatgcaaactccttggccctgaatccctggaagccctcccctgtggatggtatcagccatcacagcaggatgtgctttaagaatccaaatgaattcagttataccacgtggcgggacttttaaacttgagctgagcttactcatttctggccgactattaatcctatagctaaatcatgtacgtnaagganggggaaaaaaatccaacctgggtaaccacacaacaaacactaaataaaaccaaggtaatgtggtaaccacacaacaaacactaaatnaaaccaaggtaatgtatggggcatctctgtgctgcttagtaaaacttgaagtttcttaatgtcgcgaagtaacagaaattacttgggggaatttcaggtgtttttggtaaactctttggggaagtaaacagtcagtgaactttcggaatgctgggacttttgactgcagcaaaacaaagctaagacaagtggattccgtaaaaaagatcactggcagcagaggagaagcagagctgagaagagacaggctggtgagctcaggggatatattctaccccctctatgcatcattgcggatacaattctacatc

SEQ ID NO: 511413 - DNA, 103 bp, Homo sapiens
  misc_feature (26)..(26): n is a, c, g, or t
ttttaaaattttttttttaaattttnccaaaaggggaaatttggggggggggtttttccccaattttagcccaaaggaaaccttcccttttgccttttgggga

SEQ ID NO: 511414 - DNA, 231 bp, Homo sapiens
ccggtcctctcagctttcaagtgctgggatacatgagccacgtgccggccgcctggtctcttattctctaaatcttactatggacgtccaagttactatttatgagagagggtctcactctggaaccccatccccactaaaaatacaaaaaattagctgggtctggtggcacatgccagtaatcccaactacttgggaagctgaggcaggagagctgcgtctgctgaggag

SEQ ID NO: 511415 - DNA, 841 bp, Homo sapiens
tcgggaaaaaaaaagcttaacggggagaaaatacaacaaattccagaagtgcttggtttttagcccaccctatcaccccaccagcaataggaacacaaaccattcgatcaccacacattccctacctcagggagtaagtacagcagccaacatctgggtctcagagctgcggggcaaaaggggcatggaggaagaatgtatctgggagaataccattctctcactcttttcccctccttccgggcctagattaagaaagaatctagactgtcccaggatacagaactctgggtcgggatcttgtgagaactggggggcaaaaaaattacgccgcagaaagccacttaggggcaacgaaatatcagcgtgggaacctttacagaactcagttgacccaggtgcattaagaacaagtgtgcaccaatgctccagaccaatgtgataattcagttcctatagaatctaatatgagctgtaatatcctcaaactcctaaacattatcaagcaggtggacaaggtttacagttcaacacccaaggaaagtacttctcccttgatcaacctccttgcctattacaacagaaggggaactcgggcccctcgaaagctggggagggagcctacaacgggactccaacggccagctacaggagacaccgacgacgaacggccggtgcagaacacagtagcggaacagacaatgcagaaccgcacggtgctgtgaccaaggcatatcgccccacacaggaaccccagaagaccgcgaagcaggcagccacacccccaacaagcactacactacacgaccggcccgccccggaacacaagcacccaccttga

SEQ ID NO: 511416 - DNA, 125 bp, Homo sapiens
gagaagcaggcatcaagattacgcgagaagccataacatggaactattcacatgtcgtatatttgtactgaattaaaaaattaggatctttagttccagtattggaatttaagaactttcgagaa

SEQ ID NO: 511417 - DNA, 597 bp, Homo sapiens
ggcaaaaagaaggacgataaaaaaaagggccggggggagggaaaaaattttttttttaaaaaaaaagaccccccaccaccccccgggaaagaaaaatataaaaaccccccgcttttttattttttttttccaccaacagtgttggtgttaagagtggggcccccaaagtggggtttttctcccccgaccctctcccctatttttttgttggggagcgccccttttttaaaggggggggggggggacacccccctcttttaaaaaaaaagaggggggggatatttttgtggggggacataaaccaaaattttttttcccccccccacacccccccctcttttaaaaaaaaaaaaggggggggggagccccccccccaagaaagagacccctctttttttatttaaaaaaatttttttttacaaggaagaggaaaacctccccccaaaaaaaaggaacaccccccaacccccaccattttaatggtccccttaaaaaaaacccaaaaaaaaggggtttttttatcctctccccccggggggggaaaaagttcctttaaagggggttttaaatatccccccttcccccttgtagaggccc

SEQ ID NO: 511418 - DNA, 220 bp, Homo sapiens
actaggaagagcataatttagattatagaacatggattcaaagtgactggaacaattggtgacacttactggtaactgctatacttctggtgttatacctatcagcggacttgcttcccactaacatttatgtttcaaaaaatttacttcacattattctatgtaagtgatgactagtccagtgttcccaggctgatatacttcaggctaacaactagag

SEQ ID NO: 511419 - DNA, 272 bp, Homo sapiens
atcagtacaagttcctccaacgttttctgtctgtaaacaactttactggccaggtgcagtggctcatgcctgttatcccagcaccttgaggagaccgaggcgggaggattagcttgagcccaggagttgacgaccagcctgggcatcataaggagaccctgtctctacaaaaaaatcttaaaaattagccgggcatggtggcacacacctgtggtcccaggtactacgaaggctagaggtgggtggattgcttgggcctgggaagttgaggc

SEQ ID NO: 511420 - DNA, 361 bp, Homo sapiens
agccagcacttatttcttcacctgactgattcctcggatttacaattcgtccagcatctcacccccacgcgaggtctgtcaaccaggcactgctgaacggaaagccagccttcaccacgcaccagtcagggatgtcagtggagcccaacatggaggcgatgttgatcacggggttccgggccacgcaggccctgtaggtctctgggtactgaccaatcaagtggcaggaaatgaagccaccatgggaaccacccataagggccacatggcttgcatcaaagtgttcctcctggagcacctgttccactgcaaactggacatccttcacatcctggtggcccacattgcctgggagggagag

SEQ ID NO: 511421 - DNA, 1460 bp, Homo sapiens
  misc_feature (64)..(65): n is a, c, g, or t
  misc_feature (76)..(76): n is a, c, g, or t
  misc_feature (87)..(87): n is a, c, g, or t
  misc_feature (94)..(94): n is a, c, g, or t
  misc_feature (109)..(109): n is a, c, g, or t
  misc_feature (112)..(112): n is a, c, g, or t
  misc_feature (143)..(143): n is a, c, g, or t
  misc_feature (179)..(179): n is a, c, g, or t
  misc_feature (181)..(181): n is a, c, g, or t
  misc_feature (185)..(186): n is a, c, g, or t
  misc_feature (192)..(192): n is a, c, g, or t
  misc_feature (214)..(214): n is a, c, g, or t
  misc_feature (305)..(306): n is a, c, g, or t
  misc_feature (316)..(316): n is a, c, g, or t
  misc_feature (325)..(325): n is a, c, g, or t
  misc_feature (337)..(337): n is a, c, g, or t
  misc_feature (347)..(347): n is a, c, g, or t
taagtaaaatctttttaattcagaaaaaaaaaaccccaaaaaacaaaagtttcccaaccacacnngggggggatangggtagggggngtgtgtngtccactccagcccntgncccccagcccaggttggttttgggcagcaantaaggggtagtggggttaagtggcccaaaaaataanangtgnntggggntgtgtatggggaggaaaggggntgcaaagcttggggggagcgggtgaaaggggaagagggcacagaacgagaggctcagtagcggggaaacgccgaaagggtgggagaggccnnttccaaaacnattccgtgngtggcatcaacnccaccggggnaccaccttcttgggccccaatcaccacgacaagcgaatcaagggctgtctctcgcgtgcccacgcctcctcgcggggagaaccgccgggaccctcttggacagcggggggggggcgcccccaacgccggggggctcctcgggcacacagacaagaacccaccgggcccaaaacacccccccctaatactctgtgcagtacacgtgtggatgccccccgggatatacccacgcgaaacctatttactctgggggcccccccaagtgtgtgtcccatgccccactatttacacgtgtttataaaaaactctttctgacccccggggtcttttttgcggccccaaactcctcagagtgtcacccacgctcaatcactacaaacaccctgaggcccgcgcgcactggtccccgcaccgcacacgcggtctatcacccccgcgggcgcgaccgccggagagtgcgccccaccacaaccgggcacggggcgacagaagtacccctctggtagcagcaccccccaccacctggcggcgcgggcgccgcccgcgcacacaggccccccccgcacaccgcccccaacgacagcgctacggcccgccactgccaacgacgcgttcaccacaccccgcggcacacatgggcccccttgcccccactgcaggcgcccgacaccctccgcagccacagcctccctagtgacccacggacaaacgggcgcccccaacgcgcccccaccacaagatccggacacgagacagcccagccgccgcaaccaccccgccggcgccacccgccacgtaccacgacccgcgaaactccggggctcccaccagccacgaaaatcgcccccccacgagccccccgctcacccacaagacccgccgcaaacacatacagcggcggcagcccatcaaaccacccgcgcctctcgcggccccaccctgccgggcgcacactcccaacacccccaacagggcgccccacagcccgcgccgccggtcgacacgcacccacgcgtgtacatgaccgccgtaccgcctcctcaccgcgacacagtcacagacaccacgaacccactcgcccgcccctcgccaacacaccgcccacacagcaca

SEQ ID NO: 511422 - DNA, 146 bp, Homo sapiens
gtgttgtgggtagggatgcagatcgtgtcagacctggcaccaccttgggcatggcactctgcctctggactgtctttcatcgggagaaacactcagagatggatcccattccctaaatgtctcaagctaagtttagtattctccct

SEQ ID NO: 511423 - DNA, 207 bp, Homo sapiens
  misc_feature (41)..(41): n is a, c, g, or t
agctcggtacccggctcatttgtgttctatccactgttctnggcacatgagattgtcagtgaacaaaacagatacagatccttgcccttgtgtagctaacattctagtgggggcagaggaatacgtatcaaacctaataagttgtatatgatgttaaaagagagtaagtactatggaaacgaaaaataaaaataaagcatagcatga

SEQ ID NO: 511424 - DNA, 264 bp, Homo sapiens
agtgaaccagttgcagcaccccccccccccccaccttggtcatacaagcctcaaaaggccttccagcctgggcaacataatgagaccttgtctctaccaaaaaaaaacttaaaaattagccaggcatggtgactggtgtctatagccccacctgctcaggaggctgaggtgggaggaccacttgagcccaggagtgtgaggatgcagtgaatgccatgatcacaccatacactccagcctgggtgacagagtaaggccctgtta

SEQ ID NO: 511425 - DNA, 191 bp, Homo sapiens
aagaccgtaccattgcactccagcctggacaacggattgagactccatctcaaaaaaaaacaaaaacaaaatgtttgggccagcggggactccaggttcataagcccagcaacagctcacaccctcagtacagaaaagctacaggcactcgagaccaatccagcccatgagagcagccatgggggctacac

SEQ ID NO: 511426 - DNA, 564 bp, Homo sapiens
  misc_feature (1)..(1): n is a, c, g, or t
  misc_feature (5)..(5): n is a, c, g, or t
  misc_feature (26)..(26): n is a, c, g, or t
  misc_feature (110)..(110): n is a, c, g, or t
ngccngccatttagggcttcccattntatgcaaatgcttccaagccattcacttccccaattcttgtcgttgatgggtatgtgtttaaaacatgccggtaaggccgggcncagtggctcacgccctgtaatcccagcactttgggaggccgaggcgggtggatcatgaggtcaggagatcgagaccatcctggctaacacgtgaaaccccgtctctactaaaaatacaaaaaattagccgggcgtggtggcgggcacctgtagtcccagctactcgggaggctgaggcaggagaatggtgtgaacccgggaagcggagcttgcagtgagccgagattgcgccactgcagtccgcagtctggcctgggcgacagagcgagactccgtctcaaaaaaaaaaaacaaaaaaaaaccatgcatggtgcatcagcagcccatggcctctggccaggcatggcgaggctgaggtgggaggatggtttgagctcaggcatttgaggctgtcgtgagctatgattatgccactgctttccagcctgggcaacatagtaagaccccatctctt

SEQ ID NO: 511427 - DNA, 354 bp, Homo sapiens
atgaatacccgaagtctgataaggaattgctgtatgttagggaagctggaattaacgggagctgatgccagttcatggttgtggcgtgtgagtccggagacctaggtttcagcccctctctactgtcagcgagctgtgcaacgtgggcaagtcattgtcctctgagctgcagtttcctcatctgtcacatcgctacagacaagacctccctggaacccttctgactgtcttagacgctgtggttgcaaaacccacggaaagcctcatttgtgtggaaagtcagaggaaaaatgatccagtggacacttggggattatctgtcattcaagatccttccttcaaccccaaggtcag

SEQ ID NO: 511428 - DNA, 1719 bp, Homo sapiens
  misc_feature (29)..(29): n is a, c, g, or t
aatgccaggctgtacggagcggggtgcgncgtgtgggcgtggcgggggctggggtctgcgggcgaaggtggtagcccattggaggtcccgggagcgaagtccagctgccgttaggcgctgggatagtcgcacgctggatgcatctacgtccgccgagcccctggggcgaagaggccgcgtccgccttcagttgtggccggtgcttcgccccctgacccttcgcccccaaagaccagctctaacgtgagcgcctcggccgccctgccccagcctcgtacacgccgccagcctcgcccagccggtgtccggagaccctcgggccgtgtccatttgtgggcaaagccagcggggcaggcttggccagagtgcaccactcggcgccgtcccaggcccgacgctctgggcgcgcccggaaccccaggttcgcggcccgtgtttccgaccggcggagggggctcagcggcccgatcccacggaagcgcgctcggaggggtgggacccggccggaccggagatggcgccgccagcgggcggggcggcggcggcggcctcggacttgggctccgccgcagtgctcttggctgtgcacgccgcggtgaggccgctgggcgccgggccagacgccgaggcacagctgcggaggctgcagctgagcgcggaccctgagaggcctgggcgcttccggctggagctgctgggcgcgggacctggggcggttaatttggagtggcccctggagtcagtttcctacaccatccgaggccccacccagcacgagctacagcctccaccaggagggcctggaaccctcagcctgcacttcctcaaccctcaggaagctcagcggtgggcagtcctagtccgaggtgccaccgtggaaggacagaatggcagcaagagcaactcaccaccagccttgggcccagaagcatgccctgtctccctgcccagtcccccggaagcctccacactcaagggccctccacctgaggcagatcttcctaggagccctggaaacttgacggagagagaagagctggcagggagcctggcccgggctattgcaggtggagacgagaagggggcagcccaagtggcagccgtcctggcccagcatcgtgtggccctgagtgttcagcttcaggaggcctgcttcccacctggccccatcaggctgcaggtcacacttgaagacgctgcctctgccgcatccgccgcgtcctctgcacacgttgccctgcaggtccacccccactgcactgttgcagctctccaggagcaggtgttctcagagctcggtttcccgccagccgtgcaacgctgggtcatcggacggtgcctgtgtgtgcctgagcgcagccttgcctcttacggggttcggcaggatggggaccctgctttcctctacttgctgtcagctcctcgagaagcccagcccagctggtcctgtccttcctgcaccttcatcaatgccccagaccgccctggctgtgagatgtgtagcacccagaggccctgcacttgggacccccttgctgcagcttccacctagcagccaccagaggttacaaggggagagtggcccttccctcacaagtccgacatctccaggcccccactgaactccggggacctctactgactgcttgctgggacagtcaccagggttggggggaagggccacaaaatgaaaccattaaagacccttaagagccaaaa

SEQ ID NO: 511429 - DNA, 233 bp, Homo sapiens
tcccaaacccagtttccctgccccctgacgctgttgattcgggctgtggcctccacgtatttatccagtacagtttgcctgacgccagccctccctttgggccctgggggctgggctgtagaaaagtttttggggaagaagggactttaggagggggcatttccccccttctcccttttggaccctgccgaagctccctgcctttaataaactggccaagtggggccttgtta

SEQ ID NO: 511430 - DNA, 1984 bp, Homo sapiens
  misc_feature (29)..(29): n is a, c, g, or t
  misc_feature (1957)..(1957): n is a, c, g, or t
  misc_feature (1973)..(1973): n is a, c, g, or t
  misc_feature (1978)..(1978): n is a, c, g, or t
aatgccaggctgtacggagcggggtgcgncgtgtgggcgtggcgggggctggggtctgcgggcgaaggtggtagcccattggaggtcccgggagcgaagtccagctgccgttaggcgctgggatagtcgcacgctggatgcatctacgtccgccgagcccctggggcgaagaggccgcgtccgccttcagttgtggccggtgcttcgccccctgacccttcgcccccaaagaccagctctaacgtgagcgcctcggccgccctgccccagcctcgtacacgccgccagcctcgcccagccggtgtccggagaccctcgggccgtgtccatttgtgggcaaagccagcggggcaggcttggccagagtgcaccactcggcgccgtcccaggcccgacgctctgggcgcgcccggaaccccaggttcgcggcccgtgtttccgaccggcggagggggctcagcggcccgatcccacggaagcgcgctcggaggggtgggacccggccggaccggagatggcgccgccagcgggcggggcggcggcggcggcctcggacttgggctccgccgcagtgctcttggctgtgcacgccgcggtgaggccgctgggcgccgggccagacgccgaggcacagctgcggaggctgcagctgagcgcggaccctgagaggcctgggcgcttccggctggagctgctgggcgcgggacctggggcggttaatttggagtggcccctggagtcagtttcctacaccatccgaggccccacccagcacgagctacagcctccaccaggagggcctggaaccctcagcctgcacttcctcaaccctcaggaagctcagcggtgggcagtcctagtccgaggtgccaccgtggaaggacagaatggcagcaagagcaactcaccaccagccttgggcccagaagcatgccctgtctccctgcccagtcccccggaagcctccacactcaagggccctccacctgaggcagatcttcctaggagccctggaaacttgacggagagagaagagctggcagggagcctggcccgggctattgcaggtggagacgagaagggggcagcccaagtggcagccgtcctggcccagcatcgtgtggccctgagtgttcagcttcaggaggcctgcttcccacctggccccatcaggctgcaggtcacacttgaagacgctgcctctgccgcatccgccgcgtcctctgcacacgttgccctgcaggtccacccccactgcactgttgcagctctccaggagcaggtgttctcagagctcggtttcccgccagccgtgcaacgctgggtcatcggacggtgcctgtgtgtgcctgagcgcagccttgcctcttacggggttcggcaggatggggaccctgctttcctctacttgctgtcagctcctcgagaagccccaggtcagtcctcgatgggggtggggtgtgggaggtggggtgcagccccacagtcctgagctccaccccctcagccacaggacctagccctcagcacccccagaagatggacggggaacttggacgcttgtttcccccatcattggggctacccccaggcccccagccagctgcctccagcctgcccagtccactccagcccagctggtcctgtccttcctgcaccttcatcaatgccccagaccgccctggctgtgagatgtgtagcacccagaggccctgcacttgggacccccttgctgcagcttccacctagcagccaccagaggttacaaggggagagtggcccttccctcacaagtccgacatctccaggcccccactgaactccggggacctctactgactgcttgctgggacagtcaccagggttggggggaagggccacaaaatgaaaccattaaagacccttaagagccaaaaaaaaacaaaacaaaaccaaaaaaaaaaaaaaaaaaaaaaanaacaaacaaacaacanaaacnaacaaa

SEQ ID NO: 511431 - DNA, 174 bp, Homo sapiens
  misc_feature (139)..(139): n is a, c, g, or t
tggtaccctagtttagaagttcaatagcacagcagattctcagcagaaaccttacaagccaaaagagattagggtcctgtcttcaacctctttaaacagaacaacggtcagccaagaattttttatcccacaaaactanagtttggtaaactgaagggagaaataaacgtcatt

SEQ ID NO: 511432 - DNA, 1787 bp, Homo sapiens
  misc_feature (29)..(29): n is a, c, g, or t
  misc_feature (1760)..(1760): n is a, c, g, or t
  misc_feature (1776)..(1776): n is a, c, g, or t
  misc_feature (1781)..(1781): n is a, c, g, or t
aatgccaggctgtacggagcggggtgcgncgtgtgggcgtggcgggggctggggtctgcgggcgaaggtggtagcccattggaggtcccgggagcgaagtccagctgccgttaggcgctgggatagtcgcacgctggatgcatctacgtccgccgagcccctggggcgaagaggccgcgtccgccttcagttgtggccggtgcttcgccccctgacccttcgcccccaaagaccagctctaacgtgagcgcctcggccgccctgccccagcctcgtacacgccgccagcctcgcccagccggtgtccggagaccctcgggccgtgtccatttgtgggcaaagccagcggggcaggcttggccagagtgcaccactcggcgccgtcccaggcccgacgctctgggcgcgcccggaaccccaggttcgcggcccgtgtttccgaccggcggagggggctcagcggcccgatcccacggaagcgcgctcggaggggtgggacccggccggaccggagatggcgccgccagcgggcggggcggcggcggcggcctcggacttgggctccgccgcagtgctcttggctgtgcacgccgcggtgaggccgctgggcgccgggccagacgccgaggcacagctgcggaggctgcagctgagcgcggaccctgagaggcctgggcgcttccggctggagctgctgggcgcgggacctggggcggttaatttggagtggcccctggagtcagtttcctacaccatccgaggccccacccagcacgagctacagcctccaccaggagggcctggaaccctcagcctgcacttcctcaaccctcaggaagctcagcggtgggcagtcctagtccgaggtgccaccgtggaaggacagaatggcagcaagagcaactcaccaccagccttgggcccagaagcatgccctgtctccctgcccagtcccccggaagcctccacactcaagggccctccacctgaggcagatcttcctaggagccctggaaacttgacggagagagaagagctggcagggagcctggcccgggctattgcaggtggagacgagaagggggcagcccaagtggcagccgtcctggcccagcatcgtgtggccctgagtgttcagcttcaggaggcctgcttcccacctggccccatcaggctgcaggtcacacttgaagacgctgcctctgccgcatccgccgcgtcctctgcacacgttgccctgcaggtccacccccactgcactgttgcagctctccaggagcaggtgttctcagagctcggtttcccgccagccgtgcaacgctgggtcatcggacggtgcctgtgtgtgcctgagcgcagccttgcctcttacggggttcggcaggatggggaccctgctttcctctacttgctgtcagctcctcgagaagcccagcccagctggtcctgtccttcctgcaccttcatcaatgccccagaccgccctggctgtgagatgtgtagcacccagaggccctgcacttgggacccccttgctgcagcttccacctagcagccaccagaggttacaaggggagagtggcccttccctcacaagtccgacatctccaggcccccactgaactccggggacctctactgactgcttgctgggacagtcaccagggttggggggaagggccacaaaatgaaaccattaaagacccttaagagccaaaaaaaaacaaaacaaaaccaaaaaaaaaaaaaaaaaaaaaaanaacaaacaaacaacanaaacnaacaaa

SEQ ID NO: 511433 - DNA, 1551 bp, Homo sapiens
  misc_feature (29)..(29): n is a, c, g, or t
aatgccaggctgtacggagcggggtgcgncgtgtgggcgtggcgggggctggggtctgcgggcgaaggtggtagcccattggaggtcccgggagcgaagtccagctgccgttaggcgctgggatagtcgcacgctggatgcatctacgtccgccgagcccctggggcgaagaggccgcgtccgccttcagttgtggccggtgcttcgccccctgacccttcgcccccaaagaccagctctaacgtgagcgcctcggccgccctgccccagcctcgtacacgccgccagcctcgcccagccggtgtccggagaccctcgggccgtgtccatttgtgggcaaagccagcggggcaggcttggccagagtgcaccactcggcgccgtcccaggcccgacgctctgggcgcgcccggaaccccaggttaatttggagtggcccctggagtcagtttcctacaccatccgaggccccacccagcacgagctacagcctccaccaggagggcctggaaccctcagcctgcacttcctcaaccctcaggaagctcagcggtgggcagtcctagtccgaggtgccaccgtggaaggacagaatggcagcaagagcaactcaccaccagccttgggcccagaagcatgccctgtctccctgcccagtcccccggaagcctccacactcaagggccctccacctgaggcagatcttcctaggagccctggaaacttgacggagagagaagagctggcagggagcctggcccgggctattgcaggtggagacgagaagggggcagcccaagtggcagccgtcctggcccagcatcgtgtggccctgagtgttcagcttcaggaggcctgcttcccacctggccccatcaggctgcaggtcacacttgaagacgctgcctctgccgcatccgccgcgtcctctgcacacgttgccctgcaggtccacccccactgcactgttgcagctctccaggagcaggtgttctcagagctcggtttcccgccagccgtgcaacgctgggtcatcggacggtgcctgtgtgtgcctgagcgcagccttgcctcttacggggttcggcaggatggggaccctgctttcctctacttgctgtcagctcctcgagaagccccagccacaggacctagccctcagcacccccagaagatggacggggaacttggacgcttgtttcccccatcattggggctacccccaggcccccagccagctgcctccagcctgcccagtccactccagcccagctggtcctgtccttcctgcaccttcatcaatgccccagaccgccctggctgtgagatgtgtagcacccagaggccctgcacttgggacccccttgctgcagcttccacctagcagccaccagaggttacaaggggagagtggcccttccctcacaagtccgacatctccaggcccccactgaactccggggacctctactgactgcttgctgggacagtcaccagggttggggggaagggccacaaaatgaaaccattaaagacccttaagagccaaaa

SEQ ID NO: 511434 - DNA, 1376 bp, Homo sapiens
  misc_feature (29)..(29): n is a, c, g, or t
aatgccaggctgtacggagcggggtgcgncgtgtgggcgtggcgggggctggggtctgcgggcgaaggtggtagcccattggaggtcccgggagcgaagtccagctgccgttaggcgctgggatagtcgcacgctggatgcatctacgtccgccgagcccctggggcgaagaggccgcgtccgccttcagttgtggccggtgcttcgccccctgacccttcgcccccaaagaccagctctaacgtggttaatttggagtggcccctggagtcagtttcctacaccatccgaggccccacccagcacgagctacagcctccaccaggagggcctggaaccctcagcctgcacttcctcaaccctcaggaagctcagcggtgggcagtcctagtccgaggtgccaccgtggaaggacagaatggcagcaagagcaactcaccaccagccttgggcccagaagcatgccctgtctccctgcccagtcccccggaagcctccacactcaagggccctccacctgaggcagatcttcctaggagccctggaaacttgacggagagagaagagctggcagggagcctggcccgggctattgcaggtggagacgagaagggggcagcccaagtggcagccgtcctggcccagcatcgtgtggccctgagtgttcagcttcaggaggcctgcttcccacctggccccatcaggctgcaggtcacacttgaagacgctgcctctgccgcatccgccgcgtcctctgcacacgttgccctgcaggtccacccccactgcactgttgcagctctccaggagcaggtgttctcagagctcggtttcccgccagccgtgcaacgctgggtcatcggacggtgcctgtgtgtgcctgagcgcagccttgcctcttacggggttcggcaggatggggaccctgctttcctctacttgctgtcagctcctcgagaagccccagccacaggacctagccctcagcacccccagaagatggacggggaacttggacgcttgtttcccccatcattggggctacccccaggcccccagccagctgcctccagcctgcccagtccactccagcccagctggtcctgtccttcctgcaccttcatcaatgccccagaccgccctggctgtgagatgtgtagcacccagaggccctgcacttgggacccccttgctgcagcttccacctagcagccaccagaggttacaaggggagagtggcccttccctcacaagtccgacatctccaggcccccactgaactccggggacctctactgactgcttgctgggacagtcaccagggttggggggaagggccacaaaatgaaaccattaaagacccttaagagccaaaa

SEQ ID NO: 511435 - DNA, 112 bp, Homo sapiens
  misc_feature (108)..(108): n is a, c, g, or t
tgaggtcattcgtagtatcggatggccgtcattcccgggcgacactcgtcgatcagctagtcgagtgatgtcagtgcgtgcggcgcggcgtcatgagtcgcagtatgntgag

SEQ ID NO: 511436 - DNA, 1796 bp, Homo sapiens
  misc_feature (29)..(29): n is a, c, g, or t
aatgccaggctgtacggagcggggtgcgncgtgtgggcgtggcgggggctggggtctgcgggcgaaggtggtagcccattggaggtcccgggagcgaagtccagctgccgttaggcgctgggatagtcgcacgctggatgcatctacgtccgccgagcccctggggcgaagaggccgcgtccgccttcagttgtggccggtgcttcgccccctgacccttcgcccccaaagaccagctctaacgtgagcgcctcggccgccctgccccagcctcgtacacgccgccagcctcgcccagccggtgtccggagaccctcgggccgtgtccatttgtgggcaaagccagcggggcaggcttggccagagtgcaccactcggcgccgtcccaggcccgacgctctgggcgcgcccggaaccccaggttcgcggcccgtgtttccgaccggcggagggggctcagcggcccgatcccacggaagcgcgctcggaggggtgggacccggccggaccggagatggcgccgccagcgggcggggcggcggcggcggcctcggacttgggctccgccgcagtgctcttggctgtgcacgccgcggtgaggccgctgggcgccgggccagacgccgaggcacagctgcggaggctgcagctgagcgcggaccctgagaggcctgggcgcttccggctggagctgctgggcgcgggacctggggcggttaatttggagtggcccctggagtcagtttcctacaccatccgaggccccacccagcacgagctacagcctccaccaggagggcctggaaccctcagcctgcacttcctcaaccctcaggaagctcagcggtgggcagtcctagtccgaggtgccaccgtggaaggacagaatggcagcaagagcaactcaccaccagccttgggcccagaagcatgccctgtctccctgcccagtcccccggaagcctccacactcaagggccctccacctgaggcagatcttcctaggagccctggaaacttgacggagagagaagagctggcagggagcctggcccgggctattgcaggtggagacgagaagggggcagcccaagtggcagccgtcctggcccagcatcgtgtggccctgagtgttcagcttcaggaggcctgcttcccacctggccccatcaggctgcaggtcacacttgaagacgctgcctctgccgcatccgccgcgtcctctgcacacgttgccctgcaggtccacccccactgcactgttgcagctctccaggagcaggtgttctcagagctcggtttcccgccagccgtgcaacgctgggtcatcggacggtgcctgtgtgtgcctgagcgcagccttgcctcttacggggttcggcaggatggggaccctgctttcctctacttgctgtcagctcctcgagaagcccagcccagctggtcctgtccttcctgcaccttcatcaatgccccagaccgccctggctgtgagatgtgtagcacccagaggccctgcacttgggacccccttgctgcagcttccacctagcagccaccagaggtaccagaggtggcacaggcaggggaggtggggggcagggcagaatccacaggaatgacccagctcctcccccacaggttacaaggggagagtggcccttccctcacaagtccgacatctccaggcccccactgaactccggggacctctactgactgcttgctgggacagtcaccagggttggggggaagggccacaaaatgaaaccattaaagacccttaagagccaaaa

SEQ ID NO: 511437 - DNA, 1377 bp, Homo sapiens
agcgggctttgccactgttggctgctggtcaaaaagggcaggacctgcgacggctccgtgaaagtcaactctgcgggcaggaactggaagttctgccacctacagcctcaggatgcagagagaaccatgaagcatgcttcccccaggttccactgaagggcgcggcagtgtgacctccgagatgccagcccccccagcctgcctcacctgccaatgatgtgggcatctccggtctccacagtcagcggttaatttggagtggcccctggagtcagtttcctacaccatccgaggccccacccagcacgagctacagcctccaccaggagggcctggaaccctcagcctgcacttcctcaaccctcaggaagctcagcggtgggcagtcctagtccgaggtgccaccgtggaaggacagaatggcagcaagagcaactcaccaccagccttgggcccagaagcatgccctgtctccctgcccagtcccccggaagcctccacactcaagggccctccacctgaggcagatcttcctaggagccctggaaacttgacggagagagaagagctggcagggagcctggcccgggctattgcaggtggagacgagaagggggcagcccaagtggcagccgtcctggcccagcatcgtgtggccctgagtgttcagcttcaggaggcctgcttcccacctggccccatcaggctgcaggtcacacttgaagacgctgcctctgccgcatccgccgcgtcctctgcacacgttgccctgcaggtccacccccactgcactgttgcagctctccaggagcaggtgttctcagagctcggtttcccgccagccgtgcaacgctgggtcatcggacggtgcctgtgtgtgcctgagcgcagccttgcctcttacggggttcggcaggatggggaccctgctttcctctacttgctgtcagctcctcgagaagccccagccacaggacctagccctcagcacccccagaagatggacggggaacttggacgcttgtttcccccatcattggggctacccccaggcccccagccagctgcctccagcctgcccagtccactccagcccagctggtcctgtccttcctgcaccttcatcaatgccccagaccgccctggctgtgagatgtgtagcacccagaggccctgcacttgggacccccttgctgcagcttccacctagcagccaccagaggttacaaggggagagtggcccttccctcacaagtccgacatctccaggcccccactgaactccggggacctctactgactgcttgctgggacagtcaccagggttggggggaagggccacaaaatgaaaccattaaagacccttaagagccaaaa

SEQ ID NO: 511438 - DNA, 1545 bp, Homo sapiens
  misc_feature (29)..(29): n is a, c, g, or t
  misc_feature (1490)..(1490): n is a, c, g, or t
aatgccaggctgtacggagcggggtgcgncgtgtgggcgtggcgggggctggggtctgcgggcgaaggtggtagcccattggaggtcccgggagcgaagtccagctgccgttaggcgctgggatagtcgcacgctggatgcatctacgtccgccgagcccctggggcgaagaggccgcgtccgccttcagttgtggccggtgcttcgccccctgacccttcgcccccaaagaccagctctaacgtgagcgcctcggccgccctgccccagcctcgtacacgccgccagcctcgcccagccggtgtccggagaccctcgggccgtgtccatttgtgggcaaagccagcggggcaggcttggccagagtgcaccactcggcgccgtcccaggcccgacgctctgggcgcgcccggaaccccaggttcgcggcccgtgtttccgaccggcggagggggctcagcggcccgatcccacggaagcgcgctcggaggggtgggacccggccggaccggagatggcgccgccagcgggcggggcggcggcggcggcctcggacttgggctccgccgcagtgctcttggctgtgcacgccgcggtgaggccgctgggcgccgggccagacgccgaggcacagctgcggaggctgcagctgagcgcggaccctgagaggcctgggcgcttccggctggagctgctgggcgcgggacctggggcggttaatttggagtggcccctggagtcagtttcctacaccatccgaggccccacccagcacgagctacagcctccaccaggagggcctggaaccctcagcctgcacttcctcaaccctcaggaagctcagcggtgggcagtcctagtccgaggtgccaccgtggaaggacagaatggcagcaagagcaactcaccaccagccttgggcccagaagcatgccctgtctccctgcccagtcccccggaagcctccacactcaagggccctccacctgaggcagatcttcctaggagccctggaaacttgacggagagagaagagctggcagggagcctggcccgggctattgcaggtggagacgagaagggggcagcccaagtggcagccgtcctggcccagcatcgtgtggccctgagtgttcagcttcaggaggcctgcttcccacctggccccatcaggctgcaggtcacacttgaagacgctgcctctgccgcatccgccgcgtcctctgcacacgttgccctgcaggtccacccccactgcactgttgcagctctccaggagcaggtgttctcagagctcggtttcccgccagccgtgcaacgctgggtcatcggacggtgcctgtgtgtgcctgagcgcagccttgcctcttacggggttcggcaggatggggaccctgctttcctctacttgctgtcagctcctcgagaagccccagccacaggagcccacccccagcacccccatctgttaataaatatctcaactccanggtgttccacctgaaaaaaaactagacataaaagagagaaaaaagtaggaataaa

SEQ ID NO: 511439 - DNA, 206 bp, Homo sapiens
ggaattcgcttaaatggattagtttctttgtggaaaagtaactgatgttataatgtatgatgttgactatttcactattccaataaaaccagtcagctttaaacaagcagcgtcatattaagagagataaacatttgccgctgttggtcctcgcaggccatttacgcggcaaaattccacacgtaatcctggtataagcacttctg

SEQ ID NO: 511440 - DNA, 224 bp, Homo sapiens
agcccaattttttacccgaaagaatcattgccttggcccctccctcccgggggcccccatcccctttagtgtttcccccctgggttaaccaggggaaaaacgggttgggggtagcctgaatgtgggccaagtcccctgtcccccttgggggcaaaagcccattgaaaaaaaacccccccccccccccccctattttgtcctggaaaatttttggggttggaacc

SEQ ID NO: 511441 - DNA, 188 bp, Homo sapiens
ttattaaatcacgtaaaataatgactttactatcatctgtaaagtaagattaattttaatctctctactaaaatggtttatattaaagtagattagggtaggaaaaaatcctaggaaatattagaatttaatgtatatttctaaactgaccccaaaaaaggcttttaatcagaaatatgacacgctat

SEQ ID NO: 511442 - DNA, 1929 bp, Homo sapiens
  misc_feature (29)..(29): n is a, c, g, or t
aatgccaggctgtacggagcggggtgcgncgtgtgggcgtggcgggggctggggtctgcgggcgaaggtggtagcccattggaggtcccgggagcgaagtccagctgccgttaggcgctgggatagtcgcacgctggatgcatctacgtccgccgagcccctggggcgaagaggccgcgtccgccttcagttgtggccggtgcttcgccccctgacccttcgcccccaaagaccagctctaacgtgagcgcctcggccgccctgccccagcctcgtacacgccgccagcctcgcccagccggtgtccggagaccctcgggccgtgtccatttgtgggcaaagccagcggggcaggcttggccagagtgcaccactcggcgccgtcccaggcccgacgctctgggcgcgcccggaaccccaggttcgcggcccgtgtttccgaccggcggagggggctcagcggcccgatcccacggaagcgcgctcggaggggtgggacccggccggaccggagatggcgccgccagcgggcggggcggcggcggcggcctcggacttgggctccgccgcagtgctcttggctgtgcacgccgcggtgaggccgctgggcgccgggccagacgccgaggcacagctgcggaggctgcagctgagcgcggaccctgagaggcctgggcgcttccggctggagctgctgggcgcgggacctggggcggttaatttggagtggcccctggagtcagtttcctacaccatccgaggccccacccagcacgagctacagcctccaccaggagggcctggaaccctcagcctgcacttcctcaaccctcaggaagctcagcggtgggcagtcctagtccgaggtgccaccgtggaaggacagaatggcagcaagagcaactcaccaccagccttgggcccagaagcatgccctgtctccctgcccagtcccccggaagcctccacactcaagggccctccacctgaggcagatcttcctaggagccctggaaacttgacggagagagaagagctggcagggagcctggcccgggctattgcaggtggagacgagaagggggcagcccaagtggcagccgtcctggcccagcatcgtgtggccctgagtgttcagcttcaggaggcctgcttcccacctggccccatcaggtgaggcctgggggctgcttcttcaccttgtcctcgtgaccatcccaggtccccatccatccctgaacccacattctggcacaggctgcaggtcacacttgaagacgctgcctctgccgcatccgccgcgtcctctgcacacgttgccctgcaggtccacccccactgcactgttgcagctctccaggagcaggtgttctcagagctcggtttcccgccagccgtgcaacgctgggtcatcggacggtgcctgtgtgtgcctgagcgcagccttgcctcttacggggttcggcaggatggggaccctgctttcctctacttgctgtcagctcctcgagaagccccagccacaggacctagccctcagcacccccagaagatggacggggaacttggacgcttgtttcccccatcattggggctacccccaggcccccagccagctgcctccagcctgcccagtccactccagcccagctggtcctgtccttcctgcaccttcatcaatgccccagaccgccctggctgtgagatgtgtagcacccagaggccctgcacttgggacccccttgctgcagcttccacctagcagccaccagaggttacaaggggagagtggcccttccctcacaagtccgacatctccaggcccccactgaactccggggacctctactgactgcttgctgggacagtcaccagggttggggggaagggccacaaaatgaaaccattaaagacccttaagagccaaaa

SEQ ID NO: 511443 - DNA, 1877 bp, Homo sapiens
  misc_feature (29)..(29): n is a, c, g, or t
aatgccaggctgtacggagcggggtgcgncgtgtgggcgtggcgggggctggggtctgcgggcgaaggtggtagcccattggaggtcccgggagcgaagtccagctgccgttaggcgctgggatagtcgcacgctggatgcatctacgtccgccgagcccctggggcgaagaggccgcgtccgccttcagttgtggccggtgcttcgccccctgacccttcgcccccaaagaccagctctaacgtgagcgcctcggccgccctgccccagcctcgtacacgccgccagcctcgcccagccggtgtccggagaccctcgggccgtgtccatttgtgggcaaagccagcggggcaggcttggccagagtgcaccactcggcgccgtcccaggcccgacgctctgggcgcgcccggaaccccaggttcgcggcccgtgtttccgaccggcggagggggctcagcggcccgatcccacggaagcgcgctcggaggggtgggacccggccggaccggagatggcgccgccagcgggcggggcggcggcggcggcctcggacttgggctccgccgcagtgctcttggctgtgcacgccgcggtgaggccgctgggcgccgggccagacgccgaggcacagctgcggaggctgcagctgagcgcggaccctgagaggcctgggcgcttccggctggagctgctgggcgcgggacctggggcggttaatttggagtggcccctggagtcagtttcctacaccatccgaggccccacccagcacgagctacagcctccaccaggagggcctggaaccctcagcctgcacttcctcaaccctcaggaagctcagcggtgggcagtcctagtccgaggtgccaccgtggaaggacagaatggcagcaagagcaactcaccaccagccttgggcccagaagcatgccctgtctccctgcccagtcccccggaagcctccacactcaagggccctccacctgaggcagatcttcctaggagccctggaaacttgacggagagagaagagctggcagggagcctggcccgggctattgcaggtggagacgagaagggggcagcccaagtggcagccgtcctggcccagcatcgtgtggccctgagtgttcagcttcaggaggcctgcttcccacctggccccatcaggctgcaggtcacacttgaagacgctgcctctgccgcatccgccgcgtcctctgcacacgttgccctgcaggtgttctcagagctcggtttcccgccagccgtgcaacgctgggtcatcggacggtgcctgtgtgtgcctgagcgcagccttgcctcttacggggttcggcaggatggggaccctgctttcctctacttgctgtcagctcctcgagaagccccaggtcagtcctcgatgggggtggggtgtgggaggtggggtgcagccccacagtcctgagctccaccccctcagccacaggacctagccctcagcacccccagaagatggacggggaacttggacgcttgtttcccccatcattggggctacccccaggcccccagccagctgcctccagcctgcccagtccactccagcccagctggtcctgtccttcctgcaccttcatcaatgccccagaccgccctggctgtgagatgtgtagcacccagaggccctgcacttgggacccccttgctgcagcttccacctagcagccaccagaggttacaaggggagagtggcccttccctcacaagtccgacatctccaggcccccactgaactccggggacctctactgactgcttgctgggacagtcaccagggttggggggaagggccacaaaatgaaaccattaaagacccttaagagccaaaa

SEQ ID NO: 511444 - DNA, 256 bp, Homo sapiens
ccctggtcgtaacagagcaggtgtggaggccttctgagtgtcagcgcctttcagatcatggtcatgcgaagtagtaaagtgaatttctacacccgtggttcatttagctagaggagtaacaatgaatggaatgcagaaggtccatggttgtcttctcttatctctagtatttggtgagtgcacaggtgacccacgtggccatggtgtgccttgatgtgtgatctgctgctcttctcagcacgggcgacagctccca

SEQ ID NO: 511445 - DNA, 108 bp, Homo sapiens
atggtctggaaaagggcctctggggaccatggacctgagctcgtagtcctcagccacctgctgttgccgttcctctcgttctgccagtttccccctttccagagcctt

SEQ ID NO: 511446 - DNA, 169 bp, Homo sapiens
gacacaccactaagactatacccataaccttccatagcacacctagatccagcctcaggacctaacaaagttttgagaaagaagctgtaagagcagagcttcgtgctctaaccgtgactggatggattctttcattagccattgtgtgccaccttccatattgatccca

SEQ ID NO: 511447 - DNA, 798 bp, Homo sapiens
tattattcattcctccaatctttttcttttaatgcctattctttcctaaaccttcccactacaccccctacacaaactcaataaaactccacacaattctccctaaagcaatcacatctatctctattttctgcatacctatttccctccaaatatactatcacgattcaccacactacctcacaccatcttcctcctctctatctacccattatttacaaccccaccactatatatatgactctcaatcatccatacttacttatataataaactactaacactactttgactaaagcatttatatatcactactatcttctctcaataatacaataaataaaactatcaactgtctcaccaaatacaaaacttcactatcctatctggaaaataacaacccccaccccaattactgccatcatctaatccattgcttcacaatctctacatcctctcgttactccctatgtatatcacctcttcatcgtcgtacatctcccccccaaccactccccccactaatcatatcatatttatagacaaatttcaccaatacaccaacacacaacccccacactgcccccacctcacctaataatcacagtactcaaattctataatagattgtgcacattaacacctagaaccacttatttaatcataccgcatccaccctaacctctattcatccaaataacaaacagcgataaataagaacacgaacaaaattccatcgctacacaacaaatcaacataacacaagtcacacaaacaaccaatcctcaccccctcacg

SEQ ID NO: 511448 - DNA, 205 bp, Homo sapiens
  misc_feature (51)..(51): n is a, c, g, or t
atccgtacgcccaatgacaacatctatggttatgtgaacagggccagttgncacaaagaggggaaatggctttttccctagactatggaagatttcactgaggaggcaaataggggcagggtcttgaagtcagagttgtccaaggaggcacacggctcaaaagcacgagatgcatgcatgtagcaagtggttgggcgtacgggga

SEQ ID NO: 511449 - DNA, 477 bp, Homo sapiens
tccttaattgcttttatggtattggaataggaattaaaagaaattaaagaatgtgtaaggagaaactcagttgtatgtaagaaaacccaattccccctgagaaagagaaagagttggagtcctttaaaaattaactgcctgtttttctgtggctagtgagccttatctctcctcctttcccagacattgtgaagaccctgtttctctagctgtgcagctgcaaggtcactagacagataaactcaagttgtaaaacatgtttttccttgaaaagtaagaaatgctgtaatgcatttctcaattaattaaataactgtctttgtttctcgcttctgtaatatgcttccccctgcacagatctccacccaccctacaaaatgcttaaaaggtaacttaactctttgttctgggctcagtcctttgggctgagtactgggccggtgcacctaaataataaatatcttcctgaaaaaaaaa

SEQ ID NO: 511450 - DNA, 700 bp, Homo sapiens
catccaaatggaatcagataagagtgcagtggtgcagtcatggctcactgcagcgtctgcctcctggactcaaagaatcctcctacctcagcctcccaagtagctaggaccacaggtatgtaccaccacacccagttattattatttttttttttcacagagacagggtctcactatgttgcccaggctggtctccaactcctaggctcaagcgatctacctgcctcaacctcccaaagtgctgggattacaggcgtgtgccactgggcctagcctggcattactcttacaaaggatacaccacggtaaggttataaaaaacatttctatgaatttgtgaattttgttcctagtagttttatactttgcttctttttttgagacagagtctcgctctgtcacccaggctgcagtgcagtggtgcaatctcagctcactgcaacctccacctcccaagttcaagtgattctcattcctcagcctcctgagtagtagctgggattacaggtgtgtgccaccatgcccggctaatttttgtatttttagtagagatggggttttgccttgtttgccaggctggtctcgaactcctggcctcaagaaatccacccaccttggcctcccaaggcgctgggattacatacatgagccaccgtgcccgactatactttgcttttttattaagggatttatattattt

SEQ ID NO: 511451 - DNA, 811 bp, Homo sapiens
ggtcaagagtgaaaaggtttacactcgccatggggtccccatctcagtcactggcattgcccaggttacaaatccaggtcgcacgaacacgggagatgttggtggccgtctgtcacatgttcctgcgcgaagcacggaccgctgatattgcccacattgccctgtagacgttcgagggccaccagagggccttcatggcccacatgactgtggaggcagatcgtataaggacaggctacgaaattctcagaacaggttttcaaagtggcctcctcagacctggtcaacatgggcatcagtgtggttagctacactctgaaggacattctcgatgaccaggactatttgcactctttgagggaaggctcgaacagctcaagtccaaaaagatgcacggattggagcaagcagaggccaacgagcagatgctgggatcctgggaaagctaaagccatagcaggaaaacggtgtctgctcagtacctgagtgagatcgacgatggccaaggcacacgagagattacgaactgaagaaggccgcctatgacatcgacggtcaaccacccgccgtagcactatggctgaccttggcctatctgcttcagagtggccaagactaagcagcagattgaggagcagcgggtgcaggtgcaggtggtggagccgggcccagcaggtgggcagtgcaggagcagggagatcgcccggcgggacaaggagcttgaaggccgggtgcggaaagaccagcgggagcggagcgctacaagcttggaacgctagccggagggcgcagaagtcccataattatgccg

SEQ ID NO: 511452 - DNA, 171 bp, Homo sapiens
  misc_feature (14)..(14): n is a, c, g, or t
  misc_feature (51)..(51): n is a, c, g, or t
  misc_feature (95)..(95): n is a, c, g, or t
  misc_feature (139)..(139): n is a, c, g, or t
cgggtgccggcgtnaggggcggctggcgggcatggcgtccggagcgtctcncttgctagtattggcacccgtcagtccggggctctccggagcgngcctagcttgaggaaagatggcgatgtctccgccgcatggagcngtctaggccggagcctggtaccgtcgaggtca

SEQ ID NO: 511453 - DNA, 560 bp, Homo sapiens
ctagtgggggcgtctgtggaagttctggtgggtctgggggctctgtggagggttgggggactgtggcattctaaggagggtctgggggactgtgggattctaaggaggatcttggggactgtgggattctaaggagggtctgggggactgtgggattctaaggaggatcttggggactgtgggattctaaggagggtctgggggactgtggggctctatgaagggcccagcaccccccgcctcgccctgcccgtggcacctggctctccgccggtgggtcgtactgtcgcagctgccccaggaactccaggtggcgcttctcctcctccagctgggccacggactcctcgctggcccgaagccgccgctgcgtctcctccagttcctcccgcagccacacgttctcctgggccagccgccgggcctgcgagcgcagccgctgcttctctgcctccagtgcacccacatgtgccgacagggccagcagcacctgcccggggtgggggtcccaagtcgaggttggttcctgccctgccagacggcccctgacccagcccagg

SEQ ID NO: 511454 - DNA, 578 bp, Homo sapiens
  misc_feature (79)..(79): n is a, c, g, or t
  misc_feature (93)..(93): n is a, c, g, or t
  misc_feature (104)..(105): n is a, c, g, or t
  misc_feature (111)..(111): n is a, c, g, or t
  misc_feature (114)..(114): n is a, c, g, or t
  misc_feature (118)..(118): n is a, c, g, or t
  misc_feature (121)..(121): n is a, c, g, or t
  misc_feature (123)..(123): n is a, c, g, or t
  misc_feature (127)..(127): n is a, c, g, or t
  misc_feature (131)..(131): n is a, c, g, or t
  misc_feature (153)..(153): n is a, c, g, or t
  misc_feature (168)..(168): n is a, c, g, or t
  misc_feature (171)..(171): n is a, c, g, or t
  misc_feature (177)..(177): n is a, c, g, or t
  misc_feature (183)..(183): n is a, c, g, or t
  misc_feature (201)..(201): n is a, c, g, or t
  misc_feature (210)..(210): n is a, c, g, or t
  misc_feature (212)..(212): n is a, c, g, or t
  misc_feature (214)..(215): n is a, c, g, or t
  misc_feature (217)..(217): n is a, c, g, or t
  misc_feature (220)..(220): n is a, c, g, or t
cgaggtcccaacgcgccacagagagtacatttgtgaggaaaagtcagatgagagatataaatgttgagggaagcagtangctaatcaaggaantagcctgcctnnaggttnggnatgngantnctgncatnagtcatgaaccatcagctcagntgccctcagggttgntcnggtaangaaatnaatgaagggtgccagtanggactgtcncncnntntanacagtgagagccatcaagatggaacactatccctcagctacagctgttcagtgccatgagcaaataccagcccattcttgccagagctttggctttttgaaaattattttttaatgttggcaactagttcacagtgttttacccccatgaattccacacaaaacagttctagggaccaacctttgggttatgatgtgtgctgtcttaaaattccattctatatgctttatctcaggctgttacaggttaggcgctctagaaagcagattctgagacagtgtagtaagcagggggtttactcagatagctgtctgtggtaggaatgggaaggaagcaggtgtgagagcgttgggggtac

SEQ ID NO: 511455 - DNA, 159 bp, Homo sapiens
atagcaaaggggcacatgggaagccagattcccctgagatttgacaagttatggacaaggctcaagtgaggtgtgtgggcagaggggcccgatttgcccaggatatctgccctccaactctccccctgaaatcatcccttgggtgggtttagtttcttt

SEQ ID NO: 511456 - DNA, 108 bp, Homo sapiens
  misc_feature (19)..(19): n is a, c, g, or t
atcgtaaccccgctggacntacgggtacaacctggtgtccctgcacgtaccgaacatgacactggacgggacctttttggacaccccgcgtggacacgtcgtgtctaa

SEQ ID NO: 511457 - DNA, 778 bp, Homo sapiens
gctctaccttgagcagggccaagctgaaggcctccagcaggacctccggccctcctctccggctttgccatggtggccatggtggaggtgcagctggagacgcagtaccagtacccgcggccgctgctgattgccttcagcgcctgcaccacggtgctggcggccgtgcacctgttcgccctcctcatcagcacctgcatcctgcccaatgtggaggccgtgagcaacatccacaatctgaactccatcagcgagttccccggcattggaagcgccattggaccccttacattgagctgggctgggggtttttcacacggggtcttgccggattctcaatcttctctctcgtggccgagtgtggtgtcgtgctctgcgtggtaatcagatgttcctcccgcgtggtatgcccggcgccagtctggacccccacctggccctgggagtcacacgggctggcaggccgcctggtgtccaccatcatcatggtgcccgtgggcctcatcttcgtggtcttcaccatccacttctaccgtccctggtgcgccacaaaacggagcgccacaaccgcgagatcgaggagctccacaagctcaaggtccagctggacgggcatgagcgcagctgcaggtcttgtgaggggccgagggccgggctgggagcggcctgtgcccgggagtccgcaaggcgggatttgtcagatgcagacatttgcaagctgcggtagtaaaaacaaagttctctgtctatacataggatgataactttctaaaaaacg

SEQ ID NO: 511458 - DNA, 967 bp, Homo sapiens
  misc_feature (501)..(501): n is a, c, g, or t
gtttactccgcaccttgtgtgtcggtgacgaacgagcgccttatgagcttgccgcaaccggggagcagcgcagagcaaatatgcttgatccatgtccgttagaggaattgatctgatctgagggccacctgctatgttcgatgtgcgaaatgttgcagcaagactctgatgacccgaatcatggtctgccgaattagcggtatgtattgtgtccttacacgcgtgtcgtgatgagtttgcactgttgacgatacttgggctgatgtatggcagtaccatgtgagtgaacaggttcgtgcgtacagatagtattacaaggaccgtgtgtggttgtaaagactgctcgcacgtggataattcaccccggccgtgactacaccttacaatgtgcgctgcggcatcttgacagcgttccatcagagactgcttgtgtttacattggcctccaaatcgtgtgaggcagccagagggtatagcatgtgtcctggtacgatcgcttgnaaaagtacacagtgggcttgcctcctgctatagatgtgctagcgtagccgatttgcgttgtgtctctcaatacacaagaggcccttcattacgagagtaacgcgcaagcattctgcataagttgcctcctatggaaacaacaaccagtgttctcggccgaagacgtctggggaaagaaacactcgcatcggggacatatttctatgaaacgctgagcatggtagcggaagaaccataatgtaccatatagggacgaggatcgatcgcgaggcccaatggagtccggctgtaaccccaaaggacgtgatcgaggacctggtacccctttggtagttacgggcttggtttcaattctttatcccttttagcatgtgcgtgctggaatccgtttttcgctggagtaacctagtcattaaagggagctccgttttaatactttgcaagacgtggtgggggtaattggaga

SEQ ID NO: 511459 - DNA, 726 bp, Homo sapiens
cccccaaacccttttctctctcactctctgcctccaacttcagattgactttcaatagtttttctaagacctttgaactgaatgttctcttcagccaaaacttggcgacttccacagaaaagtctgaccactgagaagaaggagagcagagatttaaccctttgtaaggccccatttggatccaggtctgctttctcatgtgtgagtcagggaggagctggagccagaggagaagaaaatgatagcttggctgttctcctgcttaggacactgactgaatagttaaactctcactgccactaccttttccccacctttaaaagacctgaatgaagttttctgccaaactccgtgaagccacaagcaccttatgtcctcccttcagtgttttgtgggcctgaatttcatcacactgcatttcagccatggtcatcaagcctgtttgcttcttttgggcatgttcacagattctctgttaagagcccccaccaccaagaaggttagcaggccaacagctctgacatctatctgtagatgccagtagtcacaaagatttcttaccaactctcagatcgctggagcccttagacaaactggaaagaaggcatcaaagggatcaggcaagctggggcgtcttgcccttgtcccccagagatgataccctcccagcaagggggagaagttctcacttccttctttagagcagctaaaggggctaccccagat

SEQ ID NO: 511460 - DNA, 799 bp, Homo sapiens
gatggcgttggtcgcggctggccctgggggtggccgtgcgcgttcgccgcgcgtgctggctcctcctcgtcctatgtcctctctcctacttgtgagcctctgggctgcgtgcgcggaggggtcttcgcgcggtctgctcatgcgcgcagcgactcccgggtgctgctcttccgagtcgggatacgatctgtgcccccgtggctggctccggggtacctcttctaccgacaggagctgcgcagggctcaggcaatcgcgtacccctagagaggcgcacgtcggaatagaccgcagccccgcctcttcagatggaggtgaagggtgcttcccatcgcctgtcctctcggacaactacaggtatctcatcatcgacatccaggccgttggctggggttgtggacccttcaaaccctcgggctgtgcaggtttccattgaaaaggaaggagtgtcaccttggtctgcacattctgtgtactcacaagtcgactgggaccactagtggagggaaccgtgacctcatgccggcggtagccgggactgtcgaggttgtacgggagtgccctcacggaacggcactcccctaaccttcacccgatccccttgtgctcatcaacgactgtggtcaggcgtgggacggcttcagactccggggcctggctacacctggccacacacaaggccatctggtctacctactggattggggagccctacaagggtccctcctgcctcttctcagggagacctgctcttcctctctggctgtgggcggacctttgagggcaatgcagagaccag

SEQ ID NO: 511461 - DNA, 414 bp, Homo sapiens
  misc_feature (3)..(3): n is a, c, g, or t
aanccctccgaaatgtatttgagcttggacccccctgtgatgcttgatgctgcaacaccttaaacccatgaagatttcccgttttgaaaggcatttatataactctgcagctttcaaagctcgaacaaaagctcgaagcaaatgccgagataagagagcagatgttggagaattcttgtagatgtctgaatttgatggctgttttctaatctcttcctttattattatttttgctacttctaatgtatataagcttttagagacagttttttatcttggtcaacttaaataatttttgatgtaggggtgggttgtattttaatttaatgtacagtgttacaaattaatgagttctttattctctgtaaaaataactggtaaccacaaataaagtgtttgtgatgtttggtcgta

SEQ ID NO: 511462 - DNA, 1216 bp, Homo sapiens
  misc_feature (507)..(507): n is a, c, g, or t
  misc_feature (604)..(604): n is a, c, g, or t
ggaggttacagtgagcccagatgtaccattgcactccagcctgtgtgacagagcgagattctgtctcaaaaacaaaaacaaaaaaaacaaaaaaaaacacaaaaattagcgggcatggtgacacgcacctgtagtcccagctactcaggaggcagagaggtggtaggattgcttgagcccaggagtcaacactggagtaagccatgacacttttatccagctgggtgacagagcaagaccctgtcaaaaaaaaaaaaaaaaaagatttggcttggattttggaaaccaaaagcccctcgtttaaacaacggttttggaaaaacttggtgggcccaatgtgggggcccatacacaattacctttccagaagcgttcaaagcgtgctaccttctcccattctcttggggccttggaacaccaccccaattattcttccagaggaatttcgccgagctcaacagagtttcacaaggccattccacgtggggggcgtgccggaaagattgncccccaggggcccttcttcgtggctacaaaccgggtcgctccctgggcgaacaagcgccggggcttcgtagacaccaacttttggagactccccctngggcgattggggaccaggaactctccacaaaattatacctccttacacccggagagaaccccttagggtggtatcaacttggcggctaacaggcaacggtggacccgggggaagagtcatctccctgagagaatgatctagtgtgacaaccattcttttcacaggggggggcaactggggagaactactttccgcgttgtgataaaaacactttccatatggggcgaggttttatgagggatttttacacctccaaccacagtggagaagtccccgggcgttatccaatccgtataccccaacttttttcccccaggttggattgcgactaccatatgagaagtccccccatacattaggatttcctccgacaatctcgacccaacggacacgttggggaaacattttttaaacggcctaccaaaaacacacaggctacattctctggtgaaccgcaacgaaaacacatctgcgtcggacaaattttcctttgacaaagcgtgttcctttcaccagcgtatacaaacacacccaccaaacgtgtcaactcaccggaaggagggaccctgctgccttctcacacgtgttccaagggccagtatccccacatag

SEQ ID NO: 511463 - DNA, 497 bp, Homo sapiens
tttttttgagaaggagtctcattctgtcacccaggctggagtgcagtggcgcgatctcagctcactgcaacttccgcctcctgggttcaagtgattctcccgccttaccctcccgagtagcagggaccacaggcacgtgccaccacacccagctcatttttatatttttagtagagacggagtttcaccatgttgggcatggtggcgggcactgtaatcccagctactggggaggctgaggcaggagaatcgcttgaaccccggagcggaggttgcagtgagctgatatcatgccattgcactccagcctgggcaacaagagcaaattctgtctcaaaaataaataaaaataaaaagactttttaaatctgattgctgtcaggtatacatggataacacttttctgaaaggttaatttggcaaaatgtcaagtttttaactgaaatataccaaaatacttacctggaagatgcttcaaaataatgcaaaagtaggtg

SEQ ID NO: 511464 - DNA, 102 bp, Homo sapiens
tatagaacgtgtgactgtgatttatcctcccatcataaattatagcgagaaaactggacctcatatattacataacacttttcaagactttccgtatgggct

SEQ ID NO: 511465 - DNA, 103 bp, Homo sapiens
ttgatcatgctgacaaggctgtgtggtgggacacccaacgacacgcgggtgctcacccctccgcaacgtccttgctggtgcagacgacagcggcgggctctgg

SEQ ID NO: 511466 - DNA, 1055 bp, Homo sapiens
aagtggtggcagggaaggcctcattgaggtgacactggagtgaaatttgaaggtcatggcatgaaccatgtgaccaaggaagcagcaaacaaaccctgaggcagcaagagcaactcaccaccagccttgggcccagaagcatgccctgtctccctgcccagtcccccggaagcctccacactcaagggccctccacctgaggcagatcttcctaggagccctggaaacttgacggagagagaagagctggcagggagcctggcccgggctattgcaggtggagacgagaagggggcagcccaagtggcagccgtcctggcccagcatcgtgtggccctgagtgttcagcttcaggaggcctgcttcccacctggccccatcaggctgcaggtcacacttgaagacgctgcctctgccgcatccgccgcgtcctctgcacacgttgccctgcaggtccacccccactgcactgttgcagctctccaggagcaggtgttctcagagctcggtttcccgccagccgtgcaacgctgggtcatcggacggtgcctgtgtgtgcctgagcgcagccttgcctcttacggggttcggcaggatggggaccctgctttcctctacttgctgtcagctcctcgagaagccccagccacaggacctagccctcagcacccccagaagatggacggggaacttggacgcttgtttcccccatcattggggctacccccaggcccccagccagctgcctccagcctgcccagtccactccagcccagctggtcctgtccttcctgcaccttcatcaatgccccagaccgccctggctgtgagatgtgtagcacccagaggccctgcacttgggacccccttgctgcagcttccacctagcagccaccagaggttacaaggggagagtggcccttccctcacaagtccgacatctccaggcccccactgaactccggggacctctactgactgcttgctgggacagtcaccagggttggggggaagggccacaaaatgaaaccattaaagacccttaagagccaaaa

SEQ ID NO: 511467 - DNA, 1635 bp, Homo sapiens
  misc_feature (29)..(29): n is a, c, g, or t
aatgccaggctgtacggagcggggtgcgncgtgtgggcgtggcgggggctggggtctgcgggcgaaggtggtagcccattggaggtcccgggagcgaagtccagctgccgttaggcgctgggatagtcgcacgctggatgcatctacgtccgccgagcccctggggcgaagaggccgcgtccgccttcagttgtggccggtgcttcgccccctgacccttcgcccccaaagaccagctctaacgtgagcgcctcggccgccctgccccagcctcgtacacgccgccagcctcgcccagccggtgtccggagaccctcgggccgtgtccatttgtgggcaaagccagcggggcaggcttggccagagtgcaccactcggcgccgtcccaggcccgacgctctgggcgcgcccggaaccccaggttcgcggcccgtgtttccgaccggcggagggggctcagcggcccgatcccacggaagcgcgctcggaggggtgggacccggccggaccggagatggcgccgccagcgggcggggcggcggcggcggcctcggacttgggctccgccgcagtgctcttggctgtgcacgccgcggtgaggccgctgggcgccgggccagacgccgaggcacagctgcggaggctgcagctgagcgcggaccctgagaggcctgggcgcttccggctggagctgctgggcgcgggacctggggcggttaatttggagtggcccctggagtcagtttcctacaccatccgaggccccacccagcacgagctacagcctccaccaggagggcctggaaccctcagcctgcacttcctcaaccctcaggaagctcagcggtgggcagtcctagtccgaggtgccaccgtggaaggacagaatgccgtcctggcccagcatcgtgtggccctgagtgttcagcttcaggaggcctgcttcccacctggccccatcaggctgcaggtcacacttgaagacgctgcctctgccgcatccgccgcgtcctctgcacacgttgccctgcaggtccacccccactgcactgttgcagctctccaggagcaggtgttctcagagctcggtttcccgccagccgtgcaacgctgggtcatcggacggtgcctgtgtgtgcctgagcgcagccttgcctcttacggggttcggcaggatggggaccctgctttcctctacttgctgtcagctcctcgagaagccccagccacaggacctagccctcagcacccccagaagatggacggggaacttggacgcttgtttcccccatcattggggctacccccaggcccccagccagctgcctccagcctgcccagtccactccagcccagctggtcctgtccttcctgcaccttcatcaatgccccagaccgccctggctgtgagatgtgtagcacccagaggccctgcacttgggacccccttgctgcagcttccacctagcagccaccagaggttacaaggggagagtggcccttccctcacaagtccgacatctccaggcccccactgaactccggggacctctactgactgcttgctgggacagtcaccagggttggggggaagggccacaaaatgaaaccattaaagacccttaagagccaaaa

SEQ ID NO: 511468 - DNA, 796 bp, Homo sapiens
ctctacaggatccttaaggtggttgtgggtagggggcagcccaagtggcagccgtcctggcccagcatcgtgtggccctgagtgttcagcttcaggaggcctgcttcccacctggccccatcaggctgcaggtcacacttgaagacgctgcctctgccgcatccgccgcgtcctctgcacacgttgccctgcaggtccacccccactgcactgttgcagctctccaggagcaggtgttctcagagctcggtttcccgccagccgtgcaacgctgggtcatcggacggtgcctgtgtgtgcctgagcgcagccttgcctcttacggggttcggcaggatggggaccctgctttcctctacttgctgtcagctcctcgagaagccccagccacaggacctagccctcagcacccccagaagatggacggggaacttggacgcttgtttcccccatcattggggctacccccaggcccccagccagctgcctccagcctgcccagtccactccagcccagctggtcctgtccttcctgcaccttcatcaatgccccagaccgccctggctgtgagatgtgtagcacccagaggccctgcacttgggacccccttgctgcagcttccacctagcagccaccagaggttacaaggggagagtggcccttccctcacaagtccgacatctccaggcccccactgaactccggggacctctactgactgcttgctgggacagtcaccagggttggggggaagggccacaaaatgaaaccattaaagacccttaagagccaaaa

SEQ ID NO: 511469 - DNA, 1418 bp, Homo sapiens
  misc_feature (29)..(29): n is a, c, g, or t
aatgccaggctgtacggagcggggtgcgncgtgtgggcgtggcgggggctggggtctgcgggcgaaggtggtagcccattggaggtcccgggagcgaagtccagctgccgttaggcgctgggatagtcgcacgctggatgcatctacgtccgccgagcccctggggcgaagaggccgcgtccgccttcagttgtggccggtgcttcgccccctgacccttcgcccccaaagaccagctctaacgtgagcgcctcggccgccctgccccagcctcgtacacgccgccagcctcgcccagccggtgtccggagaccctcgggccgtgtccatttgtgggcaaagccagcggggcaggcttggccagagtgcaccactcggcgccgtcccaggcccgacgctctgggcgcgcccggaaccccaggttcgcggcccgtgtttccgaccggcggagggggctcagcggcccgatcccacggaagcgcgctcggaggggtgggacccggccggaccggagatggcgccgccagcgggcggggcggcggcggcggcctcggacttgggctccgccgcagtgctcttggctgtgcacgccgcggtgaggccgctgggcgccgggccagacgccgaggcacagctgcggaggctgcagctgagcgcggaccctgagaggcctgggcgcttccggctggagctgctgggcgcgggacctggggcggttaatttggagtggcccctggagtcagtttcctacaccatccgaggccccacccagcacgagctacagcctccaccaggagggcctggaaccctcagcctgcacttcctcaaccctcaggaagctcagcggtgggcagtcctagtccgaggtgccaccgtggaaggacagaatggcagcaagagcaactcaccaccagccttgggcccagaagcatgccctgtctccctgcccagtcccccggaagcctccacactcaagggccctccacctgaggcagatcttcctaggagccctggaaacttgacggagagagaagagctggcagggagcctggcccagcccagctggtcctgtccttcctgcaccttcatcaatgccccagaccgccctggctgtgagatgtgtagcacccagaggccctgcacttgggacccccttgctgcagcttccacctagcagccaccagaggtaccagaggtggcacaggcaggggaggtggggggcagggcagaatccacaggaatgacccagctcctcccccacaggttacaaggggagagtggcccttccctcacaagtccgacatctccaggcccccactgaactccggggacctctactgactgcttgctgggacagtcaccagggttggggggaagggccacaaaatgaaaccattaaagacccttaagagccaaaa

SEQ ID NO: 511470 - DNA, 1251 bp, Homo sapiens
  misc_feature (29)..(29): n is a, c, g, or t
aatgccaggctgtacggagcggggtgcgncgtgtgggcgtggcgggggctggggtctgcgggcgaaggtggtagcccattggaggtcccgggagcgaagtccagctgccgttaggcgctgggatagtcgcacgctggatgcatctacgtccgccgagcccctggggcgaagaggccgcgtccgccttcagttgtggccggtgcttcgccccctgacccttcgcccccaaagaccagctctaacgtgagcgcctcggccgccctgccccagcctcgtacacgccgccagcctcgcccagccggtgtccggagaccctcgggccgtgtccatttgtgggcaaagccagcggggcaggcttggccagagtgcaccactcggcgccgtcccaggcccgacgctctgggcgcgcccggaaccccaggttcgcggcccgtgtttccgaccggcggagggggctcagcggcccgatcccacggaagcgcgctcggaggggtgggacccggccggaccggagatggcgccgccagcgggcggggcggcggcggcggcctcggacttgggctccgccgcagtgctcttggctgtgcacgccgcggtgaggccgctgggcgccgggccagacgccgaggcacagctgcggaggctgcagctgagcgcggaccctgagaggcctgggcgcttccggctggagctgctgggcgcgggacctggggcggttaatttggagtggcccctggagtcagtttcctacaccatccgaggccccacccagcacgagctacagcctccaccaggagggcctggaaccctcagcctgcacttcctcaaccctcaggaagctcagcggtgggcagtcctagtccgaggtgccaccgtggaaggacagaatagccttgcctcttacggggttcggcaggatggggaccctgctttcctctacttgctgtcagctcctcgagaagcccagcccagctggtcctgtccttcctgcaccttcatcaatgccccagaccgccctggctgtgagatgtgtagcacccagaggccctgcacttgggacccccttgctgcagcttccacctagcagccaccagaggttacaaggggagagtggcccttccctcacaagtccgacatctccaggcccccactgaactccggggacctctactgactgcttgctgggacagtcaccagggttggggggaagggccacaaaatgaaaccattaaagacccttaagagccaaaa

SEQ ID NO: 511471 - DNA, 160 bp, Homo sapiens
gctggcccgcctttccgatggccatgctttcctggtagccctgggggtcttcagcaccaggaggtctgggtcacctgtttgttccaatgccagccagtgagccccaatgtctcccttactcccctgcctcccagtgaagtcctggagggccaggggggcc

SEQ ID NO: 511472 - DNA, 1331 bp, Homo sapiens
  misc_feature (29)..(29): n is a, c, g, or t
  misc_feature (1188)..(1188): n is a, c, g, or t
  misc_feature (1199)..(1199): n is a, c, g, or t
  misc_feature (1211)..(1211): n is a, c, g, or t
  misc_feature (1218)..(1218): n is a, c, g, or t
  misc_feature (1223)..(1223): n is a, c, g, or t
aatgccaggctgtacggagcggggtgcgncgtgtgggcgtggcgggggctggggtctgcgggcgaaggtggtagcccattggaggtcccgggagcgaagtccagctgccgttaggcgctgggatagtcgcacgctggatgcatctacgtccgccgagcccctggggcgaagaggccgcgtccgccttcagttgtggccggtgcttcgccccctgacccttcgcccccaaagaccagctctaacgtgagcgcctcggccgccctgccccagcctcgtacacgccgccagcctcgcccagccggtgtccggagaccctcgggccgtgtccatttgtgggcaaagccagcggggcaggcttggccagagtgcaccactcggcgccgtcccaggcccgacgctctgggcgcgcccggaaccccaggttcgcggcccgtgtttccgaccggcggagggggctcagcggcccgatcccacggaagcgcgctcggaggggtgggacccggccggaccggagatggcgccgccagcgggcggggcggcggcggcggcctcggacttgggctccgccgcagtgctcttggctgtgcacgccgcggtgaggccgctgggcgccgggccagacgccgaggcacagctgcggaggctgcagctgagcgcggaccctgagaggcctgggcgcttccggctggagctgctgggcgcgggacctggggcggttaatttggagtggcccctggagtcagtttcctacaccatccgaggccccacccagcacgagctacagcctccaccaggagggcctggaaccctcagcctgcacttcctcaaccctcaggaagctcagcggtgggcagtcctagtccgaggtgccaccgtggaaggacagaatggtcagtgccctgtaatggatacaattacaatttggaatagccttggccccccagtcctggttggggaagtggatccaccttccccactgctggatgtctgggaaggcttccaggagggagtaggtggagcctggagtagcttggagtacttggagtggctgctggagtcagtctcctacaccatctgaggccccagccagcacaagttgcagctccaccaggaagccctggaacctcagcctgcacttccttaaccctcaggaaggatgagagggcaagcatgaacgaggcagagcanggcagggtcangacctgtgtgangaagacntcatnccaagagcagacgaacagttgaccggaatgggcaccaactgcaagactcatacaccctgctaaaaccggttcgcactgccaggtcgggcccaacaggtggcgacaaag

SEQ ID NO: 511473 - DNA, 190 bp, Homo sapiens
agcttgaaaacttgggtcattgagccagcgggagtcatgtggctctgttcggagacttggacgttgccctaggctgtgagaagatggtaaatgtctcgtccgcatgaggtcttgctgccaccccctgagtatacgctcctccccgcaccagacacggagtgcagccctgatgcctggtggtcatagagga

SEQ ID NO: 511474 - DNA, 435 bp, Homo sapiens
tccgatgtgctcagatagaatcttatagaatcttacaaaaccctatcttagtatatgggattcatataaaacataacaatttctttttggggggcaggagtggagtctcactctgtcacccaggctggagtgctgcggcctgatctcggctcactgcaacctctgtctgttgggttcaagcaattctcatgcctcagcttctcaagtagctgggatgacgggtgcccacctccacacctggctaatttttgtatttttagtagagatggggtttcaccatgttggacaggtatgttcctgaactcctgacctcagatgatctgcccgcctcggcctcccaaagccctgggattacaggtgtgagccatcgtgcccagcccatttgccaactttttaattggatttttatttttttatacctgtaattagagtctc

SEQ ID NO: 511475 - DNA, 397 bp, Homo sapiens
ttttttttttaggccgtggcaaagattttattatgaagactccaaaaacaattgcaacaaaaataaaaattgataagcaggacctaattaaactaaagggcttctccacaggaaaaacaaaccagtaaaacaaaaacaaacaaacaaaaaaaaaaactcgagactagttcgagatgtgtagcacccagaggccctgcacttgggacccccttgctgcagcttccacctagcagccaccagaggttacaaggggagagtggcccttccctcacaagtccgacatctccaggcccccactgaactccggggacctctactgactgcttgctgggacagtcaccagggttggggggaagggccacaaaatgaaaccattaaagacccttaagagccaaaa

SEQ ID NO: 511476 - DNA, 383 bp, Homo sapiens
agtacttggtacccacttttggtgaggacaggatgaatgtatggactgggcaagaaaactagtgggtgtgtaaggttctcacgctggagatcgttgaccacgacgccgtcgagctccagggttgtgtgcggtgagtgcgttgccacagtacccttgactccaagcagcgccccacctggactaatgctgcctgcagttgtcttacaagacaacaccagctagagctggggtagccactctaccctctcaagaaaccaaggggaacaatgcacccctgttgcccatgaccaccagtttggccgtaggtctctctctgatggtagcaatacactgggggctgcctctgggcgcccctgctccattgtcctcccaccacaaacgtg

SEQ ID NO: 511477 - DNA, 134 bp, Homo sapiens
atcaggcgagctgggttcagtatcctctttcttgctccaataatcttgctcatccccactataccaaacgtccctttctgagcctagtgggtatgggtacaaatcacagtgtcagtctgggtaactggtgccac

SEQ ID NO: 511478 - DNA, 754 bp, Homo sapiens
  misc_feature (281)..(281): n is a, c, g, or t
  misc_feature (435)..(435): n is a, c, g, or t
  misc_feature (484)..(484): n is a, c, g, or t
  misc_feature (752)..(752): n is a, c, g, or t
  misc_feature (754)..(754): n is a, c, g, or t
gctggcccacaggaattctgttttatttaaatggggggtagaaccaaaattgagccaagcaggctggcttctggagtttgaacccttaatttccctccttaaaccaccctttgggagaaattggggtctctggggtccagccttgggttttttgccctgggggttttaagggggcggggggttggggcgcctctttttggggggggttttttggggggggccgagagagggccccttttttttttggggagagtttttcgcggggggtgttttactaaaanggggggggggggaaccacccggggtgttttttctttttttaccccccaaatatgggggtcttcatataggatggggggggggggggggggggcttcttcttttttttttattttttttttttgggaagaaaaaaaaaaaatttttttttttttnttttttctccccccccttttttgtttgggtgggggggggaggggggggngggagaaaaaactccctctttttttttttgttgacccccccacccccccggggggggggtttttttttttttttttggggggggggggtttttttttttttttcccgcccgccccctataaaaggggggggggggggggggacacccccaaccttttttttttttttttttttttttaaccaacaaacaaaaactctttttttgttgaaacaaaaatacggtttttcttttgtgtgtgagcggggttctttttatttttttttttttngn

SEQ ID NO: 511479 - DNA, 455 bp, Homo sapiens
cacgagggcttcgatgccgcggccgtcatgcggccttgccggcgaacaggccctgcggccggatcgacaggatgattaccagcagcacgaaggcgatgatgtccttgtagtcggtcgacacgtagaagccgccgaagctctccgccatgccgatgatcaggccgccgaggatcgcgccggggatgctgcccatgccgccgaggatgatgatcacgaaggccttggtgatgaccaggtgccccatcgccggatagaccagattgatcggcgcatacagcgttgcggcaatcgccgcgagcgcgcccgagatcgcgaacaccagcagcgtgacgcgcgtggcgtcgatgccgaccagcgccgcgccttcgcggttctgcgccatcgccacgatggtcgagccggtgaccgtgcgggtcaggaacagatgcagcaccaccatcagcgtgaaggcggcg

SEQ ID NO: 511480 - DNA, 681 bp, Homo sapiens
  misc_feature (546)..(547): n is a, c, g, or t
  misc_feature (586)..(586): n is a, c, g, or t
gctcccggggcgtttgagcgggctcaccctgagcccgcgtggccaacgcggatccaggcccgactggcgggaccgccccggattccccgcgggccttcctagccgccatggaggacggcgtctatgaaccccacagacctagactcctgtgagtgatgctggatgtgatgcttgtgatgaagcatcctgtgctggctgtgaagcatggatgcttgcttgtgttgtgacgattcatgcgcctgctggtgagtgagctcagtgaagccatgagcgatggtgtgaggtggcttggagtgccaatgatgggcagtaagaccttgcaactggaacctggaagatggcaatggtgcatggaatgaagttcaacattggaccccaagaatggggatccagttcttgtgtcgtgagaatgaactgctgcagaacacaccctgatggagatctgccctgcttcctgtacaagggctgacggggctgaacaagacagccatcggggactacctgggggagacgggaagaactgaacctggcagtgctccatgcttnngtggatctgcatgagttcaccgacctcaatctggtgcangccctcaggcagtttctatggagctttcgcctacccggagaggcccagaaattgaccggatgatggagggcttccgcccagggatactgctgtgc

SEQ ID NO: 511481 - DNA, 497 bp, Homo sapiens
  misc_feature (6)..(6): n is a, c, g, or t
  misc_feature (18)..(18): n is a, c, g, or t
  misc_feature (78)..(78): n is a, c, g, or t
  misc_feature (87)..(87): n is a, c, g, or t
  misc_feature (100)..(100): n is a, c, g, or t
  misc_feature (138)..(138): n is a, c, g, or t
  misc_feature (207)..(207): n is a, c, g, or t
  misc_feature (210)..(210): n is a, c, g, or t
  misc_feature (301)..(301): n is a, c, g, or t
  misc_feature (362)..(363): n is a, c, g, or t
  misc_feature (402)..(402): n is a, c, g, or t
ttaggngttacccttgtntgcctacgtgggtagcatggggatcattggagagaggtgacagtaggtagcatacatgtntgcggcatnactcccaactgtncaaaggtctggcctaagcagggttcccaagccagatancctcccaagagtgtagtctgaggatcccccaccctgggggcaggcctgtgtgggagtcagcaggaaacncancctcggcagtgggcagctgtggtgcattagagagggcacgacttccccagggcatagccctttgcccattcctgccccatcctgaccaaantgtatgtgtctttgtcccatccttccagggaagaactgaacctggcagtgctccatgcttnngtggatctgcatgagttcaccgacctcaatctggtgcangccctcaggcagtttctatggagctttcgcctacccggagaggcccagaaattgaccggatgatggagggcttccgcccagggatactgctgtgc

SEQ ID NO: 511482 - DNA, 396 bp, Homo sapiens
cagtagtaaatctcagcaatatatattaggcaagccacgcatctgtgcacatcccataaaggatgcctctatattcactaacattggcttaagactcgatttcagggtctactcctatgtccaggaccagtaccatggtgtagtccatgatagtgttaacacgctgttcaatggtcaggacagtccaggtatctaactgtgtccgaatggtagcctggatgaggctgtcagtatccagggcgatgtcaactgtgacctggtctagacctaggatgagtatcgcacggcgcagggctcggcccaggcactctagatgcctatggagcacgctaagattcaccccgccctttgagctctggaagtccaggactgccggctgagagctctcaaacatgt

SEQ ID NO: 511483 - DNA, 970 bp, Homo sapiens
  misc_feature (768)..(768): n is a, c, g, or t
agggaacaacttgtcagtaatcgtgcgttatcctgccctatgtaatcttctaatcaggtcctgcgtgaccttgcatccgtggatgttggacgatgttataactcacaacacgtctctatgcgattgtctgggctaagctttaagatgtgagttcgaggcacttgatgaagcagctcgtctctctgaaccgttatgagaaaaccactgaacgatcgtcgtcagaccgtagtaaccaaccatgtctcagagagggaatattataaatgcaatgacataggccaaaagagtgggtccgcattgcttgtgtcgcacgcgaaggcggataagacgctgccttataaaatcgaatagtagaagaaatgtgtcacgagaaacaccattaaggaaccgagatgacgaggcagtactacgacattgtgcactgtagtaaaagagccatgctcgagttgagactagagagagtctatgtggttggggcgcctgcatgaccgctcccacactgaacatgatccggatcttgggtgagactcatgtctcttgcagtactattaagttggcgactttgccttggcttttgtctaactttgtcctccttcattgccttagtctagagacttataggagtgacacacgctgctgtcaattgcgagtctcgagaagtatgagctgctgggttctatcagtacacttatgtaggacggcataactctgagatatatccaactgacatactgacttatatggccttatagatagcatacaacaggnttttcccctcttgcattattattcttataacaatttattatttatgtacctttaatttttactttcaagtggccaggacattcgaacctattgggcactatggttcttttgggattggattacatgtacaaatccagaagagggtagaaaccaggccacaagcagcttcgctttttctctggcatgatacttcctgtttatg

SEQ ID NO: 511484 - DNA, 107 bp, Homo sapiens
  misc_feature (4)..(4): n is a, c, g, or t
ggtnagggtaccagtatagcctcattaacacacactcccatgacacagcggcatggcactgcagccatgggacacttgagctccccacagtcagctccagtgaaacc

SEQ ID NO: 511485 - DNA, 188 bp, Homo sapiens
  misc_feature (173)..(173): n is a, c, g, or t
tatcctaagtattctagtattctgatgcacagcttactagaaatacttctaaaatggtatataatcatcatgattacctactttaaaaagaggggtatctgtttctcttacattaataacctgaaatgagtctatgcaatattttaagaaatacagtaacactgctgagtgtngttaggtctagctgg

SEQ ID NO: 511486 - DNA, 469 bp, Homo sapiens
gacaaacacaaactcgcgtgccggtgcatccgcccaggttgttttgctcactgccgctctgagcgcagttactggccagattagcgcgaaaattatcatcgttattagtaggttaactctcattctcttctcctgtctcggtcaccgccgcccacgatgagaggccgctgcagaccacatcaccgacccagatcggcaccgcgcgcctggttgagttccagagccacttcgcaggttttattgccactgtagcgaaaatcgatagtggggtatttcttatccacgtccatgacaaactcgccgttttcatcggttcgggttcggccgatatggttgttaatccgtgcgttagccagcagtgtgccgtcttccgcacggatacgaccggagacggtaaccatctgcttcacctctggctcaatgacagcgacattgcctggatagagagtcagacgacttttgcggccgc

SEQ ID NO: 511487 - DNA, 285 bp, Homo sapiens
  misc_feature (168)..(168): n is a, c, g, or t
agaggatccccgccttagggagcggtcttagggatgttaatgggctccttcaggtctcccttcaggtggggcgtccgctcctggatgagttcgcggccatgctttatccagtcctgcttgttctctatgctggaagccttaaggacaattttattatctgaagtcggngttctccccacccacagtgcaaattttgcaagggctccttcaacatgttctgtgacacccaactctgaggtaaacaatttgcttttataaaggtacttgcttctccctaagacccta

SEQ ID NO: 511488 - DNA, 337 bp, Homo sapiens
  misc_feature (295)..(295): n is a, c, g, or t
  misc_feature (328)..(328): n is a, c, g, or t
tagtgatgggggtctcactatgttgcccaggctagtcttgaattcctggcgtcaagaattctcccaccttggcctctcaaagccctgggattattctacatgtgagccatgatgctcggccctgatttatgattgccttttttttttttaagacagggtctcacttcgtcactcaggttggagtgcaggtatgtgatctcggctcactgcaacctccacctcccgggttcaagcaattcttgtgcctcaatctcccaaattgctgggatatgccaggtgcaatggctcacacttntaatcccagcactttgggaggctgaggttggtnggataactt

SEQ ID NO: 511489 - DNA, 306 bp, Homo sapiens
ttttggggtcccttttttaaaagtttaaaaaaatgttgccaagggagttcggtttttaacccatgccttgggggtgatgccaaccattcccgtcgttgggatttaaagggtattagtcccgccagtatggggaagtagtttcggggatcctgttgtgaaatttaaactgtaaaagtaaatggtttaaaggactggggtgttgctctgtttgggaagacctaattttgtttggtcagggacaaaatttttaatccctttttttcccccttccagcccaaaaaaagtttgggtttttaacccctttta

SEQ ID NO: 511490 - DNA, 857 bp, Homo sapiens
gtaccctttctcaaagggtgcctataaggtgcgtgccaaattttaaatgatgttgaccccctgtgtgaatttttccgaaagttcttggggaaaactctttgtatatgggaaggactgccccttcatgcccacttagatgagatgggatctgttgaccctcctcgtttgttaccccgatatacgtgggattttcttctcacttgggagaacccgtgggggtacagaattgtggtaaaaggacccaacgacgccgaccgcaggccgttatgacgaagtggtagtggtttgattaagctcctgacatgaggtctccttagcatgccgctccctgtaaggaaagaatgagactacatgtggccagattggattcttaggggggtcccagaatgactcttctgtaggagggggacctactggatgcatgaatttcatctcatgccagatcgcgggggatgacccgactgggagttgtatcccagggatgtgatgctaaaagaggctgcaggtaatggatgaggatgtgccggaggccgcgcccatggcgatggatgactcttagagcaccctatgtggggtttatgaaatcttatcccagttagttctgttaccctaaggcgcttgtctaagatccaatttttcacccgagcctctcccctagtatcttcagcacatgctcactggtgtcgccactccttgtccttcccatgttcattaattcattttgccccgcgcctatccccttttcacttcctttgacgctcctagtagttttggttaattcttaaccctgtaatattttgcattttaattttgaaacctttttatgacttaaccataaaaaggctgtatggttttta

SEQ ID NO: 511491 - DNA, 300 bp, Homo sapiens
  misc_feature (27)..(27): n is a, c, g, or t
  misc_feature (60)..(60): n is a, c, g, or t
  misc_feature (90)..(90): n is a, c, g, or t
  misc_feature (99)..(99): n is a, c, g, or t
  misc_feature (141)..(141): n is a, c, g, or t
  misc_feature (239)..(239): n is a, c, g, or t
  misc_feature (297)..(297): n is a, c, g, or t
ctgctccttccttgggggacccggttncttcctgtggcaacagcaggggggaaaaaaagnctcagttcagaaagaaaaagagagagcaanagttgaganaaatggcatggagcacaatgaagcaagaacaaagcacaagantgaagccccggggggaactcagatggagaagtatccagtatgcatctcggggagagagacattcagcctataatgaatggaaaaaggccctcttcaancctggtgaggaaatgcttcagatgaggctccactttgttaaataaaatggatgatacntaa

SEQ ID NO: 511492 - DNA, 581 bp, Homo sapiens
  misc_feature (38)..(39): n is a, c, g, or t
  misc_feature (41)..(41): n is a, c, g, or t
  misc_feature (44)..(44): n is a, c, g, or t
  misc_feature (46)..(47): n is a, c, g, or t
ttcatcacagataaaaatatatttcagggcagcctctnntnctnannttcaaccctcgacgttaggtttggatacaaagttcttctcaagtgcgcatcatcagctctccaggtgggacctgtgatgggttttgaaggggagggccaactctctgtgttgggcctaggtcctgatgtgtgactaggacacagcatgtctcagtgccgtgccagactgccacattgctacaaagagatgatgcttcctcatgccatcttatctgctttaatgcaaagtgttccttgcacctcttagaaatggggagttgagccgggcgtggtgactcacgcctataatttcagcactttgggaggccgaggcgggcggatcacctgagatcgggagttggagaccagcctgaccaacacagagaaaccccgtctctactaaaaatacaaaattagctgggtgtgatgacgcatgcctgtaatcccagctactcgggaagctgaggcaggagaatcgcttgaacccggggagtggaggttgcagtgagccgaaatcacaccattgcaccactgcagcctgggcaacatctgtct

SEQ ID NO: 511493 - DNA, 233 bp, Homo sapiens
gctcgaccttaattttaaaaatactttattgctaaaaaaaaggtatatacattgttattttatacataatgctattgcacacttaatagactacagtatagtgtaaacataattattgtctgtttgtttttgagacaaggtctcactcttactgggggacctgccccgataatcacgtaggttcttttctattttcctaagtgtcggctggcttgagaaataaagggacgtcg

SEQ ID NO: 511494 - DNA, 250 bp, Homo sapiens
ggaagacggggcccaaagtcaccgtcaaggtgtattttgacctacgacttggagatgaagatgtaggccgggtcatctttggtcttttcggaaagacttttccaaaaacagtggataatttgctggccttagttacaggagagaaaggatttggctacaaaaacagccaaattccatcgtgttatcagggacttcatggatacagggcggagactttcaccagggggagattggcacaagagggaagagc

SEQ ID NO: 511495 - DNA, 191 bp, Homo sapiens
ctcaagacatcttgcaatgacctagacaggaacggtgattcccactaatttttatccagataaacaaagctgatgagccagaggttaggtaacctgttcaaaatgacacaactagtatatgactagtcacagcttatagccggattcatctgacttcaaagcctacattcactactagtatgctatacagg

SEQ ID NO: 511496 - DNA, 2419 bp, Homo sapiens
  misc_feature (19)..(19): n is a, c, g, or t
  misc_feature (24)..(24): n is a, c, g, or t
  misc_feature (38)..(38): n is a, c, g, or t
  misc_feature (44)..(44): n is a, c, g, or t
  misc_feature (48)..(49): n is a, c, g, or t
  misc_feature (53)..(54): n is a, c, g, or t
  misc_feature (59)..(60): n is a, c, g, or t
  misc_feature (64)..(64): n is a, c, g, or t
  misc_feature (69)..(69): n is a, c, g, or t
  misc_feature (74)..(74): n is a, c, g, or t
  misc_feature (87)..(88): n is a, c, g, or t
  misc_feature (92)..(92): n is a, c, g, or t
  misc_feature (100)..(100): n is a, c, g, or t
  misc_feature (111)..(111): n is a, c, g, or t
  misc_feature (118)..(118): n is a, c, g, or t
  misc_feature (123)..(123): n is a, c, g, or t
  misc_feature (135)..(135): n is a, c, g, or t
  misc_feature (137)..(137): n is a, c, g, or t
  misc_feature (139)..(139): n is a, c, g, or t
  misc_feature (141)..(141): n is a, c, g, or t
  misc_feature (143)..(143): n is a, c, g, or t
  misc_feature (146)..(146): n is a, c, g, or t
  misc_feature (158)..(158): n is a, c, g, or t
  misc_feature (177)..(177): n is a, c, g, or t
  misc_feature (191)..(191): n is a, c, g, or t
  misc_feature (199)..(199): n is a, c, g, or t
  misc_feature (219)..(219): n is a, c, g, or t
  misc_feature (221)..(221): n is a, c, g, or t
  misc_feature (223)..(223): n is a, c, g, or t
  misc_feature (227)..(227): n is a, c, g, or t
  misc_feature (244)..(244): n is a, c, g, or t
  misc_feature (252)..(252): n is a, c, g, or t
gcacgcctgtaatcccagnacttngggaggctgaggcnggcggntcanntganntcagnngttngagancagcntggccaacatggnnaaancctgtctntactaaaaatncaaaaantagcngggcgtggtggngngngncngtnatcccagctacncgggaggctgaggcagganaatcacttgaaccngggaggcngaggttgcagtgagccgagntngnccantgcactccagcctgggngacagagngagtctccgtcttcaagaaaaaagtaatagagatagagaagtagacatagaataataaagtaacacatgtcccaggtaactgcatattcgataggtctctgtcttctcaaacgttaggtgtgctgtgaagttaggcaaatgtattctctcgttaaaacaagaaagttatcttggtcctagcgttacttgctcgtgtcgcgagagtgataacacccgtcgtgcgtgggagctagaatgtgtacaggtagaaacataagcaggagaacgagcgtctggcggcgaatctagctgctaccaagtgttaagaggtcaggccgtaggccggcgcggagaatctgctgtcgcctgcagctgctcgcctgtctccgtcggaagggagcccaagctttgcagagaacatgaacgattggatgcccatcgccaaggagtatgatccactcaaagcgggcagcattgatggcaccgatgaagacccacacgaccgcgcggtctggagggcaatgctggcacgatatgtccccaacaaaggtgtcataggagatcccctcctcaccctgtttgtggccagactaaacttgcagaccaaggaggacaaattaaaggaagtcttttcccgctatggtgacatccggcggcttcggctggtcagggacttggtcacaggtttttcaaagggctacgccttcatcgaatacaaggaggagcgtgccgtgatcaaagcttaccgagatgctgatggcctggttattgaccagcatgagatatttgtggactacgagctggaaaggactctcaaagggtggatccctcggcgacttggaggcggtcttgggggaaaaaaggagtctgggcaactgagatttgggggacgggaccggccttttcgaaaacctattaacttgccagttgttaaaaacgacctctatagagagggaaaacgggaaaggcgggagcgatctcgatcccgagaaagacactgggactcgaggacaagggatcgagaccatgacaggggccgggagaagagatggcaagaaagagagccgaccagggtgtggcccgacaatgactgggagagagagagggacttcagagatgacaggatcaaggggagggagaagaaggaaagaggcaagtagaggcccaacagcagaaccccaaagtgaagttacagtggaaatgagtggagggggattgtctttcaacgcagcgtgagtctaatggttgaataaaacttactgatgatcaaaaaaaaaaaacacacaaacacaacaaagagacaacaacaaaaaagaaccacgaaaaagacaaaacaacacagaaaaacaaacacaaacaaagaaagaaaaaaaagaaaacaaacaaagcaaagagacagggacaaacgagaaaggagagaagagaagagacgagaagcaggaaggaagagagagaagagaggaagggaggagagcggagcaagaggggggagagagcggacagacggcaagaggggacggccggcggcggagcggcaagaagcagaaaggagaggcggagcaggagggagcgacgccagcacggcggagacacaggcggagcacgagaagaagaggagagagagggcggaacgcgaagcggagagagggaagaacgaagggggcgagaggaaacgagagagcaggagacgaagcgagagcaggaagaaggagagagaaggagaagaaagaggagagaaggaggaggaagaaagagaaggaagagggagagcaacaggacgaggagaggagagcggacaggccgagaggggaggaaggacgcgagaggagaaggggaaggacagcgaagagagaggagaggcagagccagagagaaaaggacgacggaggggaagagcaggatgcgagggagaaggagagaggaaagatagagagagacagagaaagaaaaggaagaggcgaggaggagccgagaaagagaggcgagggggagaagggaggaggcgagaggggagaaggagggggggagagggacggcgacgagagggaagaagggggagagaaggggggaaagaagagggggagcggagggaggaacgagagggggaacggggcagggggaggggaggggagagagaaggggaaggaagaggagaggaaggaggaaaggaaagcacgggggggagggg

SEQ ID NO: 511497 - DNA, 324 bp, Homo sapiens
gtcgagtgcctggtgctataaggacactcacctattaggcagaatcaaagaatatctggatcagctacctgattggccctacaaagatgacctcctggccttggactgccagctggctcctgtccagtgtacttgatgttcttcgccttattcatcatttttaaggcttatctaattcactgtgtttggaactgctataagtacatcaacaaccgaaacgtgccggagatggctgtgtaccctgcctgtgaagcacctccgtcagtacgttttgccaacctatgaatatggccgtgaaaatgcctgaaaaggaaccaccagctc

SEQ ID NO: 511498 - DNA, 1982 bp, Homo sapiens
ctgacatcaggagtttgaggccggcttggaacatggtgaaatcctgtctgtactagaaatgcaaaaattagctgggcgtggtggtgtgtgtctgtgatcccagctgctcggcctcccaaggtgctgggattacaggcgtgagccaccgcgtctggcctcagccaaggtttttaagtaacatatttcagcattggctctacagcgttgcagaacatgaacgattggatgcccatcgccaaggagtatgatccactcaaagcgggcagcattgatggcaccgatgaagacccacacgaccgcgcggtctggagggcaatgctggcacgatatgtccccaacaaaggtgtcataggagatcccctcctcaccctgtttgtggccagactaaacttgcagaccaaggaggacaaattaaaggaagtcttttcccgctatggtgacatccggcggcttcggctggtcagggacttggtcacaggtttttcaaagggctacgccttcatcgaatacaaggaggagcgtgccgtgatcaaagcttaccgagatgctgatggcctggttattgaccagcatgagatatttgtggactacgagctggaaaggactctcaaagggtggatccctcggcgacttggaggcggtcttgggggaaaaaaggagtctgggcaactgagatttgggggacgggaccggccttttcgaaaacctattaacttgccagttgttaaaaacgacctctatagagagggaaaacgggaaaggcgggagcgatctcgatcccgagaaagacactgggactcgaggacaagggatcgagaccatgacaggggccgggagaagagatggcaagaaagagagccgaccagggtgtggcccgacaatgactgggagagagagagggacttcagagatgacaggatcaaggggagggagaagaaggaaagaggcaagtagaggcccaacagcagaaccccaaagtgaagttacagtggaaatgagtggagggggattgtctttcaacgcagcgtgagtctaatggttgaataaaacttactgatgatcaaaaaaaaaaaacacacaaacacaacaaagagacaacaacaaaaaagaaccacgaaaaagacaaaacaacacagaaaaacaaacacaaacaaagaaagaaaaaaaagaaaacaaacaaagcaaagagacagggacaaacgagaaaggagagaagagaagagacgagaagcaggaaggaagagagagaagagaggaagggaggagagcggagcaagaggggggagagagcggacagacggcaagaggggacggccggcggcggagcggcaagaagcagaaaggagaggcggagcaggagggagcgacgccagcacggcggagacacaggcggagcacgagaagaagaggagagagagggcggaacgcgaagcggagagagggaagaacgaagggggcgagaggaaacgagagagcaggagacgaagcgagagcaggaagaaggagagagaaggagaagaaagaggagagaaggaggaggaagaaagagaaggaagagggagagcaacaggacgaggagaggagagcggacaggccgagaggggaggaaggacgcgagaggagaaggggaaggacagcgaagagagaggagaggcagagccagagagaaaaggacgacggaggggaagagcaggatgcgagggagaaggagagaggaaagatagagagagacagagaaagaaaaggaagaggcgaggaggagccgagaaagagaggcgagggggagaagggaggaggcgagaggggagaaggagggggggagagggacggcgacgagagggaagaagggggagagaaggggggaaagaagagggggagcggagggaggaacgagagggggaacggggcagggggaggggaggggagagagaaggggaaggaagaggagaggaaggaggaaaggaaagcacgggggggagggg

SEQ ID NO: 511499 - DNA, 234 bp, Homo sapiens
  misc_feature (117)..(117): n is a, c, g, or t
  misc_feature (122)..(122): n is a, c, g, or t
  misc_feature (140)..(140): n is a, c, g, or t
tcttcacgtactgcaggtcaggggactctttgcaggcgtgttttagaagggagctgtttgattgaaaggaaagaactaatagaaaatttatcgtcagatatccgagcttatgacatnttatnttggagatacaccgcggnctgctcaagccgaagatctttatgaaattcttgattcctttactgaagagtatgaaaatgaaggacaacgaatcaatgcaagacggcaagcggg

SEQ ID NO: 511500 - DNA, 2151 bp, Homo sapiens
  misc_feature (19)..(19): n is a, c, g, or t
  misc_feature (24)..(24): n is a, c, g, or t
  misc_feature (38)..(38): n is a, c, g, or t
  misc_feature (44)..(44): n is a, c, g, or t
  misc_feature (48)..(49): n is a, c, g, or t
  misc_feature (53)..(54): n is a, c, g, or t
  misc_feature (59)..(60): n is a, c, g, or t
  misc_feature (64)..(64): n is a, c, g, or t
  misc_feature (69)..(69): n is a, c, g, or t
  misc_feature (74)..(74): n is a, c, g, or t
  misc_feature (87)..(88): n is a, c, g, or t
  misc_feature (92)..(92): n is a, c, g, or t
  misc_feature (100)..(100): n is a, c, g, or t
  misc_feature (111)..(111): n is a, c, g, or t
  misc_feature (118)..(118): n is a, c, g, or t
  misc_feature (123)..(123): n is a, c, g, or t
  misc_feature (135)..(135): n is a, c, g, or t
  misc_feature (137)..(137): n is a, c, g, or t
  misc_feature (139)..(139): n is a, c, g, or t
  misc_feature (141)..(141): n is a, c, g, or t
  misc_feature (143)..(143): n is a, c, g, or t
  misc_feature (146)..(146): n is a, c, g, or t
  misc_feature (158)..(158): n is a, c, g, or t
  misc_feature (177)..(177): n is a, c, g, or t
  misc_feature (191)..(191): n is a, c, g, or t
  misc_feature (199)..(199): n is a, c, g, or t
  misc_feature (219)..(219): n is a, c, g, or t
  misc_feature (221)..(221): n is a, c, g, or t
  misc_feature (223)..(223): n is a, c, g, or t
  misc_feature (227)..(227): n is a, c, g, or t
  misc_feature (244)..(244): n is a, c, g, or t
  misc_feature (252)..(252): n is a, c, g, or t
gcacgcctgtaatcccagnacttngggaggctgaggcnggcggntcanntganntcagnngttngagancagcntggccaacatggnnaaancctgtctntactaaaaatncaaaaantagcngggcgtggtggngngngncngtnatcccagctacncgggaggctgaggcagganaatcacttgaaccngggaggcngaggttgcagtgagccgagntngnccantgcactccagcctgggngacagagngagacttgtctcgagtaaaaaaagagaatgtaacaaatcgaaagagattgttgtaggaaatctcaacctaatgctgccggggaggaagtgcacctagaaagattaatgagaaacaatgaaaccagctaacatgaacgattggatgcccatcgccaaggagtatgatccactcaaagcgggcagcattgatggcaccgatgaagacccacacgaccgcgcggtctggagggcaatgctggcacgatatgtccccaacaaaggtgtcataggagatcccctcctcaccctgtttgtggccagactaaacttgcagaccaaggaggacaaattaaaggaagtcttttcccgctatggtgacatccggcggcttcggctggtcagggacttggtcacaggtttttcaaagggctacgccttcatcgaatacaaggaggagcgtgccgtgatcaaagcttaccgagatgctgatggcctggttattgaccagcatgagatatttgtggactacgagctggaaaggactctcaaagggtggatccctcggcgacttggaggcggtcttgggggaaaaaaggagtctgggcaactgagatttgggggacgggaccggccttttcgaaaacctattaacttgccagttgttaaaaacgacctctatagagagggaaaacgggaaaggcgggagcgatctcgatcccgagaaagacactgggactcgaggacaagggatcgagaccatgacaggggccgggagaagagatggcaagaaagagagccgaccagggtgtggcccgacaatgactgggagagagagagggacttcagagatgacaggatcaaggggagggagaagaaggaaagaggcaagtagaggcccaacagcagaaccccaaagtgaagttacagtggaaatgagtggagggggattgtctttcaacgcagcgtgagtctaatggttgaataaaacttactgatgatcaaaaaaaaaaaacacacaaacacaacaaagagacaacaacaaaaaagaaccacgaaaaagacaaaacaacacagaaaaacaaacacaaacaaagaaagaaaaaaaagaaaacaaacaaagcaaagagacagggacaaacgagaaaggagagaagagaagagacgagaagcaggaaggaagagagagaagagaggaagggaggagagcggagcaagaggggggagagagcggacagacggcaagaggggacggccggcggcggagcggcaagaagcagaaaggagaggcggagcaggagggagcgacgccagcacggcggagacacaggcggagcacgagaagaagaggagagagagggcggaacgcgaagcggagagagggaagaacgaagggggcgagaggaaacgagagagcaggagacgaagcgagagcaggaagaaggagagagaaggagaagaaagaggagagaaggaggaggaagaaagagaaggaagagggagagcaacaggacgaggagaggagagcggacaggccgagaggggaggaaggacgcgagaggagaaggggaaggacagcgaagagagaggagaggcagagccagagagaaaaggacgacggaggggaagagcaggatgcgagggagaaggagagaggaaagatagagagagacagagaaagaaaaggaagaggcgaggaggagccgagaaagagaggcgagggggagaagggaggaggcgagaggggagaaggagggggggagagggacggcgacgagagggaagaagggggagagaaggggggaaagaagagggggagcggagggaggaacgagagggggaacggggcagggggaggggaggggagagagaaggggaaggaagaggagaggaaggaggaaaggaaagcacgggggggagggg

SEQ ID NO: 511501 - DNA, 819 bp, Homo sapiens
  misc_feature (5)..(5): n is a, c, g, or t
  misc_feature (119)..(119): n is a, c, g, or t
  misc_feature (121)..(121): n is a, c, g, or t
  misc_feature (226)..(226): n is a, c, g, or t
  misc_feature (289)..(289): n is a, c, g, or t
  misc_feature (396)..(396): n is a, c, g, or t
  misc_feature (410)..(410): n is a, c, g, or t
  misc_feature (419)..(419): n is a, c, g, or t
  misc_feature (513)..(513): n is a, c, g, or t
  misc_feature (518)..(520): n is a, c, g, or t
  misc_feature (526)..(526): n is a, c, g, or t
  misc_feature (537)..(537): n is a, c, g, or t
gggantcagagcatggtgccatgctaccccttccatcattttgctgtgttagagatgcaaaggatccagtggaggtctctgaggcctgggagatggtagagccacaccatgaaggtgcntnggtccctgaatgactgcatggagctcactctacattggactctacaaagcaagaaaggtgcgcattagagtgaatgctagtacataacagtaatctatgtttaanatatattgaggagctgccaaactgtttccaaaaatggctgcaaacattctaatattatccatnagcaagaagggcccatgtggcaaggaactaagggcagtctctgccaaaaccacaataacgaatttgcaataacataatttgaagtgatcctcccattcaagtctcanatgagtccccagcnctggccaanatcttatgtgtgtagagaagacttaacaaagaccagcaagcctgccaagatgccaatccaaagaaaaagatactaatggtgttgtgtgggaagntgctnnnatttgntgtggtttganatgcggaataagataataaaagctgtaattcttctatcaactatcggaaatactcccttgtgctacaatacataacatgtatttggataattccaagcctagaagatgtcagctaggtaggaattaattgaaaaataaccaataatgtctctcaaaattaaagtaaaaaagaaacaagtagaatgtcataattctcatttcttgcaataagttcagtacatgaaaaatatcaaagttgaagcaactagtcgcatgtcttttgatttctaccataaggggaaa

SEQ ID NO: 511502 - DNA, 1991 bp, Homo sapiens
  misc_feature (143)..(143): n is a, c, g, or t
  misc_feature (145)..(145): n is a, c, g, or t
gtaggagtgggtaaggccttctctggagcacaactgcctggctttggtgctgtctcccccacttactagcagggaggacttagcctctgtgggtgtcccttcctttcctgtttttaagaagaggtgaatgatagtatcctttncntggcattgttgtaagggttgaatgagtggctcagagtagaggctccatccaacgcttgctcttatcattcatagaacatgaacgattggatgcccatcgccaaggagtatgatccactcaaagcgggcagcattgatggcaccgatgaagacccacacgaccgcgcggtctggagggcaatgctggcacgatatgtccccaacaaaggtgtcataggagatcccctcctcaccctgtttgtggccagactaaacttgcagaccaaggaggacaaattaaaggaagtcttttcccgctatggtgacatccggcggcttcggctggtcagggacttggtcacaggtttttcaaagggctacgccttcatcgaatacaaggaggagcgtgccgtgatcaaagcttaccgagatgctgatggcctggttattgaccagcatgagatatttgtggactacgagctggaaaggactctcaaagggtggatccctcggcgacttggaggcggtcttgggggaaaaaaggagtctgggcaactgagatttgggggacgggaccggccttttcgaaaacctattaacttgccagttgttaaaaacgacctctatagagagggaaaacgggaaaggcgggagcgatctcgatcccgagaaagacactgggactcgaggacaagggatcgagaccatgacaggggccgggagaagagatggcaagaaagagagccgaccagggtgtggcccgacaatgactgggagagagagagggacttcagagatgacaggatcaaggggagggagaagaaggaaagaggcaagtagaggcccaacagcagaaccccaaagtgaagttacagtggaaatgagtggagggggattgtctttcaacgcagcgtgagtctaatggttgaataaaacttactgatgatcaaaaaaaaaaaacacacaaacacaacaaagagacaacaacaaaaaagaaccacgaaaaagacaaaacaacacagaaaaacaaacacaaacaaagaaagaaaaaaaagaaaacaaacaaagcaaagagacagggacaaacgagaaaggagagaagagaagagacgagaagcaggaaggaagagagagaagagaggaagggaggagagcggagcaagaggggggagagagcggacagacggcaagaggggacggccggcggcggagcggcaagaagcagaaaggagaggcggagcaggagggagcgacgccagcacggcggagacacaggcggagcacgagaagaagaggagagagagggcggaacgcgaagcggagagagggaagaacgaagggggcgagaggaaacgagagagcaggagacgaagcgagagcaggaagaaggagagagaaggagaagaaagaggagagaaggaggaggaagaaagagaaggaagagggagagcaacaggacgaggagaggagagcggacaggccgagaggggaggaaggacgcgagaggagaaggggaaggacagcgaagagagaggagaggcagagccagagagaaaaggacgacggaggggaagagcaggatgcgagggagaaggagagaggaaagatagagagagacagagaaagaaaaggaagaggcgaggaggagccgagaaagagaggcgagggggagaagggaggaggcgagaggggagaaggagggggggagagggacggcgacgagagggaagaagggggagagaaggggggaaagaagagggggagcggagggaggaacgagagggggaacggggcagggggaggggaggggagagagaaggggaaggaagaggagaggaaggaggaaaggaaagcacgggggggagggg

SEQ ID NO: 511503 - DNA, 350 bp, Homo sapiens
ttagcagtggctcacgcctgtaatcccaacactttgggaggctgaggcgggtggatcacgaggtcaggagttcaagaccagcctggccaagatggtgaaacccccgtctctactaaagatacaaaaattagccggctgtgatggcgggcgcctgtaatcccagctactcgggaggctgaggcagagaattgcttgaatctgggaggcagagattgcagtgagccgagatcatgccactgcactccagcctgggcaacagagactctgtctcaaaaaaaaaaaactactcccaaggccctgcttattgtaggtcattcaactctttttaggtctctattaactttttttct

SEQ ID NO: 511504 - DNA, 1869 bp, Homo sapiens
gccctgccggctgtctcggcgctcgtcccgcggttcccaccgggcgcccaccgactgtccgtcaggaggaaacgactcgacaacgcagtctgggcacttccccgagtccacgcccagcacgtactcgagtccgacgtccacatcgtggggcagcattgatggcaccgatgaagacccacacgaccgcgcggtctggagggcaatgctggcacgatatgtccccaacaaaggtgtcataggagatcccctcctcaccctgtttgtggccagactaaacttgcagaccaaggaggacaaattaaaggaagtcttttcccgctatggtgacatccggcggcttcggctggtcagggacttggtcacaggtttttcaaagggctacgccttcatcgaatacaaggaggagcgtgccgtgatcaaagcttaccgagatgctgatggcctggttattgaccagcatgagatatttgtggactacgagctggaaaggactctcaaagggtggatccctcggcgacttggaggcggtcttgggggaaaaaaggagtctgggcaactgagatttgggggacgggaccggccttttcgaaaacctattaacttgccagttgttaaaaacgacctctatagagagggaaaacgggaaaggcgggagcgatctcgatcccgagaaagacactgggactcgaggacaagggatcgagaccatgacaggggccgggagaagagatggcaagaaagagagccgaccagggtgtggcccgacaatgactgggagagagagagggacttcagagatgacaggatcaaggggagggagaagaaggaaagaggcaagtagaggcccaacagcagaaccccaaagtgaagttacagtggaaatgagtggagggggattgtctttcaacgcagcgtgagtctaatggttgaataaaacttactgatgatcaaaaaaaaaaaacacacaaacacaacaaagagacaacaacaaaaaagaaccacgaaaaagacaaaacaacacagaaaaacaaacacaaacaaagaaagaaaaaaaagaaaacaaacaaagcaaagagacagggacaaacgagaaaggagagaagagaagagacgagaagcaggaaggaagagagagaagagaggaagggaggagagcggagcaagaggggggagagagcggacagacggcaagaggggacggccggcggcggagcggcaagaagcagaaaggagaggcggagcaggagggagcgacgccagcacggcggagacacaggcggagcacgagaagaagaggagagagagggcggaacgcgaagcggagagagggaagaacgaagggggcgagaggaaacgagagagcaggagacgaagcgagagcaggaagaaggagagagaaggagaagaaagaggagagaaggaggaggaagaaagagaaggaagagggagagcaacaggacgaggagaggagagcggacaggccgagaggggaggaaggacgcgagaggagaaggggaaggacagcgaagagagaggagaggcagagccagagagaaaaggacgacggaggggaagagcaggatgcgagggagaaggagagaggaaagatagagagagacagagaaagaaaaggaagaggcgaggaggagccgagaaagagaggcgagggggagaagggaggaggcgagaggggagaaggagggggggagagggacggcgacgagagggaagaagggggagagaaggggggaaagaagagggggagcggagggaggaacgagagggggaacggggcagggggaggggaggggagagagaaggggaaggaagaggagaggaaggaggaaaggaaagcacgggggggagggg

SEQ ID NO: 511505 - DNA, 136 bp, Homo sapiens
aaaaaaaaaaaaaaaaaattttaaatagcctcccaccaatacccctggatggggggcagggccccgggagccagggctgggatctcgtggggtgtggctggggcctggggaggggccacggaatgtacaggtctgg

SEQ ID NO: 511506 - DNA, 1266 bp, Homo sapiens
tgctgcctggccctccgcctgccgcgccctgcctacaaggccctgagggatgactgcggagggtgagtgcgcggtggtgctcggcttgacctgttggccctgctggccggcgccctagcgctacctcccttcgcctccccgtgcctccccgcgcctccccgactacgcgtctccacggctcctcggttctggtacaagcccaaacgccaagaccgtgtggaagagcggatggaggtaactatctataagaagatgagcagagacgggaagcacatcacgacatcgttacacgacaccgaaggtgagcgtgagagagggaaggagcaatgagaaaacattaagaaatcagagacatggaagaaacgaaaataatacaacaacaaaccagagagaacacaaaaaacacagaacaagggcgaagagaaagagaaaaacaaaaagtaaaacagaataacatagacagagacaaacagagaacacagaaggcatagaaaacaaaacacacaatagaaacaatacaaataggacaacaagactagcaatgacagaagaaagaaagacataaaaacaatgagaaaaacaaagacaccaaacaaaaaaaaagaaacaaagaaaaagaaacagatagaaaaaaaggacaagaaaaagccaaacaaacaaaaacaaaaacaagaaaaaaaaaaaaaacaacaaaagaaaaaacaaccaaaaagaaaaaaaacaacaacaaaaaagactaaacaaaaagaaaaaaacaaaaaaagaaaacaaacgaagaaagccaaaccaaaaaacaaaaagacaagaacaaaaacaaccatcaagcaacaaaaataaaaaaagacacagaacaaaaaggaccgaaaacaacaaaaccaaacaccgcaaacaaaagatgaaaatagaaaaagaacagacaacaacaaaaaaaaaaaacaaaaaaaaaacaaaaaacacacaaaagaaaaaaagcacaaacaagaaaaagaaaaacagcagaacaagaaaaaaaaaacaaaaaaacgaacaaagaaggacaaaaagagaaacaaaaacaaaaaaagaagacaacacaaacaagcaacaaaccaaaacaaagaaaacagagaacaaaacaaaccaaacaaaaaagaagaaaagcaaaaaaaacaacgaagaagaacgacaacaacagaaagaaaaacgaacaccagaaaacaacaagacaaagaaacaaaaaacacagacaaaggaaacaaaagaaaaaacaaaaagaaacagcacaac

SEQ ID NO: 511507 - DNA, 226 bp, Homo sapiens
agtactgccccatatagtaccatccatattctcctttccttggtttttcttttgattggatacggattctggctcagtcacccaagcgggagtacagtggagtgatctcggctcacggcaacctcgcgcctccagggttcaagagattctggtgcctcagcctccccagcacctacgattacaggcaagtgccaccatgcctggccaatttttttgtattttaagt

SEQ ID NO: 511508 - DNA, 97 bp, Homo sapiens
cgatgctttggatgttgccaacaaaattggggtcatttaaactgagtccagcgccttattttgaatatatatatatatatttcttttccccataaaa

SEQ ID NO: 511509 - DNA, 338 bp, Homo sapiens
tgctgctccctctacagttcacgatcttctaattgcagcgatgagtgcacgagtgagatcaagatccagaagaagaggagatggtcaggaggctcccgatgtggttgccttccgtggctcccggtgaatctcagccagaagaacccacaactgacaatcaggatattgaacctggaccagaaaaaaaaggaacacctccgaatcgaagaacgtaaagtaaaaggggattgccaggaaatggatctggaaaagactcggaatgaacgtggagatggctctggatttaaaagaagaagaactcacctaatcctaagcattaagagggaggcagcaggggt

SEQ ID NO: 511510 - DNA, 154 bp, Homo sapiens
cacgagggcggtgtgcggccatccatggagcgctcttggcccagcgaagtgacaggttcatatgcatcgggaccggaccccgcagcttgtggtcaccatgggcttcacggggttcggggttcggtaataaagctcacatatttgctttggtagc

SEQ ID NO: 511511 - DNA, 511 bp, Homo sapiens
  misc_feature (2)..(2): n is a, c, g, or t
  misc_feature (4)..(4): n is a, c, g, or t
  misc_feature (97)..(97): n is a, c, g, or t
  misc_feature (106)..(106): n is a, c, g, or t
  misc_feature (143)..(143): n is a, c, g, or t
  misc_feature (156)..(156): n is a, c, g, or t
  misc_feature (166)..(166): n is a, c, g, or t
  misc_feature (184)..(184): n is a, c, g, or t
  misc_feature (189)..(189): n is a, c, g, or t
  misc_feature (203)..(203): n is a, c, g, or t
gngngcccgttggaaaccgggaaaaataaaggggtaaagccccctctttcttttttttttcattccaattgcgccgtgttttcatgatggacacagnggatatgcngtagatgttttatgccagttgacaagctgcttttgangctggtggttctntccttgacanacgcacttttatattacngttangccatatgacaaangctctgattcctagtgccaaggttcaatcagtgtatataactgaacacactcatccattgtgcttttgtttttttttatggtgcttaagtaagagcccatcctttgcagtcatccatgttgttacttaggcattttatcttggctcaaattgttgaagaatggtggcttgtttcatggtttttgtatttgtgtctaatgcacgttttaacatgatagacgcaatgcattgtgtagctagttttctggaaaagtcaatcttttaggaattgtttttcagatcttcaataaattttttctttaaatttcg

SEQ ID NO: 511512 - DNA, 1075 bp, Homo sapiens
gtaaatcttatcaacttaaagtttagttcctgccctcaaaaaagggtcacaatgtactagaggaagatacaagtacattgtgacccttttcgagggcaggaactaatcttatcaacttaagcttattaacaatacttgagcatccattaaatcattgatacttggctaagtcccccttcacggcctgtatcgtgatggaccccgtttttacatttctgtaacaatgtacaaagccattaccacacacaaaggaggacacacaaacaaacgcggcagacgagtatggccacgcgcacagtgggccacacacaagcccctgaccgatactgcactcacagcattcaagtattgcctaaccagccacaccatcttcgctgcaataccgaacaaagaccatctagaacgtagaatgtcctaccataaacaggcgacaccagaaaacccacctcacacggtgacgcccgcaacacagacacgggcgcggaccgcgcccgactcaagacacaccacgacccccgacagaacccgacgacacgaccgaccgacacgaaccacccacacctacacaccacccaacacacgcaccaacaccacgaccaacaccaaaaggccagcacaacacacaacactaaaacacgccctgacgcgagcacacccgacgccatccaccccaccaagcgaccaaaagcacgcgcatgaaacagacgtcgcggaagtagctcgtccgcaacaggaggcgcagcagcaacatacaagagcgcaaggaccggtcagactaaccaacagggcgagtcgcgtattcagcaacaagcagcagcgccgagacaaggtagcacagaagtgcagcccaatgacgccaaggggccagcgcgcacaagaccagaacccgaagtccccgacggccgacatacgaccccggccgcgctggctctaagcgccatacacgcgaaagcggcacgcaacaggaagccgagaaataagggccagcgccgcacccgcgcccaccaccacgcagtggagaagcccgagcgacgggcagacacgcattattgccctcgcagggaaacgacgcgac

SEQ ID NO: 511513 - DNA, 169 bp, Homo sapiens
ccgagagaaaagatatcacaggaaattcaggagttttgtttgtctttttttcttttaaggtggagttttgctcttgttgctcacgtctggaatgcaatggcacgatctcagctcactgcatcctccgcctcctgggttcaagcaagtctcctgcctcagcctccctagt

SEQ ID NO: 511514 - DNA, 1068 bp, Homo sapiens
  misc_feature (360)..(360): n is a, c, g, or t
gtaacaatcaatctgtaggctcttatctcattgatccacgaagtcctaggcctacccgacgcatctacctgcaggtcatatctactctcttcccaccttctactatgactctcacacaacactctcacagataattcatctactgcaatcaagcgcagatcataaatctcaccatcgaagactacatggactttagattctaaaatcatgaaaccctcaaacagcaaaatcaattatacactattaccagcaactagcttataatggacaagaacctgatgctctttatactagttatccttctcatatccatgccctcatgagctcacctatagtaagatccttccctctggacactcntgccgacagcgtcattttaacgagctacaaacaatccaaactgaatctcactaacaaggcttatcccaatggacctattcaccgcttttatggaaggggcgtcgacagttgtactttactaacgtgactctgcgtctccataccgaatctaaacctaaatgactctcttcagctctctaactatctctaacacaactacaggtctacgaggcttacgaaccagcctgtatgccctgaattataggtcattatgtaaaatcctgtcagtcgctatacattctcgatactgtatttgcccacttgtgatcggatcgaggtgatactcgacataacattacttgcaggccacctactcatgcacctaattggaagcgccaccctagcaaatatcaaccattaaacctttccctctacacttatcatcttcaccaattctagtttcttactggaactaatccgtagaaaatcgcgtgtcgccctttaattccaaggccttacggtttttcacgaacttctagtaagggcccttctaccttggcaccgaataacaccattagcggcgcgggagagaacacaacagaagtcgctcaaaaacatccttccgggggcgccgtgcgccccccggcgaaaaagcgtgttctcgtatacacaccaggggggtggggccggggggggcccccattatgtttaatgtcgccccgtgtggtg

SEQ ID NO: 511515 - DNA, 91 bp, Homo sapiens
ctcgacagtctggcacgaggaaactccgaggacagagggctaaatccatgaagtttgtggatggcctgatgatccacagcagaccttacta

SEQ ID NO: 511516 - DNA, 929 bp, Homo sapiens
  misc_feature (928)..(928): n is a, c, g, or t
gaatggagtgagacctaacccaaactgtttataattatggtagttattagaatggaccttatgtgtctgtctaaaccagaagccttactgtagtttgttttttttaatgagatcctattgaaaatttattagtgaccagaaattttgagacccgtgtttaaaaaaaaaaaaaactttagccaacgtaccaggggctcattaccgtggtagttcatagctgctggggaggatccacttgtgagcccaggagttggaggccaaaaattaaccttcccggggattgccacgtactattctcccagaatttgtcattggaatcaaacaggtctctcattaatattggactgggtaaatggacttctttggttaagtccacacattttgtccataaatcctttcccctgtgaaaaaactcagaataaatattattcccgaggataggatgtgccatttgtggtgacaaactattttcttgaatccggtaagtaaatttgtttcacaggcgtgagtattcccaagttaactccaaggccttgcttatctggaaaaagcaaagttcctactgaggaaaggacccaatgtctgaatggtaaatacatctggtttaggccctaggataagtacctggcttattcgaaggcattcccggtaagtctgggggcaccgggtcgactaggcaccgcggggtcgaaccattttatcgcgtaactcggatctggaatcccttaaggactggccccgtgaacctcctaccagatttaggtcctggattctaatacgaagaggacggctatgccgcaatgacggctcttggggaggtacaggtggacacaccgtcaatcacagagaccgtacaggaccggcaaacaggcacggctgagaacacacacagaacggtactgaaacagtatacagtggagtgctagcng

SEQ ID NO: 511517 - DNA, 606 bp, Homo sapiens
  misc_feature (603)..(603): n is a, c, g, or t
agacagatgaggcgagaggaggaggaggaggaggagaaggctctgggctcctctacaaaaaaaaaaaaaaaaaaaaaaaaaaaaaatttggggggcgggcctggggccccggaaaaggttttgctaagacaccattggcggtgagggagcgggggggccccaagtgaggtaagagggaacacgtggggccaaagagcgggttccccaagaggaagaacgcggggccagaggaacaagaggggcggggatctctcccaaccaaatataaaaaaggccgcgggggggacaacgcggagagggttccgggagaacaaactcccagagagaggggagtccgaggagaggctcatatacgagggggactttatcacaagagaggggagtcccaagaggggaagagcctcgcgagatctatctaaaaaaatttaaagcgccccgccgcgcgccgcgggggtgtgtccgaacgagaggaatatggagaggggacagaaaaaaaccacacaatcaaaaaaaaaagagaagcaaaaatcaagggagaagtgaggaagaagaagaaaaaagagaaaaaacgaacacgaggaacaaggaggagagagaaaaacnagc

SEQ ID NO: 511518 - DNA, 384 bp, Homo sapiens
ccccctgcatactatcactctgctattcaataccattatcggtataatgcatagttgtgagatcttatttatacatttacttaacagtgtccttcactgctcctaggtctactttgcagtattatataattctgcgctttgattaaagggtgtggttggcactgacgtatagtttggtctgcaggaactatgttcctcaagatatgagtatacttaagaagtcttctcttgaaccattacatcacttaactacagatacttattatcagtcatcatccaattcaggatggcaatatatagtatagttctgttagttatatccacttaccacaggcagagagcacaaatgaattattaatcagtttgtatcttgatgcactgtgc

SEQ ID NO: 511519 - DNA, 185 bp, Homo sapiens
ctagctactttattacatattcccaccacgataacgactcctttaattaaactaaaaaccatgcaggattcctgaagagggtggcaagaaaacgaaaggaaaagtcaaagactgcaggacagtgtgggggagggaactcagcgaactcgtcgttgacatggtgctcattgaacgtttgctaggca

SEQ ID NO: 511520 - DNA, 678 bp, Homo sapiens
agcgggcgcccgggaggcgccggagcccagcgggtggcggtaaggccgcctccgcggggctgtgggaagcttgggctgtcccaggaccgtcagtctcctcctctgaccctccctttccccttgtgtgtagggccgccgtcccaccccgcacctcgctcggagtccaggggcggtccctcgtgtcccctccggagcctgctgcgactccacgtcgcccctaccagggactccagcgcacccagggaaagtctccgagcaggcccgcccaggagccagatcgcaggcgcctggaagaagcatgtccggcaactactggtcatgccaggcacagactgcggcccaagaggagctgctgtgtgaatcatctgtgaatgtagggaagaggaatgccagagctgccggctgacagattacccaaccaagagaacatctgcaggatggactttctggtcctcttcttgtgctacctggcttcggtgctgatgggtctagttcttatctgacgtcgtgctcgaaaatccataggttgataaggcctggccaggggaggagcacagatatggcaccgggtgataattccagaaggtcttcagagagccatgcatggattgcttgcattacctattgcatacgagaaagcacaccttcagtgtcctgcacctggtctagcaagggatg

SEQ ID NO: 511521 - DNA, 1729 bp, Homo sapiens
ctgggttctgagccggagtggtcggtgggtgggatggaggcgacttggagcagcacttggaagacacaatgaagaatccctccatagttggcagtccatgtgcacagcattcaccaaggcacttcacatctgggttgccagcgggcacccgtgtcaagcatgcagccatgctggcagtgatcatctgttctcagccccagcaagcagacataagctcaaccatcggcacccccactggcatattcctgtgtgtgtgtctcagacatccagcatcaatgggcaacaattcatgcatcccagcaaaccacgataggcatccacaggatgcgcccagtgcaacaacacatgagcctctatgcatgcgtccatcatctgtatcttacacgacacggcctcgatcactacggaccactgagaactcactaccactactgattacatataaccttactacgacaactacctacaacgttgccacgatacgatagacgagccacactatacactattaattggtgacaattaacgagcaacctatatactccatgtctctacgtcttgtaacaccgaccggtacccacactcacgcgccattactcgtacacattgacctacatagtgaggagacccggccgccatacttacacacgcactaactcacagatcaacagacaacacgcgtactgcactggatacaagcagacacaggcacgaccccgcgctcccacgtgatccaccccatcaacggcacaacctacctcagacacactttagctgggacctcgtcaaccttttcccaccaatcacaacaatccgtgggctcatggcggaaggagacacaaaaaccacaacagacaagcgaacacacacaacagaaacgcacagaccacaacgagagcaacacgacccacgacgacacgaggagcgaggccccgcacaagcaaaccaccgacacagcagtcgcagccacaaaccacgagcgcgggcacaaacacaccggagaaccaacatctaaacaccgacaccaaacccagagaacacgccaacagcaacacatgactcaaagaagaagaaaaaaaaaacagcagggacacaaaaccacacgaacgcaccgagtgaacacaaacaccacaaagaaagacagaagcgagcagacaaacaaagtcaacaggacaccaaccacaaccaaaacaaccagaagcacaaaaaaacaccagaagaaagagatagaataggaaaacgacacaacaacacaaaaagagaaaagaaagcgccgaaaaacacaaaaaaagaacgcaacagaacacaaagacagacaacaaaaacgaaacacaggcgggacaacaaaaaacctaacacacacgaaacacaaacaacgaaccgagagacacgaagagaaaagagaagaaaaacaacaagagaaacacaaggcaaaacaccacgcgagcgccaaggacatagtgagagcacgaggaaagccgagcaggccgcacagcacaagagtcgagcacagacgaactgcgagccgaggcaggagagcgacgagaagcgagagacacgatcacagacgaaagcgcagaagaagaacgacagaggaagaaggaaaaaggcagaagacaacgacgacgcacaacgcggagaacagaagcgagacggagacgagggggaccacaagacggagagacagccgagatagagcccgaacgacaaggacagaaagcagaggaag

SEQ ID NO: 511522 - DNA, 442 bp, Homo sapiens
  misc_feature (17)..(18): n is a, c, g, or t
  misc_feature (316)..(316): n is a, c, g, or t
  misc_feature (359)..(359): n is a, c, g, or t
  misc_feature (396)..(396): n is a, c, g, or t
  misc_feature (404)..(404): n is a, c, g, or t
  misc_feature (426)..(426): n is a, c, g, or t
ggtaaaaatctggcggnngattcgcgatcactatccgcgtcccgtagtgaagttctattgggttcaggcagaaattattgcgatggcaaccgacctggcggaatttattggtgcggcgatcggttttaaactcattcttggtgtttcgttgttgcagggcgcggtgctgacggggatcgcgactttcctgattttaatgctgcaacgtcgcgggcaaaaaccgctggagaaagtgattggcgggttactgttgtttgttgccgcggcttacattgtcgagttgattttctcccagcctaacctggcgcctggggtnaaaggaatggtgatcccgagtttacctacttcggaagcggtcnttcctgtgcagcaggcgtgttaaggggcgacgattanggccgcangttgattttatttggcactccntcgctcactcagcatt

SEQ ID NO: 511523 - DNA, 358 bp, Homo sapiens
ggacactggtgagatgcttacggtgcaagtatcctacggtctttttataatttcacagcccccactcagaggcagttactagagtccctgtttttcaacaagagccatgggtgacgggtgactcgtcatatttgccctaagtggtccaaagtggatgtcatatagtcacatctgtcacagagcaaaatcttttaaagtaactggcccttaaaaataagtatgtctggcacaggcacggtggctcatgcctgtaatcccaggacttagggaaggcggaggtcaagagttcgagacgaggcggaggttagcctgatgaacgcggtgaaagctcgtctgtagtaagaaatatagaaaaaat

SEQ ID NO: 511524 - DNA, 193 bp, Homo sapiens
tcagtagcgagctgcatcggtatatgcaaacggacatctgagttagcgacagcctcaggaaagtggtgtgtctggggctgtccacagggacgagtgcagctgggaaagggcggtgctgctcagccaggtcgggctgcgctttcgagaccttgctctgaataggcccctatgtgaggtaactgggttgagtccg

SEQ ID NO: 511525 - DNA, 673 bp, Homo sapiens
  misc_feature (9)..(9): n is a, c, g, or t
  misc_feature (13)..(13): n is a, c, g, or t
  misc_feature (15)..(15): n is a, c, g, or t
  misc_feature (157)..(157): n is a, c, g, or t
  misc_feature (162)..(162): n is a, c, g, or t
  misc_feature (179)..(179): n is a, c, g, or t
  misc_feature (194)..(194): n is a, c, g, or t
  misc_feature (207)..(207): n is a, c, g, or t
  misc_feature (213)..(213): n is a, c, g, or t
  misc_feature (217)..(217): n is a, c, g, or t
  misc_feature (233)..(233): n is a, c, g, or t
  misc_feature (245)..(245): n is a, c, g, or t
  misc_feature (251)..(251): n is a, c, g, or t
  misc_feature (257)..(257): n is a, c, g, or t
  misc_feature (268)..(269): n is a, c, g, or t
  misc_feature (277)..(278): n is a, c, g, or t
  misc_feature (284)..(284): n is a, c, g, or t
  misc_feature (307)..(308): n is a, c, g, or t
  misc_feature (311)..(311): n is a, c, g, or t
  misc_feature (314)..(314): n is a, c, g, or t
  misc_feature (326)..(326): n is a, c, g, or t
  misc_feature (330)..(330): n is a, c, g, or t
  misc_feature (333)..(333): n is a, c, g, or t
  misc_feature (343)..(343): n is a, c, g, or t
  misc_feature (349)..(349): n is a, c, g, or t
  misc_feature (363)..(363): n is a, c, g, or t
  misc_feature (375)..(375): n is a, c, g, or t
  misc_feature (382)..(382): n is a, c, g, or t
  misc_feature (384)..(384): n is a, c, g, or t
  misc_feature (388)..(388): n is a, c, g, or t
  misc_feature (393)..(394): n is a, c, g, or t
  misc_feature (400)..(400): n is a, c, g, or t
  misc_feature (405)..(405): n is a, c, g, or t
  misc_feature (407)..(407): n is a, c, g, or t
  misc_feature (412)..(414): n is a, c, g, or t
  misc_feature (428)..(428): n is a, c, g, or t
  misc_feature (431)..(431): n is a, c, g, or t
  misc_feature (434)..(434): n is a, c, g, or t
  misc_feature (438)..(438): n is a, c, g, or t
  misc_feature (448)..(448): n is a, c, g, or t
  misc_feature (451)..(451): n is a, c, g, or t
  misc_feature (463)..(464): n is a, c, g, or t
  misc_feature (566)..(567): n is a, c, g, or t
  misc_feature (581)..(581): n is a, c, g, or t
  misc_feature (584)..(584): n is a, c, g, or t
  misc_feature (644)..(644): n is a, c, g, or t
acgcgcctncgtntncgcgctcgcggttctggcgctgctggaaaggaataatgctgacagcatgtctgcacattccatgctctgtgaacgaatcgccatagccaaggaactgatcaagagagcagaatcactttctagatcaagaaaagagtggcanaaaangtggtgcaaagctgtgnagcaaattgaagganagaattaaaattnttgaanaaantaaaagctggagaaantagctattaaanagtctnatttanagagcaataanntaaaaaanntgaaancaattatggaataaaaaaaaaanntgnaanaagattgtaaangttnttnatgatctttngattanaaagataacttaanaaaaaaaaaaancattgtngnaganaaaannaaaaanaatantnaaaannnggatagaaaaaaanaanaangaangctagaaaanctnaaaaaaataatnnctgggcaggggccaatatggtgacaaaagcatcattgagcaggctgaagacttcctccaggccagtcaccagcagccagtgcagtatagcaaccctcacatnntctttgcattttanaanagtgtctccagccccatggcagagaagctgaaagaaatgggcatatctgtgagaggaganatagtagcagtcaacgctctgttagatca

SEQ ID NO: 511526 - DNA, 584 bp, Homo sapiens
  misc_feature (204)..(204): n is a, c, g, or t
  misc_feature (254)..(254): n is a, c, g, or t
  misc_feature (296)..(296): n is a, c, g, or t
  misc_feature (330)..(330): n is a, c, g, or t
  misc_feature (388)..(388): n is a, c, g, or t
atacgttgcggcaatcaacgtattccggatcttcaatgtagcaaatggcttcaaatgacgcaggtagaggtgccgttcatcaaacaagaagtctgtcccgtgctcttttggcgtgatgggataatcatggctttcaccaatgacttcaataccagataccgccatttcatagccaaatgatgatcgcgcatcttcacggatttnccctgtcacgtacagacttgtttcttgctttaaccctttagccagttcanaaactgattccggcacatctgctttggctaccacagcttganagaatgctgtcccatcgcgtaattgcaaaaaggncaacttacctgaaccgcgcttttgacgagccaagctccaatcttgaccgtttggccancatagttttagcatcgataatttgaattgtgggaatatcttgtgacatgatcatatacacgtggtttgttaccgaccacctgcttctctctattttaattaatgtattgtgaaaaattcagttaaacgacgacagcttcgtccaaactgcttggtctttggcatagccatccgcaaatacctggcatccgaacctt

SEQ ID NO: 511527 - DNA, 210 bp, Homo sapiens
cgtcgataagcatctggtcatgtgtctatttcctcaagcccagactcagcttccaagtgccttactcagcacaggtctagacctcaagagcacctcataaatatgtgtgggttgatggatctgatgccaggagtactctagaactatacaactcagtatgagtcaaggtagcccactaaagttgtagaaaatcagtatcctaaaagaatg

SEQ ID NO: 511528 - DNA, 920 bp, Homo sapiens
  misc_feature (30)..(30): n is a, c, g, or t
  misc_feature (67)..(67): n is a, c, g, or t
  misc_feature (69)..(69): n is a, c, g, or t
  misc_feature (75)..(75): n is a, c, g, or t
  misc_feature (81)..(81): n is a, c, g, or t
  misc_feature (100)..(101): n is a, c, g, or t
  misc_feature (103)..(103): n is a, c, g, or t
  misc_feature (144)..(144): n is a, c, g, or t
  misc_feature (157)..(157): n is a, c, g, or t
  misc_feature (164)..(164): n is a, c, g, or t
  misc_feature (173)..(173): n is a, c, g, or t
  misc_feature (197)..(197): n is a, c, g, or t
  misc_feature (226)..(228): n is a, c, g, or t
  misc_feature (231)..(231): n is a, c, g, or t
  misc_feature (246)..(246): n is a, c, g, or t
  misc_feature (253)..(253): n is a, c, g, or t
  misc_feature (264)..(264): n is a, c, g, or t
  misc_feature (266)..(266): n is a, c, g, or t
  misc_feature (269)..(269): n is a, c, g, or t
  misc_feature (286)..(286): n is a, c, g, or t
  misc_feature (289)..(289): n is a, c, g, or t
  misc_feature (301)..(301): n is a, c, g, or t
  misc_feature (310)..(310): n is a, c, g, or t
  misc_feature (317)..(317): n is a, c, g, or t
  misc_feature (319)..(321): n is a, c, g, or t
  misc_feature (324)..(325): n is a, c, g, or t
  misc_feature (330)..(332): n is a, c, g, or t
  misc_feature (349)..(349): n is a, c, g, or t
  misc_feature (354)..(354): n is a, c, g, or t
  misc_feature (367)..(367): n is a, c, g, or t
  misc_feature (381)..(381): n is a, c, g, or t
  misc_feature (389)..(389): n is a, c, g, or t
  misc_feature (400)..(400): n is a, c, g, or t
  misc_feature (419)..(419): n is a, c, g, or t
  misc_feature (429)..(429): n is a, c, g, or t
  misc_feature (512)..(512): n is a, c, g, or t
  misc_feature (538)..(538): n is a, c, g, or t
  misc_feature (552)..(552): n is a, c, g, or t
  misc_feature (825)..(825): n is a, c, g, or t
  misc_feature (893)..(893): n is a, c, g, or t
aaaagtgatctataatacccaagttctatnttcaactaccagttaaacaaggaaaacattttctgtntnattctnttttanaaccagtataaacccagannantcaagatctgattccttttccacacatctgctaggtcagtnaactatcaaacangtatctngtcattttnacatactccttatattcctatttngtacaatctctatatcctatactatcttnnnganagctaaatatctganagagggnggggatcccangngcnagaggggccccacagangcngtaacccaagtnatcgtaagnccatagncnnnccnncccannncaaccatggcgtcccanccccncataaattctccnccattacccttgtncgtctgtncattagtagtnaggtctcgtcaaatgacantcaaaaatcnttgtattatccctagttgcaaatgttccaaataagacagtgccataactacacgacaaaaacaaaaaaaaaatcatataagtnggggtagttcccctaatccaacaacncaagtctgtttccnttgagaacattatactattggctctagtctccaaaccaataaaaaactaaaacttgtttccaagactgggaggtaaagtaggcttataaaacaatacagcaaaagaaagccaagtggcccaattgtttccagtgtgcttgccatcttagcatggttactttccagatgtcactcataagttttattctacaactaaactgtttgtgggataagccaccaccaaaaaatgtttcacttactgacagacacttcactagatacagctaccacttntatccatcatttttataattcaacttaagttctaaattgaagagttgtccccatgactttagctaaanaaattgaaagccaaagctgtataatct

SEQ ID NO: 511529 - DNA, 274 bp, Homo sapiens
gcaactgccggcgaagcgatcggcaatagtgttcccggccaaagcttggtacgaccttggatggccgctgggaccgtcggctgggacgggcagtgcacagcccgacagcagcatcgatctgcacggccacacgttccatacggcctatcaagtccttgatgcaggcctggcccgggcaattgcgcgcggtgatcggatcttgctgctgatcaccggcaagccgccgcgacccgaaagcgagcggccgcaccaaagagggcgcatccgcgactca

SEQ ID NO: 511530 - DNA, 129 bp, Homo sapiens
tttgcgctctgaatccgctatttctccgtgactccacttggtcattgagccaagagatcagctcttcttctggagatttacgcacaggaacgggcaatttacacttgcgtctatcgttatccgattcca

SEQ ID NO: 511531 - DNA, 404 bp, Homo sapiens
tgagttcttacactccagagagtagcgtcggcagtacaattactgtgcaaaatctcttgggaacaactttagcatttacatcattggaggactcacacaggaatagcaatgagcctggcagatccgtggcagagctttcaggcactaatccgtccaattcatcagcgagcagtgccttgatgacgaagaaggtcgaaaagtcgtccagctcttctccatatcgaatgtctcagtatccacagtgatatatagacttcaagcgctgcaggagttcagggtctattcatattcccatttgagcattaatcacattatagtaggagtttacaggtacggacatcttgcgccccagtccaagcattgattcggtacgtatctattgagtgaataaagctacaggcaat

SEQ ID NO: 511532 - DNA, 477 bp, Homo sapiens
  misc_feature (38)..(38): n is a, c, g, or t
aaaaaaagctgtttccctttgaaaaaaactttttgcancctcagaagagaaagaacttccttcaaacctgaattgggttacatataaaaagtcaacagactccatactcagtaagtgaaaatattaaatctttttccccctaaaattgggactgggaaagattctcccattcttggctgtgtgcaatggctcatgcctgtaatcccaacactttgggaggccgaggctggtggatcacaaggtcaggagatcgagatcatcttggccatcatggtgaaaccccgtctctactaaaaatacaaaaaattagcccaggtgtggtggcgtgtgcctgcagtctcagctactcaggaggctgaggcaggcaaatcacttgaagccaggaggcagaggttgcagtgagccaagatcatgccactgaactccagcgtgggtgacagagtgaaactccattgccttgagagtttccaggggctg

SEQ ID NO: 511533 - DNA, 621 bp, Homo sapiens
ggtgaccgactactggcaatgcctcctaatgaaacttgtaccgtgaaaggaatcactctgcatgatgaacctgtcgactgggcggcagaggcgatcatgttagtcttacttgggtctgggatggatatcatcaaaatcaagtgtggtgctggcataatttggtggccccaaagtacccattaaacgcttgcactcgtttcagagcccgaatcctcatctttaatattgaagattcctatcaactaagaggatttaccgtgtgcttgttacactacccaaaacctgtcagtgaacccgccgttattaaacgattgattagtgtcttaaacaaaagcacgggtgaacgtcacaaaggaaaaagcctaagttttgcgactaagaggccagaatgcattggtagaagctacaggacacaaagacccaatagctcttgacgctaattaataagagacttcaaagagctggggaggttcatgctacgtaacgggtggttctacaatagctgctggtgtgtcactgagataacaagaatgatggggtcagaatttctaaccacgtttcttggatacagtgaaactagctaaaccctcatgttcacccaaggaaatggcccggctacaa

SEQ ID NO: 511534 - DNA, 440 bp, Homo sapiens
  misc_feature (6)..(6): n is a, c, g, or t
aatagnccccagcctccttgggaggcctgaccgtgggaggaatccgtttgagtcctgggaagttgaggccttcagtgaacctatgatccatgcccatgacactcccagactgggcaacagaacaagacccctgtttcaaaaaaataaataaataaaattttaaaataaactatttttatttaatactcaaagttcaaatcacaaaagtactgaggatcaaacataagtaacactagcaaagccagccaatggcaggcaacaggcagttgcaagccacctctcaccatataactctgagatggagcaactgattgagagaaagtcctctaaccacagccatctacttgtcatagtttgtaacactgatcttccacacattttgtgtatcttccatgaactcactgtcagtgctgctcaatgagataaactaagtactaagg

SEQ ID NO: 511535 - DNA, 437 bp, Homo sapiens
gggagcgcacattcgggcaggagagaaagcctaaataagcaatagatgattagttcttcaataacagtggtgacaaggtctatggataatatttggtaatcactaatattcatataaaccgggcacaaccatggattggagtgcattaactcacacttcatgagcaggcacggccgtcatctcatttaatagatgaggaaacggaggcacagaggggctgagagaccgggcctagtgacagagccaggattcaaagccatagatcagggccccgggttatgtaggtcatgacggcatctgtccaggggagatggggtacggtgaggctcgtcaggggaagccgggttgggtctcaggtcagggaaggcagatgtgaggaaatgacttttagggtacaagtcggagggtggagtgggtaggtggggaagaccattcca

SEQ ID NO: 511536 - DNA, 289 bp, Homo sapiens
gggtttgggggggggggggggttttttttttcctgcccccccatccccccccagggggtttggggggggggggaaccccccccaaaacaaccacccttttttttatggggggggggggagagggtggggggtgtttttcccccccccccttttttcccccggcgggggttttttgggggggcccctttccccctttttggccctgggggccccccccccccccccccttggcccccccttttttttcccctttttgattaaaaatttttttccccttttgggtttttta

SEQ ID NO: 511537 - DNA, 659 bp, Homo sapiens
  misc_feature (81)..(81): n is a, c, g, or t
  misc_feature (114)..(114): n is a, c, g, or t
  misc_feature (138)..(138): n is a, c, g, or t
  misc_feature (151)..(151): n is a, c, g, or t
  misc_feature (154)..(154): n is a, c, g, or t
  misc_feature (159)..(159): n is a, c, g, or t
  misc_feature (161)..(162): n is a, c, g, or t
  misc_feature (183)..(183): n is a, c, g, or t
  misc_feature (186)..(186): n is a, c, g, or t
  misc_feature (212)..(212): n is a, c, g, or t
  misc_feature (222)..(222): n is a, c, g, or t
  misc_feature (232)..(232): n is a, c, g, or t
  misc_feature (293)..(293): n is a, c, g, or t
  misc_feature (315)..(315): n is a, c, g, or t
  misc_feature (319)..(320): n is a, c, g, or t
  misc_feature (340)..(341): n is a, c, g, or t
  misc_feature (370)..(370): n is a, c, g, or t
  misc_feature (425)..(428): n is a, c, g, or t
  misc_feature (435)..(436): n is a, c, g, or t
  misc_feature (439)..(439): n is a, c, g, or t
  misc_feature (441)..(441): n is a, c, g, or t
  misc_feature (448)..(448): n is a, c, g, or t
  misc_feature (451)..(451): n is a, c, g, or t
gggccgaggaacgccagccgttcacgcgttcggtcctccttggctgactcaccgccctcgccgccgcaccatggacgcccncaggcaggtggtcaactttgggcctggtcccgncaagctgccgcactcagtgttgtnagagatacaaaanggnattantnnagagctacaaaggagtcggcnttngtgttcttgaaatgagtcacaggtcntcagatttgncaagattatnaacaatacagagaatcttgtgcgggaatgctagctgttccagacaactataaggtgatttntctgcaaggaggtgggtgcggncagnncagtgctgtccccttaaacnntcattggcttgaaagcaggaaggtgtgcngactatgtggtgacaggagcttggtcagctaaggccgcagaagaagccaagaagnnnngggactnnacnanatccgtncancctacacttgggagttatacaaaaacattccagatcctgagacacctggaacctcaacccagatgcctcctacgatgtattattgcgcaaactgagacggttgcatggatgatggagtttcgacgtttatacccgatgtcaagggagcagctactggatttgtgacatgtcctcaaacttcgtgtccaagccagtgggatgtttccaa

SEQ ID NO: 511538 - DNA, 182 bp, Homo sapiens
gcgcagtgcacagtatttgagttgtacatgtcggcggatgtaggtatgatgggcagtgaggctcgcatatgatctaggctatatatacgagatacgtagcggtaatgtaaaacgtactctagaatatagtagatggaaattaaagcgtgatatcgatcgcgcgcagatctgtcatgatgatc

SEQ ID NO: 511539 - DNA, 421 bp, Homo sapiens
gacgcatcaagtatccggggagcccagttagcgagggagagaaatccacagagcctctcttgctctctccagtccaaaaatccaacgtaggcccaagaaggctctggcatgtgccaggcacttgctgatcttttggtcttagggggatgcctctaagccatttgatcccgttctaggaacaaaaaaaggcagtggtgacaatcgctccttttatcatctccctccagcttcccaggatggtccccttttccctgttctctctagcctaacctcggttatgggaaatttcaggttttccattccaaaggacatccttctaggctgcctcataagaaaacctacgaacctcaggcctcagtcaagatatccgtgccttgtcttgttttacaattcaatctggccacaatacgaattggataat

SEQ ID NO: 511540 - DNA, 933 bp, Homo sapiens
tatcctcattttcttccgtcttctcaaggggatattccccggtgactcgaaagcaatcttaaacccttgggaccaattgtcatcttcgccccaggaggatgatttgccccatgggatgccttttattgccggcccctgggtggatggaaacccgccctattgtgtggaaactatgactgtagcttcccacaggtttccaaacttgcgggttttctcgtgacttccctggagcccgggggctccatccttggttatgcagttatttcacatcgatgtactccagtagaacactgaagcaagcgacgcggcgatcatttagacgacaagagcatgtcctcgtccgtggaataactgttcccggggaaccccttcggacgtgagggcgcaatgcctcgctaccgctgcgttgcaacatgctgcgttcaaacgaaatatccccagtctcttcatcttgtccggagagggctcaacagagtgcccattgatggtgtgtgtgccatggaatcttaagagaccggagcccatgacttcgcactcattggttgttctccgtcagcacgagaccgacgctcctgggacatgcagatcacgaggtataatgacgcgatagtaacggcaaagtctgcttgtaaccatcagacatcgtccgggtagatatctcttcacgcggtgattagccgtgaaggactctctagcctgatagactctgtggtggcaatcacatgaacacgctgaactggtggctcagcttcatgcactcaccggtgccggtcaacatcctagtgtccaggtataaggccaaaagaatgctctgtttcataacaaactccacaaatagaccctcgagattcaccgtcttacagacataggcctgtcttccacccctcgtctgacccgtatagtgtgccagcaggacctgggtcggtctagtta

SEQ ID NO: 511541 - DNA, 157 bp, Homo sapiens
tcctcggaagtcgttgtgcttcctccagctgtgagaataacgtcctaatctccagagaaatgggggggggatggaggaggcttattgcttcccgagcattctggggggaacatgatccatacccctgtgcctcctgtccaccgcatctgcccttgct

SEQ ID NO: 511542 - DNA, 316 bp, Homo sapiens
ctacaagcaatgcttcttgaaaaaggtgtaagctgtcagattagtttctgaaatttgcatttgcctgtctcccgcttgaaaataacaatgtatattaacttattagagataataagtttgaaggttgaaggttggtttgaaggttggacaggaagggtacaacagatctgtttgcatttagagaaacacttccacagatcaaacattaagaaatactggcttaaagtgttgttttacgaataactttgcctcctttcttttcctgctttgcctaacttagactatgaatgactctgacattaatatctcccccttc

SEQ ID NO: 511543 - DNA, 517 bp, Homo sapiens
gatagtagtgagaacctgccctctctgtctttctgtgcccggctcatttgatgttacatcatgacctccagtgtctgtcattttgctgccaatggcaggattccacttttttttttaattatggctgtgtttgttaataatgagtgtcaacttgattggattgaaggatgcaacgtactcatgctaggtgtatctgtgatggtgttgccaaaggacataaacatttgagtcaataggctggggaaggcccacccatacttaatctggtgcgcacgatctaatcagttgccagcccatataaagcaggcagaaagacgtgaaaaggggagagtggcttagcttctccacctacatctctctcccatgcctgatgcttcctgccctcttaacattggatttcaagttcttctgttttgacccctggactagctgcccttcctcctcatgcttgcaaacagtgtattttgggactttgtgattgtgtaagttaatacttaataaacttctatgtgtgtga

SEQ ID NO: 511544 - DNA, 195 bp, Homo sapiens
atctgatgagcatgctgtggtccgcaacacccagatcgacaactacctgggggtctgaggagcgaagtctggcccgaaaaatgcccttcgtccgtggccagagcttctcagtgtggatcttgtgtgaagctcagtgcctgacaggaggatggacttggatgggtacagcccccccagaatggtggtgataaaagg

SEQ ID NO: 511545 - DNA, 2859 bp, Homo sapiens
gggagtagagcgggcgctgtgggagggaacgccagagcgaggtggtgaggagagctggttgcgtgagtctcctcagctctgcttaccggtgcgactagcggcagcgacgcggctaaaagcgaaggggcgagtgcgagtcccctgagctgtacgaacgcggtcgccatggaccgcccagatgaggggcctccggccaagacccgccgcctgagcagctccgagtctccacagcgcgacccgcccccgccgccgccgccgccgccgctcctccgactgccgctgcctccaccccagcagcgcccgaggctccaggaggaaacggaggcggcacaggtgctggccgatatgaggggggtgggactgggccccgcgctgcccccgccgcctccctatgtcattctcgaggagggggggatccgcgcatacttcacgctcggtgctgagtgtcccggctgggattctaccatcgagtcggggtatggggaggcgcccccgcccacggagagcctggaagcactccccactcctgaggcctcgggggggagcctggaaatcgattttcaggttgtacagtcgagcagttttggtggagagggggccctagaaacctgtagcgcagtggggtgggcgccccagaggttagttgacccgaagagcaaggaagaggcgatcatcatagtggaggatgaggatgaggatgagcgggagagtatgaggagcagcaggaggcggcggcggcggcggaggaggaagcagaggaaggtgaagagggaaagcagagagagaaatgccgagaggatggagagcatcctgcaggcactggaggatattcagctggatctggaggcagtgaacatcaaggcaggcaaagccttcctgcgtctcaagcgcaagttcatccagatgcgaagacccttcctggagcgcagagacctcatcatccagcatatcccaggcttctgggtcaaagcattcctcaaccaccccagaatttcaattttgatcaaccgacgtgatgaagacattttccgctacttgaccaatctgcaggtacaggatctcagacatatctccatgggctacaaaatgaagctgtacttccagactaacccctacttcacaaacatggtgattgtcaaggagttccagcgcaaccgctcaggccggctggtgtctcactcaaccccaatccgctggcaccggggccaggaaccccaggcccgtcgtcacgggaaccaggatgcgagccacagctttttcagctggttctcaaaccatagcctcccagaggctgacaggattgctgagattatcaagaatgatctgtgggttaaccctctacgctactacctgagagaaaggggctccaggataaagagaaagaagcaagaaatgaagaaacgtaaaaccaggggcagatgtgaggtggtgatcatggaagacgcccctgactattatgcagtggaagacattttcagcgagatctcagacattgatgagacaattcatgacatcaagatctctgacttcatggagaccaccgactacttcgagaccactgacaatgagataactgacatcaatgagaacatctgcgacagcgagaatcctgaccacaatgaggtccccaacaacgagaccactgataacaacgagagtgctgatgaccacgaaaccactgacaacaatgagagtgcagatgacaacaacgagaatcctgaagacaataacaagaacactgatgacaacgaagagaaccctaacaacaacgagaacacttacggcaacaacttcttcaaaggtggcttctggggcagccatggcaacaaccaggacagcagcgacagtgacaatgaagcagatgaggccagtgatgatgaagataatgatggcaacgaaggtgacaatgagggcagtgatgatgatggcaatgaaggtgacaatgaaggcagcgatgatgacgacagagacattgagtactatgagaaagttattgaagactttgacaaggatcaggctgactacgaggacgtgatagagatcatctcagacgaatcagtggaagaagagggcattgaggaaggcatccagcaagatgaggacatctatgaggaaggaaactatgaggaggaaggaagtgaagatgtctgggaagaaggggaagattcggacgactctgacctagaggatgtgcttcaggtcccaaacggttgggccaatccggggaagagggggaaaaccggataagggttttccccttttggggatcacctctctgtatcccccacccactatcccatttgccctcctcctcagctagggccacgcggccccacattgcacttctggggggtgaccgacttcgtacacgggtttaaagtttatttttatggtttagtcattgcagagttcttattttggggggagggaaagggggctagtccccttcttttggccctccgcccccgcaggcttctgtgtgctgctaactgtatttattgtgatgccttggtcagggcccctctacccacttctcccagtcagttgtggccccagcccctctccctgtgctgtgtggagtggacaccctgacccccgaagcggggagggccgctgtggccttcgtcacagccgcgcagtgcccatggaggcgctgctgccaccttcctctcccaagttctttctccatccctctcctcttcccgccgcgccgctagcccgcctcggtgtctatgcaaggccgcttcgccattgcggtattctttgcggtattcttgtccccgtcccccagaaggctcgcctctccccgtggaccctgttaatcccaataaaattctgagcaagttcaaaaaacacaaa

SEQ ID NO: 511546 - DNA, 272 bp, Homo sapiens
  misc_feature (2)..(3): n is a, c, g, or t
  misc_feature (5)..(5): n is a, c, g, or t
  misc_feature (53)..(54): n is a, c, g, or t
  misc_feature (57)..(57): n is a, c, g, or t
  misc_feature (63)..(63): n is a, c, g, or t
  misc_feature (75)..(75): n is a, c, g, or t
  misc_feature (104)..(105): n is a, c, g, or t
  misc_feature (126)..(126): n is a, c, g, or t
  misc_feature (130)..(130): n is a, c, g, or t
  misc_feature (139)..(139): n is a, c, g, or t
  misc_feature (164)..(164): n is a, c, g, or t
  misc_feature (194)..(194): n is a, c, g, or t
  misc_feature (214)..(214): n is a, c, g, or t
  misc_feature (237)..(237): n is a, c, g, or t
gnnanattgagaagcacaagcaaactggccgaagaacagttgagaattgttgnngcncaaagnaaagattcatgnaggaaaggatgaaactagaacaagaacgnncaacgtcaacaaaaagaggancaanaaattatcntgggcaaggggaagtcaggccaaantgtccttctcattaaaaacccaggattaanttgcaaactctgaacttttnacaaagaaaaatggaaaactttntatggtagcttcatgttgaagtggttttccgtttt

SEQ ID NO: 511547 - DNA, 2253 bp, Homo sapiens
tccccgctcctccgacggggtggattgagctggaaaccatggggacagatggcaggtatagagggtcatgcagtggaggatgaggatgaggatgagcgggagagtatgaggagcagcaggaggcggcggcggcggcggaggaggaagcagaggaaggtgaagagggaaagcagagagagaaatgccgagaggatggagagcatcctgcaggcactggaggatattcagctggatctggaggcagtgaacatcaaggcaggcaaagccttcctgcgtctcaagcgcaagttcatccagatgcgaagacccttcctggagcgcagagacctcatcatccagcatatcccaggcttctgggtcaaagcattcctcaaccaccccagaatttcaattttgatcaaccgacgtgatgaagacattttccgctacttgaccaatctgcaggtacaggatctcagacatatctccatgggctacaaaatgaagctgtacttccagactaacccctacttcacaaacatggtgattgtcaaggagttccagcgcaaccgctcaggccggctggtgtctcactcaaccccaatccgctggcaccggggccaggaaccccaggcccgtcgtcacgggaaccaggatgcgagccacagctttttcagctggttctcaaaccatagcctcccagaggctgacaggattgctgagattatcaagaatgatctgtgggttaaccctctacgctactacctgagagaaaggggctccaggataaagagaaagaagcaagaaatgaagaaacgtaaaaccaggggcagatgtgaggtggtgatcatggaagacgcccctgactattatgcagtggaagacattttcagcgagatctcagacattgatgagacaattcatgacatcaagatctctgacttcatggagaccaccgactacttcgagaccactgacaatgagataactgacatcaatgagaacatctgcgacagcgagaatcctgaccacaatgaggtccccaacaacgagaccactgataacaacgagagtgctgatgaccacgaaaccactgacaacaatgagagtgcagatgacaacaacgagaatcctgaagacaataacaagaacactgatgacaacgaagagaaccctaacaacaacgagaacacttacggcaacaacttcttcaaaggtggcttctggggcagccatggcaacaaccaggacagcagcgacagtgacaatgaagcagatgaggccagtgatgatgaagataatgatggcaacgaaggtgacaatgagggcagtgatgatgatggcaatgaaggtgacaatgaaggcagcgatgatgacgacagagacattgagtactatgagaaagttattgaagactttgacaaggatcaggctgactacgaggacgtgatagagatcatctcagacgaatcagtggaagaagagggcattgaggaaggcatccagcaagatgaggacatctatgaggaaggaaactatgaggaggaaggaagtgaagatgtctgggaagaaggggaagattcggacgactctgacctagaggatgtgcttcaggtcccaaacggttgggccaatccggggaagagggggaaaaccggataagggttttccccttttggggatcacctctctgtatcccccacccactatcccatttgccctcctcctcagctagggccacgcggccccacattgcacttctggggggtgaccgacttcgtacacgggtttaaagtttatttttatggtttagtcattgcagagttcttattttggggggagggaaagggggctagtccccttcttttggccctccgcccccgcaggcttctgtgtgctgctaactgtatttattgtgatgccttggtcagggcccctctacccacttctcccagtcagttgtggccccagcccctctccctgtgctgtgtggagtggacaccctgacccccgaagcggggagggccgctgtggccttcgtcacagccgcgcagtgcccatggaggcgctgctgccaccttcctctcccaagttctttctccatccctctcctcttcccgccgcgccgctagcccgcctcggtgtctatgcaaggccgcttcgccattgcggtattctttgcggtattcttgtccccgtcccccagaaggctcgcctctccccgtggaccctgttaatcccaataaaattctgagcaagttcaaaaaacacaaa

SEQ ID NO: 511548 - DNA, 2174 bp, Homo sapiens
ggtgactctataggatcggctctgtggggccttaaccctggaggcggcggcggcggcggaggaggaagcagaggaaggtgaagagggaaagcagagagagaaatgccgagaggatggagagcatcctgcaggcactggaggatattcagctggatctggaggcagtgaacatcaaggcaggcaaagccttcctgcgtctcaagcgcaagttcatccagatgcgaagacccttcctggagcgcagagacctcatcatccagcatatcccaggcttctgggtcaaagcattcctcaaccaccccagaatttcaattttgatcaaccgacgtgatgaagacattttccgctacttgaccaatctgcaggtacaggatctcagacatatctccatgggctacaaaatgaagctgtacttccagactaacccctacttcacaaacatggtgattgtcaaggagttccagcgcaaccgctcaggccggctggtgtctcactcaaccccaatccgctggcaccggggccaggaaccccaggcccgtcgtcacgggaaccaggatgcgagccacagctttttcagctggttctcaaaccatagcctcccagaggctgacaggattgctgagattatcaagaatgatctgtgggttaaccctctacgctactacctgagagaaaggggctccaggataaagagaaagaagcaagaaatgaagaaacgtaaaaccaggggcagatgtgaggtggtgatcatggaagacgcccctgactattatgcagtggaagacattttcagcgagatctcagacattgatgagacaattcatgacatcaagatctctgacttcatggagaccaccgactacttcgagaccactgacaatgagataactgacatcaatgagaacatctgcgacagcgagaatcctgaccacaatgaggtccccaacaacgagaccactgataacaacgagagtgctgatgaccacgaaaccactgacaacaatgagagtgcagatgacaacaacgagaatcctgaagacaataacaagaacactgatgacaacgaagagaaccctaacaacaacgagaacacttacggcaacaacttcttcaaaggtggcttctggggcagccatggcaacaaccaggacagcagcgacagtgacaatgaagcagatgaggccagtgatgatgaagataatgatggcaacgaaggtgacaatgagggcagtgatgatgatggcaatgaaggtgacaatgaaggcagcgatgatgacgacagagacattgagtactatgagaaagttattgaagactttgacaaggatcaggctgactacgaggacgtgatagagatcatctcagacgaatcagtggaagaagagggcattgaggaaggcatccagcaagatgaggacatctatgaggaaggaaactatgaggaggaaggaagtgaagatgtctgggaagaaggggaagattcggacgactctgacctagaggatgtgcttcaggtcccaaacggttgggccaatccggggaagagggggaaaaccggataagggttttccccttttggggatcacctctctgtatcccccacccactatcccatttgccctcctcctcagctagggccacgcggccccacattgcacttctggggggtgaccgacttcgtacacgggtttaaagtttatttttatggtttagtcattgcagagttcttattttggggggagggaaagggggctagtccccttcttttggccctccgcccccgcaggcttctgtgtgctgctaactgtatttattgtgatgccttggtcagggcccctctacccacttctcccagtcagttgtggccccagcccctctccctgtgctgtgtggagtggacaccctgacccccgaagcggggagggccgctgtggccttcgtcacagccgcgcagtgcccatggaggcgctgctgccaccttcctctcccaagttctttctccatccctctcctcttcccgccgcgccgctagcccgcctcggtgtctatgcaaggccgcttcgccattgcggtattctttgcggtattcttgtccccgtcccccagaaggctcgcctctccccgtggaccctgttaatcccaataaaattctgagcaagttcaaaaaacacaaa

SEQ ID NO: 511549 - DNA, 412 bp, Homo sapiens
ccaatctctcgcagctcaacaggtctgggcatctgtctcagagagcatgcagatattcttcatccctccacagtgaagagacacacactcgctggacatgacggaatgtgtcagagcgaatgtcatcttcacggctccgtccatattgctgctggtaggtttggcttatgcgctggatctcctcaggtgtctgggaggccaggatctcaattaggcagccctcatcagtgccggctcccttcatggcccttcgcagctcttgcacgtcatacagcaccgtgggcgtcatcatccccacaatcacctgctcgaagttgccactcagttctgacttcaggtcgtctatcaagtccctgccgatggtgctcttgtaggctggcctgatctcctggcgctgggcggtgttgcggta

SEQ ID NO: 511550 - DNA, 2196 bp, Homo sapiens
gtattcctgaagacaatacaagaacactgatgtacaacgaacagaaccctaacaacaacgaggaggcggcggcggcggcggaggaggaagcagaggaaggtgaagagggaaagcagagagagaaatgccgagaggatggagagcatcctgcaggcactggaggatattcagctggatctggaggcagtgaacatcaaggcaggcaaagccttcctgcgtctcaagcgcaagttcatccagatgcgaagacccttcctggagcgcagagacctcatcatccagcatatcccaggcttctgggtcaaagcattcctcaaccaccccagaatttcaattttgatcaaccgacgtgatgaagacattttccgctacttgaccaatctgcaggtacaggatctcagacatatctccatgggctacaaaatgaagctgtacttccagactaacccctacttcacaaacatggtgattgtcaaggagttccagcgcaaccgctcaggccggctggtgtctcactcaaccccaatccgctggcaccggggccaggaaccccaggcccgtcgtcacgggaaccaggatgcgagccacagctttttcagctggttctcaaaccatagcctcccagaggctgacaggattgctgagattatcaagaatgatctgtgggttaaccctctacgctactacctgagagaaaggggctccaggataaagagaaagaagcaagaaatgaagaaacgtaaaaccaggggcagatgtgaggtggtgatcatggaagacgcccctgactattatgcagtggaagacattttcagcgagatctcagacattgatgagacaattcatgacatcaagatctctgacttcatggagaccaccgactacttcgagaccactgacaatgagataactgacatcaatgagaacatctgcgacagcgagaatcctgaccacaatgaggtccccaacaacgagaccactgataacaacgagagtgctgatgaccacgaaaccactgacaacaatgagagtgcagatgacaacaacgagaatcctgaagacaataacaagaacactgatgacaacgaagagaaccctaacaacaacgagaacacttacggcaacaacttcttcaaaggtggcttctggggcagccatggcaacaaccaggacagcagcgacagtgacaatgaagcagatgaggccagtgatgatgaagataatgatggcaacgaaggtgacaatgagggcagtgatgatgatggcaatgaaggtgacaatgaaggcagcgatgatgacgacagagacattgagtactatgagaaagttattgaagactttgacaaggatcaggctgactacgaggacgtgatagagatcatctcagacgaatcagtggaagaagagggcattgaggaaggcatccagcaagatgaggacatctatgaggaaggaaactatgaggaggaaggaagtgaagatgtctgggaagaaggggaagattcggacgactctgacctagaggatgtgcttcaggtcccaaacggttgggccaatccggggaagagggggaaaaccggataagggttttccccttttggggatcacctctctgtatcccccacccactatcccatttgccctcctcctcagctagggccacgcggccccacattgcacttctggggggtgaccgacttcgtacacgggtttaaagtttatttttatggtttagtcattgcagagttcttattttggggggagggaaagggggctagtccccttcttttggccctccgcccccgcaggcttctgtgtgctgctaactgtatttattgtgatgccttggtcagggcccctctacccacttctcccagtcagttgtggccccagcccctctccctgtgctgtgtggagtggacaccctgacccccgaagcggggagggccgctgtggccttcgtcacagccgcgcagtgcccatggaggcgctgctgccaccttcctctcccaagttctttctccatccctctcctcttcccgccgcgccgctagcccgcctcggtgtctatgcaaggccgcttcgccattgcggtattctttgcggtattcttgtccccgtcccccagaaggctcgcctctccccgtggaccctgttaatcccaataaaattctgagcaagttcaaaaaacacaaa

SEQ ID NO: 511551 - DNA, 150 bp, Homo sapiens
ctacaagaaagtttgcctatctggggcgcctcgctcacgagggtggcctcgcaagctaccaggccagctaacaacccaccccttgcaggcgcaagcaggcaaagcaaaaagcccaagcttcccactaccccgagcgagcaaacaactcta

SEQ ID NO: 511552 - DNA, 2986 bp, Homo sapiens
gggagtagagcgggcgctgtgggagggaacgccagagcgaggtggtgaggagagctggttgcgtgagtctcctcagctctgcttaccggtgcgactagcggcagcgacgcggctaaaagcgaaggggcgagtgcgagtcccctgagctgtacgaacgcggtcgccatggaccgcccagatgaggggcctccggccaagacccgccgcctgagcagctccgagtctccacagcgcgacccgcccccgccgccgccgccgccgccgctcctccgactgccgctgcctccaccccagcagcgcccgaggctccaggaggaaacggaggcggcacaggtgctggccgatatgaggggggtgggactgggccccgcgctgcccccgccgcctccctatgtcattctcgaggagggggggatccgcgcatacttcacgctcggtgctgagtgtcccggctgggattctaccatcgagtcggggtatggggaggcgcccccgcccacggagagcctggaagcactccccactcctgaggcctcgggggggagcctggaaatcgattttcaggttgtacagtcgagcagttttggtggagagggggccctagaaacctgtagcgcagtggggtgggcgccccagaggttagttgacccgaagagcaaggaagaggcgatcatcatagtggaggatgaggatgaggatgagcgggagagtatgaggagcagcaggaggcggcggcggcggcggaggaggaagcagaggaaggtgaagagggaaagcagagagagaaatgccgagaggatggagagcatcctgcaggcactggaggatattcagctggatctggaggcagtgaacatcaaggcaggcaaagccttcctgcgtctcaagcgcaagttcatccagatgcgaagacccttcctggagcgcagagacctcatcatccagcatatcccaggcttctgggtcaaagcattcctcaaccaccccagaatttcaattttgatcaaccgacgtgatgaagacattttccgctacttgaccaatctgcaggtacaggatctcagacatatctccatgggctacaaaatgaagctgtacttccagactaacccctacttcacaaacatggtgattgtcaaggagttccagcgcaaccgctcaggccggctggtgtctcactcaaccccaatccgctggcaccggggccaggaaccccaggcccgtcgtcacgggaaccaggatgcgagccacagctttttcagctggttctcaaaccatagcctcccagaggctgacaggattgctgaggtggggcccttcctggcatcaccagagaaggccttgctaggcttgttcctgggtgcgtggggaattaagaggaggatctggagcttgtactaatggctgtcttattccttctcccctttttcaacagattatcaagaatgatctgtgggttaaccctctacgctactacctgagagaaaggggctccaggataaagagaaagaagcaagaaatgaagaaacgtaaaaccaggggcagatgtgaggtggtgatcatggaagacgcccctgactattatgcagtggaagacattttcagcgagatctcagacattgatgagacaattcatgacatcaagatctctgacttcatggagaccaccgactacttcgagaccactgacaatgagataactgacatcaatgagaacatctgcgacagcgagaatcctgaccacaatgaggtccccaacaacgagaccactgataacaacgagagtgctgatgaccacgaaaccactgacaacaatgagagtgcagatgacaacaacgagaatcctgaagacaataacaagaacactgatgacaacgaagagaaccctaacaacaacgagaacacttacggcaacaacttcttcaaaggtggcttctggggcagccatggcaacaaccaggacagcagcgacagtgacaatgaagcagatgaggccagtgatgatgaagataatgatggcaacgaaggtgacaatgagggcagtgatgatgatggcaatgaaggtgacaatgaaggcagcgatgatgacgacagagacattgagtactatgagaaagttattgaagactttgacaaggatcaggctgactacgaggacgtgatagagatcatctcagacgaatcagtggaagaagagggcattgaggaaggcatccagcaagatgaggacatctatgaggaaggaaactatgaggaggaaggaagtgaagatgtctgggaagaaggggaagattcggacgactctgacctagaggatgtgcttcaggtcccaaacggttgggccaatccggggaagagggggaaaaccggataagggttttccccttttggggatcacctctctgtatcccccacccactatcccatttgccctcctcctcagctagggccacgcggccccacattgcacttctggggggtgaccgacttcgtacacgggtttaaagtttatttttatggtttagtcattgcagagttcttattttggggggagggaaagggggctagtccccttcttttggccctccgcccccgcaggcttctgtgtgctgctaactgtatttattgtgatgccttggtcagggcccctctacccacttctcccagtcagttgtggccccagcccctctccctgtgctgtgtggagtggacaccctgacccccgaagcggggagggccgctgtggccttcgtcacagccgcgcagtgcccatggaggcgctgctgccaccttcctctcccaagttctttctccatccctctcctcttcccgccgcgccgctagcccgcctcggtgtctatgcaaggccgcttcgccattgcggtattctttgcggtattcttgtccccgtcccccagaaggctcgcctctccccgtggaccctgttaatcccaataaaattctgagcaagttcaaaaaacacaaa

SEQ ID NO: 511553 - DNA, 1966 bp, Homo sapiens
  misc_feature (116)..(116): n is a, c, g, or t
tccgtctgatagtctctctggcgggtaggggatgtttgattgtgtgtctgtgtgtgtgtctgtgtatgtctgtgtgtgtgtgtatgtctgtgtatgtaacggtgtgtctctgtgtngggggggggacagattccaccatcacccccacctggagcaggtacaggatctcagacatatctccatgggctacaaaatgaagctgtacttccagactaacccctacttcacaaacatggtgattgtcaaggagttccagcgcaaccgctcaggccggctggtgtctcactcaaccccaatccgctggcaccggggccaggaaccccaggcccgtcgtcacgggaaccaggatgcgagccacagctttttcagctggttctcaaaccatagcctcccagaggctgacaggattgctgagattatcaagaatgatctgtgggttaaccctctacgctactacctgagagaaaggggctccaggataaagagaaagaagcaagaaatgaagaaacgtaaaaccaggggcagatgtgaggtggtgatcatggaagacgcccctgactattatgcagtggaagacattttcagcgagatctcagacattgatgagacaattcatgacatcaagatctctgacttcatggagaccaccgactacttcgagaccactgacaatgagataactgacatcaatgagaacatctgcgacagcgagaatcctgaccacaatgaggtccccaacaacgagaccactgataacaacgagagtgctgatgaccacgaaaccactgacaacaatgagagtgcagatgacaacaacgagaatcctgaagacaataacaagaacactgatgacaacgaagagaaccctaacaacaacgagaacacttacggcaacaacttcttcaaaggtggcttctggggcagccatggcaacaaccaggacagcagcgacagtgacaatgaagcagatgaggccagtgatgatgaagataatgatggcaacgaaggtgacaatgagggcagtgatgatgatggcaatgaaggtgacaatgaaggcagcgatgatgacgacagagacattgagtactatgagaaagttattgaagactttgacaaggatcaggctgactacgaggacgtgatagagatcatctcagacgaatcagtggaagaagagggcattgaggaaggcatccagcaagatgaggacatctatgaggaaggaaactatgaggaggaaggaagtgaagatgtctgggaagaaggggaagattcggacgactctgacctagaggatgtgcttcaggtcccaaacggttgggccaatccggggaagagggggaaaaccggataagggttttccccttttggggatcacctctctgtatcccccacccactatcccatttgccctcctcctcagctagggccacgcggccccacattgcacttctggggggtgaccgacttcgtacacgggtttaaagtttatttttatggtttagtcattgcagagttcttattttggggggagggaaagggggctagtccccttcttttggccctccgcccccgcaggcttctgtgtgctgctaactgtatttattgtgatgccttggtcagggcccctctacccacttctcccagtcagttgtggccccagcccctctccctgtgctgtgtggagtggacaccctgacccccgaagcggggagggccgctgtggccttcgtcacagccgcgcagtgcccatggaggcgctgctgccaccttcctctcccaagttctttctccatccctctcctcttcccgccgcgccgctagcccgcctcggtgtctatgcaaggccgcttcgccattgcggtattctttgcggtattcttgtccccgtcccccagaaggctcgcctctccccgtggaccctgttaatcccaataaaattctgagcaagttcaaaaaacacaaa

SEQ ID NO: 511554 - DNA, 2801 bp, Homo sapiens
gggagtagagcgggcgctgtgggagggaacgccagagcgaggtggtgaggagagctggttgcgtgagtctcctcagctctgcttaccggtgcgactagcggcagcgacgcggctaaaagcgaaggggcgagtgcgagtcccctgagctgtacgaacgcggtcgccatggaccgcccagatgaggggcctccggccaagacccgccgcctgagcagctccgagtctccacagcgcgacccgcccccgccgccgccgccgccgccgctcctccgactgccgctgcctccaccccagcagcgcccgaggctccaggaggaaacggaggcggcacaggtgctggccgatatgaggggggtgggactgggccccgcgctgcccccgccgcctccctatgtcattctcgaggagggggggatccgcgcatacttcacgctcggtgctgagtgtcccggctgggattctaccatcgagtcggggtatggggaggcgcccccgcccacggagagcctggaagcactccccactcctgaggcctcgggggggagcctggaaatcgattttcaggttgtacagtcgagcagttttggtggagagggggccctagaaacctgtagcgcagtggggtgggcgccccagaggttagttgacccgaagagcaaggaagaggcgatcatcatagtggaggatgaggatgaggatgagcgggagagtatgaggagcagcaggaggcggcggcggcggcggaggaggaagcagaggaaggtgaagagggaaagcagagagagaaatgccgagaggatggagagcatcctgcaggcactggaggatattcagctggatctggaggcagtgaacatcaaggcaggcaaagccttcctgcgtctcaagcgcaagttcatccagatgcgaagacccttcctggagcgcagagacctcatcatccagcatatcccaggcttctgggtcaaagcattcctcaaccaccccagaatttcaattttgatcaaccgacgtgatgaagacattttccgctacttgaccaatctgcaggtacaggatctcagacatatctccatgggctacaaaatgaagctgtacttccagactaacccctacttcacaaacatggtgattgtcaaggagttccagcgcaaccgctcaggccggctggtgtctcactcaaccccaatccgctggcaccggggccaggaaccccaggcccgtcgtcacgggaaccaggatgcgagccacagctttttcagctggttctcaaaccatagcctcccagaggctgacaggattgctgagattatcaagaatgatctgtgggttaaccctctacgctactacctgagagaaaggggctccaggataaagagaaagaagcaagaaatgaagaaacgtaaaaccaggggcagatgtgaggtggtgatcatggaagacgcccctgactattatgcagtggaagacattttcagcgagatctcagacattgatgagacaattcatgacatcaagatctctgacttcatggagaccaccgactacttcgagaccactgacaatgagataactgacatcaatgagaacatctgcgacagcgagaatcctgaccacaatgaggtccccaacaacgagaccactgataacaacgagagtgctgatgaccacgaaaccactgacaacaatgagagtgcagatgacaacaacgagaatcctgaagacaataacaagaacactgatgacaacgaagagaaccctaacaacaacgagaacacttacggcaacaacttcttcaaaggtggcttctggggcagccatggcaacaaccaggacagcagcgacagtgacaatgaagcagatgaggccagtgatgatgaagataatgatggcaacgaaggtgacaatgagggcagtgatgatgatggcaatgaaggtgacaatgaaggcagcgatgatgacgacagagacattgagtactatgagaaagttattgaagactttgacaaggatcaggctgactacgaggacgtgatagagatcatctcagacgaatcagtggaagaagagggcattgaggaaggcatccagcaagatgaggacatctatgaggaaggaaactatgaggaggaaggaagtgaagatgtctgggaagaaggggaagattcggacgactctgacctagagacagcgcatccggaagagggaaaaccggataagattctcccacccactatcccatttgccctcctcctcagctagggccacgcggccccacattgcacttctggggggtgaccgacttcgtacacgggtttaaagtttatttttatggtttagtcattgcagagttcttattttggggggagggaaagggggctagtccccttcttttggccctccgcccccgcaggcttctgtgtgctgctaactgtatttattgtgatgccttggtcagggcccctctacccacttctcccagtcagttgtggccccagcccctctccctgtgctgtgtggagtggacaccctgacccccgaagcggggagggccgctgtggccttcgtcacagccgcgcagtgcccatggaggcgctgctgccaccttcctctcccaagttctttctccatccctctcctcttcccgccgcgccgctagcccgcctcggtgtctatgcaaggccgcttcgccattgcggtattctttgcggtattcttgtccccgtcccccagaaggctcgcctctccccgtggaccctgttaatcccaataaaattctgagcaagttcaaaaaacacaaa

SEQ ID NO: 511555 - DNA, 1923 bp, Homo sapiens
gtagcgctcgggttaagtggcagtaccagagtaaatccatgttccccccctcaatctgtccttgttttgtcccatctccatagccttctctctccctaggccggctggtgtctcactcaaccccaatccgctggcaccggggccaggaaccccaggcccgtcgtcacgggaaccaggatgcgagccacagctttttcagctggttctcaaaccatagcctcccagaggctgacaggattgctgaggtggggcccttcctggcatcaccagagaaggccttgctaggcttgttcctgggtgcgtggggaattaagaggaggatctggagcttgtactaatggctgtcttattccttctcccctttttcaacagattatcaagaatgatctgtgggttaaccctctacgctactacctgagagaaaggggctccaggataaagagaaagaagcaagaaatgaagaaacgtaaaaccaggggcagatgtgaggtggtgatcatggaagacgcccctgactattatgcagtggaagacattttcagcgagatctcagacattgatgagacaattcatgacatcaagatctctgacttcatggagaccaccgactacttcgagaccactgacaatgagataactgacatcaatgagaacatctgcgacagcgagaatcctgaccacaatgaggtccccaacaacgagaccactgataacaacgagagtgctgatgaccacgaaaccactgacaacaatgagagtgcagatgacaacaacgagaatcctgaagacaataacaagaacactgatgacaacgaagagaaccctaacaacaacgagaacacttacggcaacaacttcttcaaaggtggcttctggggcagccatggcaacaaccaggacagcagcgacagtgacaatgaagcagatgaggccagtgatgatgaagataatgatggcaacgaaggtgacaatgagggcagtgatgatgatggcaatgaaggtgacaatgaaggcagcgatgatgacgacagagacattgagtactatgagaaagttattgaagactttgacaaggatcaggctgactacgaggacgtgatagagatcatctcagacgaatcagtggaagaagagggcattgaggaaggcatccagcaagatgaggacatctatgaggaaggaaactatgaggaggaaggaagtgaagatgtctgggaagaaggggaagattcggacgactctgacctagaggatgtgcttcaggtcccaaacggttgggccaatccggggaagagggggaaaaccggataagggttttccccttttggggatcacctctctgtatcccccacccactatcccatttgccctcctcctcagctagggccacgcggccccacattgcacttctggggggtgaccgacttcgtacacgggtttaaagtttatttttatggtttagtcattgcagagttcttattttggggggagggaaagggggctagtccccttcttttggccctccgcccccgcaggcttctgtgtgctgctaactgtatttattgtgatgccttggtcagggcccctctacccacttctcccagtcagttgtggccccagcccctctccctgtgctgtgtggagtggacaccctgacccccgaagcggggagggccgctgtggccttcgtcacagccgcgcagtgcccatggaggcgctgctgccaccttcctctcccaagttctttctccatccctctcctcttcccgccgcgccgctagcccgcctcggtgtctatgcaaggccgcttcgccattgcggtattctttgcggtattcttgtccccgtcccccagaaggctcgcctctccccgtggaccctgttaatcccaataaaattctgagcaagttcaaaaaacacaaa

SEQ ID NO: 511556 - DNA, 1723 bp, Homo sapiens
  misc_feature (150)..(150): n is a, c, g, or t
  misc_feature (157)..(157): n is a, c, g, or t
  misc_feature (160)..(160): n is a, c, g, or t
  misc_feature (163)..(164): n is a, c, g, or t
gggtaaagactagtgtaacacaggatttatggagccaaaaagggacctttgagataatcccagtggaatatgttttacaagtgggaaatcatgcccagaaatggcttgaggttacacagtcaggggcagaagtgggactttacccacccnagccccnttnctnngatcccttatagcctactgcttccccagttacttcccacctttgagtgctatgagtacaccacctcccaccaaccctatactcagccacagccttccttacagtaaaaccaggggcagatgtgaggtggtgatcatggaagacgcccctgactattatgcagtggaagacattttcagcgagatctcagacattgatgagacaattcatgacatcaagatctctgacttcatggagaccaccgactacttcgagaccactgacaatgagataactgacatcaatgagaacatctgcgacagcgagaatcctgaccacaatgaggtccccaacaacgagaccactgataacaacgagagtgctgatgaccacgaaaccactgacaacaatgagagtgcagatgacaacaacgagaatcctgaagacaataacaagaacactgatgacaacgaagagaaccctaacaacaacgagaacacttacggcaacaacttcttcaaaggtggcttctggggcagccatggcaacaaccaggacagcagcgacagtgacaatgaagcagatgaggccagtgatgatgaagataatgatggcaacgaaggtgacaatgagggcagtgatgatgatggcaatgaaggtgacaatgaaggcagcgatgatgacgacagagacattgagtactatgagaaagttattgaagactttgacaaggatcaggctgactacgaggacgtgatagagatcatctcagacgaatcagtggaagaagagggcattgaggaaggcatccagcaagatgaggacatctatgaggaaggaaactatgaggaggaaggaagtgaagatgtctgggaagaaggggaagattcggacgactctgacctagaggatgtgcttcaggtcccaaacggttgggccaatccggggaagagggggaaaaccggataagggttttccccttttggggatcacctctctgtatcccccacccactatcccatttgccctcctcctcagctagggccacgcggccccacattgcacttctggggggtgaccgacttcgtacacgggtttaaagtttatttttatggtttagtcattgcagagttcttattttggggggagggaaagggggctagtccccttcttttggccctccgcccccgcaggcttctgtgtgctgctaactgtatttattgtgatgccttggtcagggcccctctacccacttctcccagtcagttgtggccccagcccctctccctgtgctgtgtggagtggacaccctgacccccgaagcggggagggccgctgtggccttcgtcacagccgcgcagtgcccatggaggcgctgctgccaccttcctctcccaagttctttctccatccctctcctcttcccgccgcgccgctagcccgcctcggtgtctatgcaaggccgcttcgccattgcggtattctttgcggtattcttgtccccgtcccccagaaggctcgcctctccccgtggaccctgttaatcccaataaaattctgagcaagttcaaaaaacacaaa

SEQ ID NO: 511557 - DNA, 385 bp, Homo sapiens
  misc_feature (14)..(14): n is a, c, g, or t
  misc_feature (54)..(54): n is a, c, g, or t
  misc_feature (107)..(107): n is a, c, g, or t
  misc_feature (113)..(113): n is a, c, g, or t
  misc_feature (136)..(136): n is a, c, g, or t
  misc_feature (139)..(140): n is a, c, g, or t
  misc_feature (154)..(154): n is a, c, g, or t
aggaggaggcggcncgggctgttgctcgggcagcccagcagcggcgcgccggangcccctggaggaagacgaggaaggggacgatgagtttgacgatgaggccccgnagagcntgactttcgccagcgcccaggcnaannagagaagaggaggncgagtggggagacgtgcgcagggataaaacgctcctgaaggagaagaggaagcaacagagtgatgacaatcgaacagaagagaagaaaactccttccagacactattttggagaagttaaccacagcttcacagactaacatcaagaaatcgccggaaaggtgaaagaagttaatttgcaaaagaaaaatgaagactgtgaaaaaggaaatgactccaagaaagttaaagt

SEQ ID NO: 511558 - DNA, 1561 bp, Homo sapiens
ctagaggaccccttatgtctcgatcgttagggttctcttcgttgtcatcagtgttcttgttattgtctccaggataaagagaaagaagcaagaaatgaagaaacgtaaaaccaggggcagatgtgaggtggtgatcatggaagacgcccctgactattatgcagtggaagacattttcagcgagatctcagacattgatgagacaattcatgacatcaagatctctgacttcatggagaccaccgactacttcgagaccactgacaatgagataactgacatcaatgagaacatctgcgacagcgagaatcctgaccacaatgaggtccccaacaacgagaccactgataacaacgagagtgctgatgaccacgaaaccactgacaacaatgagagtgcagatgacaacaacgagaatcctgaagacaataacaagaacactgatgacaacgaagagaaccctaacaacaacgagaacacttacggcaacaacttcttcaaaggtggcttctggggcagccatggcaacaaccaggacagcagcgacagtgacaatgaagcagatgaggccagtgatgatgaagataatgatggcaacgaaggtgacaatgagggcagtgatgatgatggcaatgaaggtgacaatgaaggcagcgatgatgacgacagagacattgagtactatgagaaagttattgaagactttgacaaggatcaggctgactacgaggacgtgatagagatcatctcagacgaatcagtggaagaagagggcattgaggaaggcatccagcaagatgaggacatctatgaggaaggaaactatgaggaggaaggaagtgaagatgtctgggaagaaggggaagattcggacgactctgacctagaggatgtgcttcaggtcccaaacggttgggccaatccggggaagagggggaaaaccggataagggttttccccttttggggatcacctctctgtatcccccacccactatcccatttgccctcctcctcagctagggccacgcggccccacattgcacttctggggggtgaccgacttcgtacacgggtttaaagtttatttttatggtttagtcattgcagagttcttattttggggggagggaaagggggctagtccccttcttttggccctccgcccccgcaggcttctgtgtgctgctaactgtatttattgtgatgccttggtcagggcccctctacccacttctcccagtcagttgtggccccagcccctctccctgtgctgtgtggagtggacaccctgacccccgaagcggggagggccgctgtggccttcgtcacagccgcgcagtgcccatggaggcgctgctgccaccttcctctcccaagttctttctccatccctctcctcttcccgccgcgccgctagcccgcctcggtgtctatgcaaggccgcttcgccattgcggtattctttgcggtattcttgtccccgtcccccagaaggctcgcctctccccgtggaccctgttaatcccaataaaattctgagcaagttcaaaaaacacaaa

SEQ ID NO: 511559 - DNA, 1754 bp, Homo sapiens
ctcaagcatcaacttcagctcttctttcggaatgacaagtactacgccaaacacataaaaaaaaaaaaaactcctacagtatagcctggcaacaaagaccctagaatcaccagatattcaagggtcctccgcgtactaactacattgcaggtcagccgcctcaccagaaacctaagaaatgcacactaacacccagtctcaccaacactcccataacaagtctaacctcagaagatctgttagaagtctcggcacatcagtgtaacctaggcctattctacacactggaaacccgtgaccccaaagtccactccaagaggcacaaccacgcgcaccacactcacgcgctcacatactacatgaccacttctgatccatctccacataattccaggaaccactatacacgacacaccactcctcaaaagagcacttgtcttgaatctcaatccaccaattaaaactggcatcccaccaacaacacacagcatcaaccaacctaatccatgcacccctcgcagtatcgcctcgcgcgcctcacaaactccatcacagatctgaccaccatcatcatctcatccacacccaaactttcctatcacatccaaccaacagaggctactctcacacaaacttcacaccaaaacaccaccgtcacgcacacacctactccctatccggcaagcagcatctccacgacacatccaggcacacccaataccgtacatacaacgtgagcacctcaccaatcgagcaaagacagcactacatatcaacacatcaccgcaacgcataacgatgatcatccccaacaaaaagaacgaccatatcccaccttacaagcacagaggagaaatcacacacgcatacaaaacgccaggtggttacaacacccaccagcaacaacgaccacacacccaacatacacagccaaccaaaacctagagcacacgcgccaccagatgaccagcaaagaccattcacctacacacaacagaacaccacgaacacgacagcagaacacacacattgggaaccaaacacacacaccatatcacaccagaaaaactacagaagatcgatagcaccaccacgtcattcacaaccacccatacacatcatcgacaccgccccaatacatcactcaacgcgatcaacaaaaactaaccaacagacaccagatgagccaatactaacaaaactaacttgttcacccaacacgaaagtgaatccacaaatcgtgcacccacacacaagataagctgacgacgaaaatcaggaaacacgcatacatagcgcacagaccacataggaaacaacacaacacaaaccagaccagccgaagcacgacacaatgcacacaaccatgaccaactactacgcacgaccagcacaatcacacaaacacacacaccaccactctaagcacaccaacagtgacgctaacaagcgagaggcacaaaataaacagagagtaacaaaacaaacagacgagacacaaacgagaaaaaccaacacacaccgcaacctacatcacctacagaaactctgtacaacgctcaccatcacgccgaagacacctcactacttagtcaaaaccacaacaaccagaacagaaaggacaaacacacagagatagacgagaactcgacaaccaaacacactaacagaaaaacaaagatcaaatactcagctctactagaactcaaacaacatcacaacagcccactacatactatcataaacacaactag

SEQ ID NO: 511560 - DNA, 451 bp, Homo sapiens
gagaaaacacatacttgaaaaacttccaaattttttttttatctgtagtattatctatttttttaaaagcataagaaaagtacaggctggatgaggtggctcacacctgtaatacaacctggacaacagacagagcaagactctgtctcaaaataaagtctagattcaaggtcctaaaatggaacatttgaaccattgctggaaaacagtactaggtttacagtttgaaaaactcttactaagggaaagataggtggtagatagtatattgtgaagaggtttccataatttcagcatgtatatgaagaattagatggatatgaagttaatctgcccatagaatgccatcccgttgaacattggaactgattcagctgaagcacaggacatggaacatttgtttgctcacactgggcgacagtgtgagactctgtcacaaaaaatatatatt

SEQ ID NO: 511561 - DNA, 288 bp, Homo sapiens
tcaggcccgttcataatatcccccaggtttagtagttggacttagggaacaaaggaacctttaatagaaattggacagcgagaaagcgagcgttacgtgatacttgtgggccagagcattagtgcacaccagcgcgaccactttctgataggcagcctgcactggtggggtgaattctttgccgagtggtgagtgggccagagactacagtaccagtctatggttgcccaaggagcctgaggttctcaggatccacgtgcagctggtcacagtgcagctcactcagtg

SEQ ID NO: 511562 - DNA, 310 bp, Homo sapiens
actctacaggatttaccacagtgcctggggctatccaaaggctactcgcattcttgtattggagcctgtcagccccagctacaggacgacatcttgtttgatgcggatgacgtggaaggggtggagcctgcacccggatatggaagccatctatagccacaactatttaccatgtacttatatggaacaaattcgggcagactccagggcttcagaggaacagctgctcaaattcatctgacaccatgtggccataaaagcggaaactcatcctacttttacctatcttccgacccatgtcaaaaatgcg

SEQ ID NO: 511563 - DNA, 464 bp, Homo sapiens
  misc_feature (110)..(110): n is a, c, g, or t
  misc_feature (120)..(120): n is a, c, g, or t
  misc_feature (205)..(205): n is a, c, g, or t
  misc_feature (228)..(229): n is a, c, g, or t
  misc_feature (461)..(463): n is a, c, g, or t
tctgtcaccccaggctggagtgcaggggcacgatcttggctcactgcaacctcagcctcccgagttcaaagcgattttcctgcttcagcctccccaagtagctgggactnacaagcatcngccaccacacccggctaatttttgtattttttagtagagacagggtttcactatgttggccagcctagtctcgaactcctgaccntcgtgatctgcccgcctcggccnncccaaagtgctgggattgcaggcgtgagtcaccgcgcccagccccgcccttttatttttagggcacagggttgggaggctggcatatttaaaagcaaatcccagatactgtcatttcaaatacttcaagcatgtctgtgataaatactttttaaaaactagaaggttttttttgtttgtttttgtatttaaatgtataatctttcttttgcaagtaattctgacactaaatnnnt

SEQ ID NO: 511564 - DNA, 322 bp, Homo sapiens
  misc_feature (32)..(32): n is a, c, g, or t
  misc_feature (60)..(60): n is a, c, g, or t
  misc_feature (262)..(262): n is a, c, g, or t
  misc_feature (281)..(281): n is a, c, g, or t
  misc_feature (283)..(283): n is a, c, g, or t
  misc_feature (313)..(313): n is a, c, g, or t
cggcgagctgacgcagcgttcgaacgctgggngttgccgcggctgccagtgcgtagtggngacaggtacggtccggacatcttgtagccacgggcacgcagcgctggtatgacctcggcgtcgcggagtggtccgcggccgggtgggcaaatcgtgtcgaacagccggttgaggcgcgccgcgaaggtgcccgaatcgatcgagtgctcgcgccgaccatgttgctggctatggtcatcgcgaatccagagtgtctggattnaggcgtgtgggccaccggntngcggcggaacaacggtagtcgcctcgggtntcacgtcgg

SEQ ID NO: 511565 - DNA, 207 bp, Homo sapiens
  misc_feature (44)..(44): n is a, c, g, or t
  misc_feature (54)..(54): n is a, c, g, or t
  misc_feature (62)..(62): n is a, c, g, or t
  misc_feature (86)..(86): n is a, c, g, or t
gtcgctgctgagtcgatctaaggatccccgcgctagcggctaantgacggaccnacgcatgncaggttctcagccaggcaaagtcntcatggggggaggggagaaaaccacatctgtgctctggcggccggcaagtatctgcagggtccagcccaaaggccgccgggtgcttgagtgtggctgcgttcacttaatgccgctagcgcg

SEQ ID NO: 511566 - DNA, 243 bp, Homo sapiens
ggtatgtgaatgtcctcgggggatactgatggatggaagtcctgtgcccctttgtcaagtggtccatgtgactctacttttactgttcctttgccttcgccctccatggtcagtggtgtgacgtttcttcgtgtttttggtgcctttcttcgtgttttcggtgcctttggcagaaatcctttactaaactgctgcttctaattgtctgtcctggaaaatcaagaaatcatgcttgaaacagca

SEQ ID NO: 511567 - DNA, 429 bp, Homo sapiens
  misc_feature (54)..(54): n is a, c, g, or t
  misc_feature (57)..(57): n is a, c, g, or t
  misc_feature (361)..(361): n is a, c, g, or t
  misc_feature (382)..(382): n is a, c, g, or t
aatgtcaggtgtcacctgggcccatatcacatggcccacctgagaacgggtggnganggggtcaggagcagtgatgagcatacctgatgcttacgctgtttcctgtgtatgccaagagcaacaaaatcctttgtgtctgaccataaagtctcatttcttctgccacatgaaactggcaggctaacttgttagcttgcaagtagggtaagatgtcagaccctttacagttgtttgttttttggagacagggtctcattctgctgcccagactggagtgcagtggcatggtcatggctcactgcggtctcaaacttctgggcttaagtgatccagctacctcagcctccagagcagctgggantgcgggcattcaccaccatgncctgggctaatttttaaaaaaaaattaattttttattaggaggatag

SEQ ID NO: 511568 - DNA, 900 bp, Homo sapiens
  misc_feature (47)..(47): n is a, c, g, or t
  misc_feature (67)..(67): n is a, c, g, or t
  misc_feature (73)..(73): n is a, c, g, or t
  misc_feature (100)..(100): n is a, c, g, or t
  misc_feature (109)..(109): n is a, c, g, or t
  misc_feature (115)..(116): n is a, c, g, or t
  misc_feature (122)..(124): n is a, c, g, or t
  misc_feature (126)..(126): n is a, c, g, or t
  misc_feature (131)..(131): n is a, c, g, or t
  misc_feature (142)..(142): n is a, c, g, or t
  misc_feature (144)..(144): n is a, c, g, or t
  misc_feature (156)..(156): n is a, c, g, or t
  misc_feature (159)..(159): n is a, c, g, or t
  misc_feature (169)..(171): n is a, c, g, or t
  misc_feature (189)..(189): n is a, c, g, or t
  misc_feature (196)..(196): n is a, c, g, or t
  misc_feature (210)..(210): n is a, c, g, or t
  misc_feature (248)..(248): n is a, c, g, or t
  misc_feature (263)..(263): n is a, c, g, or t
  misc_feature (287)..(287): n is a, c, g, or t
  misc_feature (292)..(292): n is a, c, g, or t
  misc_feature (319)..(319): n is a, c, g, or t
  misc_feature (321)..(321): n is a, c, g, or t
  misc_feature (328)..(328): n is a, c, g, or t
  misc_feature (336)..(336): n is a, c, g, or t
  misc_feature (357)..(357): n is a, c, g, or t
  misc_feature (381)..(381): n is a, c, g, or t
  misc_feature (389)..(389): n is a, c, g, or t
  misc_feature (395)..(395): n is a, c, g, or t
  misc_feature (400)..(400): n is a, c, g, or t
  misc_feature (402)..(403): n is a, c, g, or t
  misc_feature (407)..(407): n is a, c, g, or t
  misc_feature (411)..(411): n is a, c, g, or t
  misc_feature (432)..(432): n is a, c, g, or t
  misc_feature (448)..(448): n is a, c, g, or t
  misc_feature (452)..(452): n is a, c, g, or t
  misc_feature (478)..(478): n is a, c, g, or t
  misc_feature (482)..(482): n is a, c, g, or t
  misc_feature (515)..(515): n is a, c, g, or t
  misc_feature (523)..(523): n is a, c, g, or t
  misc_feature (531)..(531): n is a, c, g, or t
  misc_feature (544)..(544): n is a, c, g, or t
  misc_feature (585)..(585): n is a, c, g, or t
  misc_feature (653)..(653): n is a, c, g, or t
  misc_feature (670)..(670): n is a, c, g, or t
  misc_feature (721)..(721): n is a, c, g, or t
  misc_feature (862)..(862): n is a, c, g, or t
aaaaaaaaagtgtttaacaacataatcatgtgtacattttaacaagnggaaacatcaccacaagtanctttanttatgtaatcaatatttttaacttttnttatatatntacatnntatttnnntngtggnatatacaagtnanccgttctccttnaanctagcttatnnnctattttcttttatttcnttttgtnttttttaggctgtntttttccatttctcttttaaatatattagtatctgcangtagcttttgaaganctagtatatgctaattatttactntacantatgattagaagtgtttcatgatatantnattgtcntaggacangttattattatagtacaagtntttactgtgtagaaaaatataaanttacagtnaataantaaananntttntatntcaagttatgtatggagtatnaaaagtagttactatntatntatacatatacatatatatataaatntgcntgttctagagtataaatatactatatacttaantatttcangtgtcagnacattatttcatntggtttcagttttgtacattaaaatacttctggcagtgggngtctcccctgatctctggagacccagggatcctcttcccattccaagggtagacgcaccagcagaatnccgcctctccatccatngatgtctcacactgtctgctgtgataaaatccattcttgttgcagtttggnaggtaaaatttggaaatttcttctcctgatgtctcctgtgccttggctaaactctctacgactctgtagagttctattcggcagggctccttccattttttgatgttggtgacatggagagccttcgagccatcataggtnctgatggcgtcccaaaggatggaatgatcctcttcaga

SEQ ID NO: 511569 - DNA, 1591 bp, Homo sapiens
  misc_feature (946)..(946): n is a, c, g, or t
  misc_feature (990)..(990): n is a, c, g, or t
gtgcccctagcacaggagctctcgcagtgatgggaagcatgtggctgagtggcttcaataggcccatggtgacacccgtccacaggccgtagtggggtggtccgtagaatgctgtcgcctcctcccatggtcttccccttgtcccatgggcagcccctatgaccatgcattcatgatcgctccgatggcaccgctgtgcttcttgctacgccttggcggcgctgggacttttctgagtgtcgtctagggagtctgatactcaagtctaagggtccacgcagtcttcgtcacgtggtcctcctcgcgtttgcgtgcaaactagaagggacttggaagcacacggctacaacaggagagaagagaagagacggaggcggtgcacgccagtcgaagacagagatcatcacccgctgcggggaggggggagcgcccagagggagctagagcgcgcgatttagccaccgaggaggatcacgcggaggggataaccccaagaaggtgcgtcatcccctgagagagaggtgggagatctcgagagaagagaagaaaagggcgcaaaacgagagcaaccgggggggccccagccgtgcgatcgcgagatgtatggcgacaggacaaagaaaacagcaactcaccgtagtatgcaaccacccttgtgggggcgtatacacacaagaaagcgtgggacaaaaacaagacagtagaggcggcggacaaacgacccgctggggggggtgcagacaacgaagggggagaacaaacaccctagagaaaagcagttgcacccgatcgacagaggcggtggtgtgatgaaaacgcgaaattacagaacttctggcgggaggcaggcagaacacaacgaatcgatgaaccatctgatacataccgacgaaggaagcagaattgtgttgcacgaacaaacagagccaaatactgattaagaccngaggggggtgcaccaccacacattgtctttcctacacaggcatnattggcttgtgcaggagcaaccacgacagctgggtggtcgacaactaacaacagattggcggcgccgtttgatttgcacacccaacgagagtagtgaagaatgcgatatgaggagaaaaatataatcattactagcgcgatgggggcggcacagcggccaccccattagttccgaacaagaaccacaaaggaaatgatagtggcaggagcagcatagatacaaccaggtagaggggacaacgacaatatagatgtaggcaacaacctcattagatcagccgctcggacaacacaacacgaatgtacactattgaaagtaatgacccacaccctagggggcagggacgcgtaagaaaagaaagcgggcaggacaagaagaagcacaaccagtacgcaagcgaacacccgcgagcacagcgacaaccactcaaacaaattgaaccacacagatcgcacccaccagcgcggacacaaaaaacaacaggaagagcaggagaaagacgcacaaccaaagcggcagcgcgagcaaagaacagctacaggaggcggccccgaccacacggagctcgtagacacgcctaggacaaaacaacccaccacc

SEQ ID NO: 511570 - DNA, 190 bp, Homo sapiens
gcgatgtcagctatgcttatcccaccagaactatggaagtttcacctgcagaacagactctggagctggactggttagagcccctacctcctaacttatctcctgtccgttattaacctttctgaactagtttcccatttatggaatgaaacgaataatactcactgcaaagggagacagtacggttgca

SEQ ID NO: 511571 - DNA, 273 bp, Homo sapiens
  misc_feature (43)..(43): n is a, c, g, or t
  misc_feature (73)..(73): n is a, c, g, or t
  misc_feature (169)..(169): n is a, c, g, or t
  misc_feature (204)..(204): n is a, c, g, or t
attttacagaggcagacattgcacataggtatgactgcaaaantgggtggctaactctgggaagatacttgtnttaaactttatatgacatttaataacccttcatcataaggcaatgttttttacaaaaagattgaaaaaatcatgtaagtcatttactctgcaaaantggcacattaggtggggttccaaaatccataatgnaacaatgtgttttgcaactaagtaacattcattatgatatatggaaaacactgtctgtctacttgtcct

SEQ ID NO: 511572 - DNA, 566 bp, Homo sapiens
  misc_feature (1)..(1): n is a, c, g, or t
  misc_feature (25)..(25): n is a, c, g, or t
  misc_feature (56)..(57): n is a, c, g, or t
  misc_feature (109)..(109): n is a, c, g, or t
  misc_feature (112)..(112): n is a, c, g, or t
  misc_feature (115)..(115): n is a, c, g, or t
  misc_feature (140)..(140): n is a, c, g, or t
  misc_feature (205)..(205): n is a, c, g, or t
  misc_feature (216)..(216): n is a, c, g, or t
  misc_feature (337)..(337): n is a, c, g, or t
  misc_feature (356)..(356): n is a, c, g, or t
  misc_feature (393)..(393): n is a, c, g, or t
  misc_feature (398)..(398): n is a, c, g, or t
  misc_feature (455)..(455): n is a, c, g, or t
  misc_feature (533)..(533): n is a, c, g, or t
nggaaattttggaaaggcctttttngggcttatttcggatcagattaataattcgnnattttggggcagggccgggcagggctagcattgtgttaagcaaatttgcggngtnttnttatcctagttggggaccaataccnaacaacctaaggggattttggtgcaagtagtgtttgaaacacactgaagattactgccctattantaagacatttntcaaaaagcatgttttaaatcagtgtagtccaggatcacactatattaaatataaagataacttaaaggatcattggatcattcattttggccaaatttttagcttctccaaagtgactancatcagggcctacaataanatctgtaattctccaagtttagtaattttatattgangcagnaagggctcattaagtactaataagtacataatttattaaaaacatacataagtgtcntcaaaaaggtccacaattgttagtaaaaaaaattaaattgaagtagtaaatgctgttttataacatacatttttctgntaattcattctgttttgtgtgacctaataaagc

SEQ ID NO: 511573 - DNA, 347 bp, Homo sapiens
gtttttttttaaattgggggaatagtcccccccaaatttttaaaaaaccccttgttttaaattttgctttaaaacccccccgccccccgcttaaccaaaacctttattttttcccccaactttttttagtccccctttttaacccccctttttaaaaaaccgggccccgtttaaattttttgtttttttttttcccaaaaaaggcccggggttgttttttttttaaaaggtccttttaaaccccccccctccctttaaaagttaattttttttttttttttaacccaaatttcccaccctgggaaaatccccccttttaaattttttttttaaaaccccccttccca

SEQ ID NO: 511574 - DNA, 643 bp, Homo sapiens
  misc_feature (66)..(66): n is a, c, g, or t
  misc_feature (88)..(89): n is a, c, g, or t
  misc_feature (94)..(95): n is a, c, g, or t
  misc_feature (100)..(100): n is a, c, g, or t
  misc_feature (102)..(102): n is a, c, g, or t
atagtgccagagagactctgtgaaagtaaagaaggtggtcaaggtgaagaaacctgcagccagatnccagatggtattctgacaagannctccnngagtnangccgtgtgaaagcagtgtgtgtggagaagttggcatgggtccttcatcacttaataggcacatcagagatcacactggacgtgaaccaaatgaatatcaggaaatttcaagtgtttcctgttattcgtagctcaatgtaatgcctcagttcattttcagttgtttgattatatgtgactaatatgtattttttattcaaacaagacttctgtacatgtttcttcaaaacagtttattaactgtcttcagtcttggattacatcaagtttataattttggcaaattgttgagacactgtgaagtcagcgttaaccatgtgcatacaacttaaggaattttttcctcctcatgtaaattttacttttcatgcttatatagtttcaacttttatcttcatagtaatttctcatctactcataataccaaaagttaagtcatgctgttttgtgtgctctcttgctaaagaccgcagagaccatacctgttgtcaaagagggtgtaataaactgtaataataatcatgaccacaaaccataaaaaa

SEQ ID NO: 511575 - DNA, 2446 bp, Homo sapiens
  misc_feature (66)..(66): n is a, c, g, or t
  misc_feature (88)..(89): n is a, c, g, or t
  misc_feature (94)..(95): n is a, c, g, or t
  misc_feature (100)..(100): n is a, c, g, or t
  misc_feature (102)..(102): n is a, c, g, or t
  misc_feature (766)..(766): n is a, c, g, or t
atagtgccagagagactctgtgaaagtaaagaaggtggtcaaggtgaagaaacctgcagccagatnccagatggtattctgacaagannctccnngagtnangccgtgtgaaagcagtgtgtgtggagaagttggcatgggtccttcatcacttaataggcacatcagagatcacactggacgtgaaccaaatgaatatcaggaatatggaaagaagtcatatacacgtaaccagtgtggacgagccttgagttatcatcgctcttttccagtacgtgaaaggactcatcctggaggaaagccctatgattgtaaggaatgtggagaaacctttatttctcttgtaagcattcgaagacacatgttaacgcataggggaggtgtaccttacaaatgtaaggtgtgtgggaaagcctttgattatcccagtttatttcgtatacatgaaagaagtcacactggagagaaaccttatgaatgcaagcaatgtgggaaagccttcagttgttccagttacattagaatacatgaaaggactcacactggagataaaccctatgaatgcaagcagtgtgggaaagctttcagttgttccaagtacattcgaatccatgaacgaactcacacaggagagaaaccctacgaatgtaaacagtgcggtaaagcctttaggtgcgccagttctgttcgaagtcacgagaggactcacaccggagagaaactttttgaatgtaaggaatgcgggaaggctttgacttgtcttgcnagtgttagaagacacatgataaagcacactggcaatggaccttataaatgtaaggtgtgtgggaaagcctttgatttccccagttcatttcgaatccatgaaaggacccacactggagagaaaccctatgattgtaagcaatgtgggaaagccttcagttgttccagttcgtttcgaaaacatgaaagaattcacactggagagaaaccctataaatgtacaaaatgtgggaaagccttcagtcgttccagttacttccgaatccatgaaagaactcacactggagagaaaccctatgaatgtaagcaatgtgggaaagccttcagtcgatccacttactttcgagtacatgaaaaaattcatactggagagaaaccctatgagaaccctaaccctaacgcttcagttgtcccagttctttcatgagcatgaaaggagtcacatagagaaaccccatgaaagtaagaaatttgggaaagccttcagtcctttctgtttctttcaactacgtgaaaggattcacagtggagaaagaccctgtaagataattggctttaaattacgagagacttgtgataggacagtaaaacctagagttggagttggatctctggattgtgttatgtcagtgttggtaggttaggaactagatttcccagaatccattccatttgtgattccatgatacaattcaccagtaacctatcttacatgagattcggaagtaagttaagaaggcattagtcatggtttggaagcaccatacagggagacagctgtgtgaatacaggctgtatggacacttgcttccatcccattttcctgcttctttgggttgccaatcaagagtatcctcaaaacgacttgactttaattttctcggaggtgataggcttccacacaggtctccagaagccctgcattgaatatccatccacactttggttttccttcagacattattatgtctgtactaggcaactaattcagactgtcctggttgggaatattctgtgatgctctgactcccctagtctgtaggacggaattggcatacggtctaatttgtgtagtaagcacctttgttcatactagtagtgactgtattcttgattcagcctgatagctaccatgctgctgtcaaaaccaaccagaggggagcttgttcttctgctgtagtgtgcagtgactggcctcacccaggactttgatgtgagaatgagcactttcctctatcaggaaatttcaagtgtttcctgttattcgtagctcaatgtaatgcctcagttcattttcagttgtttgattatatgtgactaatatgtattttttattcaaacaagacttctgtacatgtttcttcaaaacagtttattaactgtcttcagtcttggattacatcaagtttataattttggcaaattgttgagacactgtgaagtcagcgttaaccatgtgcatacaacttaaggaattttttcctcctcatgtaaattttacttttcatgcttatatagtttcaacttttatcttcatagtaatttctcatctactcataataccaaaagttaagtcatgctgttttgtgtgctctcttgctaaagaccgcagagaccatacctgttgtcaaagagggtgtaataaactgtaataataatcatgaccacaaaccataaaaaa

SEQ ID NO: 511576 - DNA, 2432 bp, Homo sapiens
  misc_feature (66)..(66): n is a, c, g, or t
  misc_feature (88)..(89): n is a, c, g, or t
  misc_feature (94)..(95): n is a, c, g, or t
  misc_feature (100)..(100): n is a, c, g, or t
  misc_feature (102)..(102): n is a, c, g, or t
  misc_feature (766)..(766): n is a, c, g, or t
atagtgccagagagactctgtgaaagtaaagaaggtggtcaaggtgaagaaacctgcagccagatnccagatggtattctgacaagannctccnngagtnangccgtgtgaaagcagtgtgtgtggagaagttggcatgggtccttcatcacttaataggcacatcagagatcacactggacgtgaaccaaatgaatatcaggaatatggaaagaagtcatatacacgtaaccagtgtggacgagccttgagttatcatcgctcttttccagtacgtgaaaggactcatcctggaggaaagccctatgattgtaaggaatgtggagaaacctttatttctcttgtaagcattcgaagacacatgttaacgcataggggaggtgtaccttacaaatgtaaggtgtgtgggaaagcctttgattatcccagtttatttcgtatacatgaaagaagtcacactggagagaaaccttatgaatgcaagcaatgtgggaaagccttcagttgttccagttacattagaatacatgaaaggactcacactggagataaaccctatgaatgcaagcagtgtgggaaagctttcagttgttccaagtacattcgaatccatgaacgaactcacacaggagagaaaccctacgaatgtaaacagtgcggtaaagcctttaggtgcgccagttctgttcgaagtcacgagaggactcacaccggagagaaactttttgaatgtaaggaatgcgggaaggctttgacttgtcttgcnagtgttagaagacacatgataaagcacactggcaatggaccttataaatgtaaggtgtgtgggaaagcctttgatttccccagttcatttcgaatccatgaaaggacccacactggagagaaaccctatgattgtaagcaatgtgggaaagccttcagttgttccagttcgtttcgaaaacatgaaagaattcacactggagagaaaccctataaatgtacaaaatgtgggaaagccttcagtcgttccagttacttccgaatccatgaaagaactcacactggagagaaaccctatgaatgtaagcaatgtgggaaagccttcagtcgatccacttactttcgagtacatgaaaaaattcatactggagagaaaccctatgagaaccctaaccctaacgcttcagttgtcccagttctttcatgagcatgaaaggagtcacatagagaaaccccatgaaagtaagaaatttgggaaagccttcagtcctttctgtttctttcaactacgtgaaaggattcacagtggagaaagaccctgtaagataattggctttaaattacgagagacttgtgataggacagtaaaacctagagttggagttggatctctggattgtgttatgtcagtgttggtaggttaggaactagatttcccagaatccattccatttgtgattccatgatacaattcaccagtaacctatcttacatgagattcggaagtaagttaagaaggcattagtcatggtttggaagcaccatacagggagacagctgtgtgaatacaggctgtatggacacttgcttccatcccattttcctgcttctttgggttgccaatcaagagtatcctcaaaacgacttgactttaattttctcggaggtgataggcttccacacaggtctccagaagccctgcattgaatatccatccacactttggttttccttcagacattattatgtctgtactaggcaactaattcagactgtcctggttgggaatattctgtgatgctctgactcccctagtctgtaggacggaattggcatacggtctaatttgtgtagtaagcacctttgttcatactagtagtgactgtattcttgattcagcctgatagctaccatgctgctgtcaaaaccaaccagaggggagcttgttcttctgctgtagtgtgcagtgactggcctcacccaggactttgatgtgagaatgagcactttcctctatcaggaaatttcaagtgtttcctgttattcgtagctcaatgtaatgcctcagttcattttcagttgtttgattatatgtgactaatatgtattttttattcaaacaagacttctgtacatgtttcttcaaaacagtttattaactgtcttcagtcttggattacatcaagtttataattttggcaaattgttgagacactgtgaagtcagcgttaaccatgcgaaccacatcaccccattttttcatccctattgaatgcttaatggtgaagcttgagatagggggttaagagcatcagtcagggcccttctgttctactgcttataacatgtgttacgtaacactatccacttcgtgcttttgggcatccatcatctgtcaatccgggtaatagtgcccccagttggtgcctcataaaggattaaaaaac

SEQ ID NO: 511577 - DNA, 415 bp, Homo sapiens
gcctattggagggtggagggtggagggggagcagcagacataataactatcgggtactagcctgggtgatgaaataatttatacaacaaacccccgtgacacaagtttacccaaagaacaaaccggcacatgtgcccttgaacctaaaagtttgttttcttgagagagactctcgcactgtcacccaggctggagtgcaatggtgcaatcttggctcgctgcaacctccacctcctgggttcatgcgactctcctgcctcagcctcccgagtagctgggattacaggagcacaacaccacacccggctaattttttgtagttttagcagagacaggggtttcaccatgttagccagactggtcttgaaattctgacctcgtgatctgcctgcctcggcctcccagagagccggaa

SEQ ID NO: 511578 - DNA, 138 bp, Homo sapiens
cctttcagagtagcatttcagagtgctgggatacaggtgtgatccactgcacccagcaaaaccagacttcttaccaacctcatgaggcctgtgtgatctggtccgggctgcccctccatcattctgtctctcccttct

SEQ ID NO: 511579 - DNA, 349 bp, Homo sapiens
agctttttatctggcactgtatggaagcattttttggtatggttagcatggcacatggcgaagcatatagcagtttactgtacaggtaaggaatgagccatgatgttttacctatctctctttctctctcactaccatgcacacatactgtgtgtattcagagaccttcagaaacattcatattcattctcatgagtcagctaggttttacgaaatttgtgtggtaggtgtacaagaggctcatagtaactgtaccatattattaacccctacatccgttttttgtcttgtgtatcttgataattctgcgtgctttatagggaagcaggcgacacgagtcggtggtctc

SEQ ID NO: 511580 - DNA, 99 bp, Homo sapiens
  misc_feature (2)..(2): n is a, c, g, or t
tntcttccctcattcttttatttttgaaaaggcttcacggcatttagaggaactcgcgctcagaagcataatcgatacacagagacgcagcacatataa

SEQ ID NO: 511581 - DNA, 349 bp, Homo sapiens
cggctggtaaagacaatatctcttaaacgcactatcgcaggtccgtgcatttaaggatatgttatagcaaacccagtattctgaccgtcataaaagcgcctcgcgtttccatgctttaagtcacttgccatgagtgtcatactaaagcccaagtgttagttagaacgccacagtgcatggatgctctatctaaataggggccgcatcgagtgttcatccgagagaatgcaggtttatcgccatgttagttgaccatgttcaattcgtgaccacacttagcacggtgtcttaatgtctaccattgatatatgtgaagctctgagctgatatatgtgcatctctctctcct

SEQ ID NO: 511582 - DNA, 618 bp, Homo sapiens
  misc_feature (226)..(226): n is a, c, g, or t
  misc_feature (374)..(374): n is a, c, g, or t
  misc_feature (384)..(384): n is a, c, g, or t
agaggatcgctttctgcccacgactcgatacatgctgtgagaatcgaatgaaatattagtttgaaaacacctggtgtggaccgggtgcagtggctcacagctctaatcccaagcactctgggaggccaaggcaggtggattgcttgagctcaggagatggagatcagcctgggcaacaacagcctgggtgaaactctgtctctacaaaaaattagctgggtgtggnggtgtgtgcctgtagtcccagcgactcagtaggctgaggtgggaggatggcttgggtccaggagaccaaggctgcagtgaaccttgatcacaccactgcacttcagcctgggtgagagaaagaccatgtctcaaaaaagaagaaaaanaaaaagaaancaccggggtgtaccgaaataccttagccggaaggaagaaagaagggagggaaaaggaaaaggaagggagagagagaaataaagaaaacaccgggggaatccttcagggcacaaggcaaaagtcagttatccacaataggagaaagacaaggcctccacctggatcctcagtcttctacgtagagctccaggcgcatctcaggacagagtgccactccttctccagggctgactc

SEQ ID NO: 511583 - DNA, 118 bp, Homo sapiens
ggacgcataatattatcgattccacatgttgctcatggtcagagccctatatactcccttccctttcacctcacagggaactccttatgtatgtagccacacactcatcattagtgtg

SEQ ID NO: 511584 - DNA, 584 bp, Homo sapiens
  misc_feature (32)..(32): n is a, c, g, or t
  misc_feature (66)..(67): n is a, c, g, or t
  misc_feature (94)..(94): n is a, c, g, or t
  misc_feature (133)..(134): n is a, c, g, or t
  misc_feature (140)..(140): n is a, c, g, or t
  misc_feature (150)..(150): n is a, c, g, or t
  misc_feature (176)..(176): n is a, c, g, or t
  misc_feature (189)..(189): n is a, c, g, or t
  misc_feature (198)..(199): n is a, c, g, or t
  misc_feature (210)..(211): n is a, c, g, or t
  misc_feature (332)..(332): n is a, c, g, or t
  misc_feature (382)..(383): n is a, c, g, or t
  misc_feature (387)..(387): n is a, c, g, or t
  misc_feature (404)..(404): n is a, c, g, or t
  misc_feature (418)..(418): n is a, c, g, or t
  misc_feature (583)..(583): n is a, c, g, or t
tccacaaagaaggaagaggaaaaaccccaggncttccaagggtgaagctgtcccctcgcgtgcgcnnggcgcaccctcccaggctcattagtgnccttgggaggggcagagggctcagaggggatgagtctcnngggggnctggggtggngggggtgagggagagagtcctgaggncacagagctgggnaacctgagnngcctctctggnnccctcccccaccactgcccaaacctgtttacagcaccttcgcccctcccctcttaacccgtccatccactctgcacttcccaggcaggtgggtgggcaaggcctcagccatactcctgggngcgggtgtcggtgagcaaggcacagtcccagaggtgatatcaaggcctanncggnacagaggagatgcaggnagacagagtggggnaaatgtgaatggggacagtggccaacgccgatgcaggcagatcccaaagtcagggttaagctatcctggccagcagaagccagcgcccgcactccaccaccacaccctgtcacttcgcgtccctccccaatatccagaggagggtggactctgtacttgcaagcng

SEQ ID NO: 511585 - DNA, 903 bp, Homo sapiens
gcgcctcggaggcgtacagctgcttcaatgatgaacgctgagcatctcctatcccagaccactgggtgccagaacctcatagaagtgatagagatgaacggtcacacttcgtactgttctatgtagtaagcgtatggccagcacgaagtgagctgctgacgctctgggtgaagactggaagggttatgtggatcctgaagtcaagtggctgggaaaccgagaaaacaaaggttgtccccatgaaagccataggatgtcctctgacccactgctcgtgtccgacttgcatactgagatacgggcgttatgttccctgttatatacagacccaaggaataacgtggcagactgaccgagaacattcaggactctgcgtgtagctattgtcgtgggtgcaaattctgagacgctgctccaatcatctggttctatttgtaataaaatccggagagaccgatagttcctggatcgtgagcatgtatactacagtgcactcgaacgcctgggccccaaaagagctcgcagaatccgcaaagactttgcaatcgtgctctatagagaagatgatgtccgcagtcatgttgtaatgaaagcccttgagataaagaaggtaagaaacctaggaccaaagcacccaagattcagcgtcttgttactccacgtgtcctgagcacaaacggcggcgtatttgctctggacagaagcagcgtaccaagaacaatcaccggaagaggctgcagaatatgctaaacttttggccaaggagaactgacggaggctccggagacggcgcaggaacaattgcgaagagacgccgacttcctctctgcgagcttctactctaggtctgaatccagtccgaacttcgatctttgagttaaaattaattagatcagactttgg

SEQ ID NO: 511586 - DNA, 140 bp, Homo sapiens
tctagcagtatcccccccgttacccagcttcatatactattttcaaacattattttttctcttgtaaagttattatatataaatactctcttgtctctaaattcgaatttctaataataagtaggtataacttagcagta

SEQ ID NO: 511587 - DNA, 205 bp, Homo sapiens
aaaaaccgggggccccaaaaaaataaaaaaggggggccggattttgttaacctttgggcccaagaaataaggggggttaggggaagggccccgggccaatttgggaaaggccccggccttcccccctggggggcttttccttttaggtttgatccccgcccaaaaaaaatttttttggggacccaataataagggccggggttga

SEQ ID NO: 511588 - DNA, 205 bp, Homo sapiens
  misc_feature (21)..(21): n is a, c, g, or t
tgtttaatttcctcttctggnatcccaatttggatcatttcctctctttctttcctgggagaaacaggatggcaggtgctggagcccagagaggctaaatgacatttagcctccagctaaaatgatttaaatgggaaaggagaatgacagcaaagcctcacgtgaactttaatgaccctatcaatgacctttactaactgactct

SEQ ID NO: 511589 - DNA, 1193 bp, Homo sapiens
  misc_feature (978)..(978): n is a, c, g, or t
ggctgtactggcccgggaatttatgggattccgaggtagaggttggagaggggggtggaagtgagaccgggaggaggcagagcgtgggaggggagcagagaactgctgcagttgggccaaagtgacagccccccctcaggactgatctcgacaggaatgccctgggagaactggggagtgcagagaccccgtgctggcctggatggctatgttggagtggtggggtggccttgtggctgcatgtggctgatggcccgagctggaatgctctaatgcctacctagtgctccccctcatgctgtcctactgcggagcatcgtaacatatgacgtgattggcgctgctgccctgcgtgttccccgcgatgtcccctcggttgcctgccccggatacggcagtgtcgcgtggacaccctatcgtggtgcgccacttagcgtcctctcgccttcatcggctcctctcttccccagaacctcccttgtgcggctgcccatggtcttgtgacggcttgtgaagtcttgtgctcgggttgaactgttccatgacccgtcgcaggtagcagcgtgtgaatctcacctggtctcatggtctcaacctttccctttagcgcctccgcggggttgggacacatttggacgtcgcgtattggtagagtactatagtcatctaaagtaggcccaaagtacgtctcggcgaggggcttcgaacttccgttaggcaaagcaatccggaggatgaatgacaacgactatagggccgacaagacagcaggatccaccacaagtgactcataatcgactaatttcccgcagggggatacaacacctattcagtagcagatggattaagcaccgttgtaagatagctcatagagaagagtgcgtacgtgacaaccgagtggtggattctcccaagggagtttcggacatcagctagcaggaatggtggtggaagcgaccaaggtctcaccgaagagancctaagccgcaattggcgagggcgcagacaccaattgagcaagagcactatccataggcagcaggccgcatgacagaccagcatagggacaaacgcgcgtaggagatcagcagccgaagaagcgaaaactcaggcagaggaagactcggtggagacaaagcacagttcacacaacagagcgagcgcacatccagcgcccctagagacgactcctc

SEQ ID NO: 511590 - DNA, 328 bp, Homo sapiens
ctggctactcaggaggctgaggcaggagaatcgcttgaaaacccaggagacagaggttgcggtgagctgagattgcgccattgtactccagcctgggcaagaagagcgaaactctgtctccaaaaaaaaaaaaaaaaaaatttatttaatatactttttaaagacgtgagccgtggtttaaaaatttttgtgtggggaaacattttcttagccgaggtgatattttgttgtggccctcttataagtggatagccgttagaagaacgaggagagcccttatacaaccttataggccaaagagccatttctcaacattgccgaggcctcc

SEQ ID NO: 511591 - DNA, 244 bp, Homo sapiens
  misc_feature (226)..(226): n is a, c, g, or t
ctagttttagaaagtttcaatagcaacagcagacttctcagcagaaaccttacaagccaaaagagattagggtcctgtcttcaacctctttaaacagaacaacggtcaggcaagaattttttatcccacaaaactaagtttggtaaatgaaggagaaataaagtcattttaaacaaatgccaggggaattggtccctaccaaaccagcactacaagaaatgctatngaaacttctaaaactagg

SEQ ID NO: 511592 - DNA, 85 bp, Homo sapiens
gacagcagcttctacatctgcagtgcacccactggcgggaacaatcagccccagcattttggtgatgggactcgactctccatcc

SEQ ID NO: 511593 - DNA, 108 bp, Homo sapiens
  misc_feature (72)..(72): n is a, c, g, or t
  misc_feature (101)..(101): n is a, c, g, or t
ccctgacccctcctcaccaccgcgctgcacctcagggttacaagaagaactaggaaataacgccggccaccngacccctggagaggggccggctagaacanttctaag

SEQ ID NO: 511594 - DNA, 156 bp, Homo sapiens
gagaagccttaaagcatcctttctttgaccttctgaagaaaagtttctagatctgtaattggacagctctctcgaaggttcttacagactgtttcagtctaatttttaattcaaagtgctataatgccgctgataattgctcatctttgcatttgg

SEQ ID NO: 511595 - DNA, 205 bp, Homo sapiens
  misc_feature (39)..(39): n is a, c, g, or t
  misc_feature (84)..(84): n is a, c, g, or t
  misc_feature (86)..(86): n is a, c, g, or t
  misc_feature (120)..(120): n is a, c, g, or t
  misc_feature (132)..(132): n is a, c, g, or t
  misc_feature (169)..(170): n is a, c, g, or t
accctcctagcttactactaataattattacattttttntaccacaactcaacggctacatagaaaatccaccccttacgagtncngcttcgaccctatatcccccggccttttcctttntccataaaattnttcttagtagctattacctcttattatttttctaganntttcctccttttaccctaccatgagcctacaaaca

SEQ ID NO: 511596 - DNA, 956 bp, Homo sapiens
  misc_feature (954)..(954): n is a, c, g, or t
  misc_feature (956)..(956): n is a, c, g, or t
gagtgaatctctaaaaccaggatataaatgatgctgtatttctctgagaaaatcagacaaatggaagctgttcacacctccccttgcttgaagcatgatctaaattaattgtgacttgcataatgttcttgaggaataaaaacaacagtaacatggtaagcaggatagacataaggaagaacacaagttgatgttgaagtgcatttgactataatgaatcattgaagggaaaaggaagtgcgatattgtcatgaaatgtaatagagctatggtcttaatatactgtaaaatggaaaatgtgtgtgaattctgtgcttgaatccctgcgtgatatttgagactaagatctctgttatgatgtctaccagggaattatatctgtgtgcacttcacatttttcttaacaaaggagagagatcaactaactatcagagcaacatgttgaaggcaaaagtttccaatcatttacagtctgtgatcaggtgcctcttaccttttccttatttaagacaattatttggtacgagaaacacatgacctctctgcatatcaagtgggaggcacttttctaaccacgtattctccaggatgcacccacattaaacaagtagatctgggtttcctgctaaaacgttaccaaaataggtaaggactaaattcagatttggcttccttcatgtctaagacgattcgtgagaaccactgactttggacatctcaacctttagcttatactggggtccttgggggggatcaacgaatgggatcccccccagggtctactgggcacatggcacgacccttgtgtttatgtggccgaccctaccacgggcggggacaaacagcaaccccaagcgggattccaccgaaacacaagcgtttcttggccacgggcgtcacacacacacttctgggaatctccgtcgttagacataacagataatactaagatcngn

SEQ ID NO: 511597 - DNA, 348 bp, Homo sapiens
atatccatactgccactgtaataatagtgggttatatcaccctccttaatcattgagaaacttttgtccaatttttgacatattgtactacgatttgaccagattccagataattcacaaatagttttcttcttcccaagttaactcagttccttctgagcagattacggtacatgcagaggtaaagctgaagctggccaggggtatggctacagttcatgatccccattatctggtgctgattgaggctcacactgaatcacttgacaggttggttctggagattaccagtttccatatggtccacaggtggtttcttcaatcccagttcagtttgttccttccgag

SEQ ID NO: 511598 - DNA, 230 bp, Homo sapiens
gcgggggcgcgcgcgcgcaccgggagcgcgctcggaggcgagtggaactggatcgggttttctgccagcggcgtgagtttcggccgccattttacaacagcttcaacttcgtgccgtacacagggagcagccagccaccgttttcccgcaaccccgttaccattggacaagatttttctcctctcaaccccacggggagagtctatggagacatagctacacacacacgt

SEQ ID NO: 511599 - DNA, 201 bp, Homo sapiens
tttttactgtaccgggttcttcgaatgtgtgtaggatgaggggcatccatatagtcactccaggtttatggaggagttcttctactattagagacttattcgctatcgaagacgaaggcttctcaacatcctgcaaacattcattcaatcattactgctgttaacagcaaatgaatgcaacctcccgcatacataggcatg

SEQ ID NO: 511600 - DNA, 168 bp, Homo sapiens
cacgctttctctcacacagcactagcgctctctcactatcactcttctcacagagctgcgcgcgagtctcactactatcaaatatatctgtctcttctcactctatagctctctcacagatatatatctacatatagcgctctcattatactataatattatactctc

SEQ ID NO: 511601 - DNA, 115 bp, Homo sapiens
gtgactgttttaaaaaaaatagtggtggtggaatgctgtatcagctatcaggaggtgaggaggagaatcattgacccaagagcagaagttgagtgagccagactgtgtcattgca

SEQ ID NO: 511602 - DNA, 149 bp, Homo sapiens
caccttcgtccattgagatttacctccagaccttgacgtgggttttcggcgtgtgcagtgtggacgctcggcgtgtgcagagaccccaggtcagaatggacgaagttgttgccccacaccgccgcaaatcagagtggacgaagttgttg

SEQ ID NO: 511603 - DNA, 306 bp, Homo sapiens
ctgttacggactcccggtgtggcatgatgtccattctatctagcgttggcttgtgccaccctgtgcctcttgctcggtgctctggtttcctcagcacgcactccttgtaaggggcagagactgggtccaccaactccccgatgatgaagaagccccttcagtgccagtcgtgctggctcatgcctataatcccagcactttgcaaggccgagaagggtggatcacttaaggtcaggagttcgagaccagcctgaccaacatagcgaaaacccatctctactaaaaatacaaaaattagcttggcat

SEQ ID NO: 511604 - DNA, 923 bp, Homo sapiens
  misc_feature (282)..(282): n is a, c, g, or t
gctactttctcctgcttccccgtcgccgccggcgacatcatgagggacatcctgctcttgcaggccgtgacagatgcggcaaccaaatctgagcgcctatgtttacgggacgtgatcagcgatgatgcacggcatcgtacccctatcgggcacctatccaacggaggaacagtcggactctgctagcgtggtaacgcatctaatcggtgtactacagatgtaggcactacctgagcgagtgaaagtacagtgccaccgtggccagtgtcgtctgtggaatcntggacagccctcggtcacccattggagctctcgttgcgtctcgtgggcctctatcgggcatgactcttccaggcctggaacaactttgcgttttcaggtccagacgctggctgctgggacacaatctggtgccaacgggtgcactacatcagaaaggcgctgcgagcatggtgcgcacgtctggtgcctggcatgcttcgctgcacgacaagggcacggactgacgcagctagtcgcatctcgacctgcacagtgcgttatcgcaacgcctgtatcctcacgtccctcctggctctgcgggacgcgactgggagtctcggagattcgcggttgagctcgtacgaacaatttgagagtcacaggagctcccgagtgaacgcgaagttgccacccttggaccacgtgaggcttgcacactgtaactacagccgcccctatctgagggttctggttggcgatgtctgccctattctgcccacgaaaatattgactgggttccaacgtactgacacacccattgggcctggcaaggttgcccactaaacacatatcggcaccagtcgcgctgtgcattcaacgatgttctcaccgccagcagcccttcgggtcaccaccgccactgacccacgcaacggcaacac

SEQ ID NO: 511605 - DNA, 887 bp, Homo sapiens
  misc_feature (3)..(3): n is a, c, g, or t
  misc_feature (5)..(5): n is a, c, g, or t
cgnanaagaagatagagaaaaggaagggaaagagcctcgttcccctggccaagttttaagagtagaaggagggttgcaatccaggccgtggtacaggcccatagaatggctcggtcgggttgatcccccgtggaagatctcgccttaagagacgacgcttgtccgccctaacgatgactgcttttgagacaatcgttccttccccgagagggctgaagtacctttttcggagccaagccttttctgtcaaacgcgcgattcctgtcgttatgggcccccgcacgtgagggatgtgcgggaccccagcacagcagggtggagaagccaccggtcttttctacgatgtcccgggccaggtgcgtccgtttgtcgcgcccccccctcctgtctttggggaggaccaacggatgcattcccgacgcgtgcagtggccgccggtggccccgatctcctgcggaacgcagtcgatcattctccgctcatcgttgctccatcagagcggtacagcatcccttgcttcccgttggggcaaggatagaatttagtgattctcccggatactgagctttctgagtcttataatcccgagacagctgtttgtccagtttctgaaaccaccactcccacgtagaatcccacttatatgtcactcccgcgcttattgaaactctcccgccttgtatttcattcaggctatcagtaacaccccagtgctgtcttcttgcttggaagtacaaatgtaactgggaggaaccaccactaccgccacgaccacacatttcaacaagtcgccccccgcacgaagttgaatacccacccccatacaataatgaatgaaaaaccccggcccaaatgttttaaaaaaattagaatgcccgccacataac

SEQ ID NO: 511606 - DNA, 280 bp, Homo sapiens
  misc_feature (188)..(188): n is a, c, g, or t
gacgttccatgatgatacttttctgactatcgtcctatacgaagatcaaaggaaacacgagaatgcacctaacgcatgctaggttggaagggatacatcctatagaaacagctacccaattgaggacagtcatgacggaaaagcagccagggctgtctcttcaaagaggccaaatatcaagatcttgntcttcatcccctgctggaagaccgaattcctcctggtttacagatgaccaagtcgcccactgcaccaccacaatactgctcaatagtggact

SEQ ID NO: 511607 - DNA, 243 bp, Homo sapiens
  misc_feature (151)..(151): n is a, c, g, or t
tctaagaggatccgccttggggaaggcatcagaaccaccaggtaggtttgatggggatacatccgtaagagcaacacccatgtccagggcagtaggtaaaggaaagcagccagggctgtctcttcaaagaggccaaatatcaagatcttgntcttcatcccctgctggaagaccgaattcctcctggtttacagatgaccaagtcgcccactgcaccaccacaatactgctcaatagtggact

SEQ ID NO: 511608 - DNA, 167 bp, Homo sapiens
aagctcggacccattggtttacatgagatattgatgatctgactatatggccagggtgtcaggcacaatacttctggatgggcactgtagaggacacttgagagatgaaatcagtgacgcatgcatgcactatgaacaggcatggcctgctcatcctcactatgagt

SEQ ID NO: 511609 - DNA, 639 bp, Homo sapiens
  misc_feature (22)..(22): n is a, c, g, or t
  misc_feature (178)..(178): n is a, c, g, or t
  misc_feature (438)..(438): n is a, c, g, or t
  misc_feature (579)..(579): n is a, c, g, or t
  misc_feature (624)..(624): n is a, c, g, or t
  misc_feature (628)..(628): n is a, c, g, or t
agggggaaccgcccccaatatntcaagtaggttctttctattttccctaagtgtcagccagctgagaaatacagagaaagagtacaaagagtggaattttacagctgggcctccagggatgacatcacctatcagtaggaccgtgatgcccgcctgagccgcaaaagcagcaggtttntattaaggactttaaaaggggagggggtgtacgaagagggagtaggtcacaaagatcacatgcttcaaacagcaaaaaggagaacaaagatcacatgcttctgaggccagtaaagaccacaaggcaaagggcaaagcaaagatcacaaggccaagggcgaaatcaaaaactcctgatatggctgtattctgcccaactccttaggcagtcacaccttatggttgtcttcccttgttccctaaaattgctgttattctgtnctttttcaaggtgcactgatttcatattgttcaaacacacatgttttacaatcaatttatacagttagatacaattatcacagtggtcctgaggtgatgtacatcctcagcttaggaagataacaagattacgagattaangtaagacaggcatgagccactgcacctgggctattacatctgtantgtnactatatcaca

SEQ ID NO: 511610 - DNA, 106 bp, Homo sapiens
tatattggttgggatgatatcatttacgggggaaggcgcttatgtgaagtaagcctatattactcggggtcctttcagtacacgggaagaattttgaagtagatag

SEQ ID NO: 511611 - DNA, 140 bp, Homo sapiens
  misc_feature (121)..(121): n is a, c, g, or t
cccaatatcagttacatctggaatgtttgaacttgatcggaagatcttacagggctatgggttagagtgactgtgcttgagtaatataaaagcctctgcatggcatcgagacacaatgtcncggcagttatcgatgcgct

SEQ ID NO: 511612 - DNA, 419 bp, Homo sapiens
ccccactttggtcgcgtctgcgtcatgatgactccccaggatgtgcttcagacaggaactacagcaggacgatcgctcctcccggatcgcacccttactctccaaaaattgatggaaccataacactccgagatgagaggagaatagcccagtcacaacgaacgtggatcggatgcggagggaccagatcatcaactggatcgtccagctttcgaatatcattccagactgtaacgcaaactacagccagacgggagcgagtataggagggatcctgtcccaggcctgcgattacatccgggagttgcgccagaccaaccagcgcatgctggagaacttcatagaggccgagcggctgcagatcgatgacgagctcctgaggcctcagatcgagtagcttaataatgagaacgccctgc

SEQ ID NO: 511613 - DNA, 205 bp, Homo sapiens
gatggtcatgctgaaatccagcatactgggaggcgagatgggaggatcacttgaggcaggagttcaagaccacactgggcagagtggcacaaccccgtctctattaaaagtagaaaaaattcagccaggtgtggtggtgggtgcctgtaatcccagctacctggaagactcaggaacaagaaccgtttgaacccaggaggcggag

SEQ ID NO: 511614 - DNA, 876 bp, Homo sapiens
taaaaaaatttttaaataaaaggggaaaaaaggaagaaaaggggggaaggggaaaagagttggggaaacaaaaaaacaaaaaacaaacccactcccggccaaaaaaaagcccccctgggccccacacatcttgctgcagtttccccgcggggaagattctcctggcaattggggggagaaaaaattttaccttcccggccccacccccggtggtggtgtgtgccctccacaccaccccctcgtctctcaacggagatagttaaagggcacctatataattactggaaaacccgcatacccccaatttctacaaaaaattctccatttgtttattgggacaaacatatgacacagtacctttgcggacgtgccccacaaaaaaaaaaaaggggcggggaccaacaaaaatctccccgagaggcgccacacacatgagcgacaccccactatctgtgccacacggccgcccatacacggcgctacttcaaacacaacacaggaccggaacaccacgtcggcggcaacacacgccccggcagcatctttgggaaggcccccacacgggggagaccactgagcgacaaccaccacgaaaaccacgccgccacgatactaacacatcccgtgctctgcgtcacccagcccactcccgcgcaagcatcggcccacacacaacaaccacaactacccgcactgtgccaaaaccgacacaacaaacgccccaaacacaaccacaaaacaacaaaccactacagcaacacccactagcacagccaacagcagccaacaagcactcgacacaaacacgcaccaaacacgacagcaacatccaccaacacagaccacacaacagcataacactcaccccacaccaca

SEQ ID NO: 511615 - DNA, 881 bp, Homo sapiens
gcagcgacgggcaggacgccccgttcgcctagcgcgtgctcaggagtgggtgtcctgcctgcgctcaggatgagggggaatctggccctgggtggtgcgttcataatcagcctggccttcctgtcactgctgccatctggacatcctcagtccggctggacgatgacgtcctgctctgtgcatgagtccttcgtcccctggcgctcaaaggggatgctgggagacgaagggagacataaggctgcccccggacggtctggaatagtcggccccacggggagacaacggtgataagctggagattccggtgacataggacaccctctggtcctaatggagaacgcaggccgtcccatgtgactgctagcacagacgtgctgcaacgggcatccgggggagatcgcgagcaaccatgcgtctctacactcttgagccacacgacgtcatcatagtctcatcactaatgctgtcgccggtgtgcgctgagacggaagagcaagatctacctggctggtgaagtgagggtgaacgcgctgaacgccgcgatcgcccaggtgtcctgtcggggacgtcggggtgccccctgaagcattgaccaaggaccgtaggctgcccatgggcggatagggcgggataccaggacgcaagccggcctgggcccgggtcttcatcggcgatcaacgacctggagacgagggcgccttcgtgtactctgacatatcccccatgcggaccttcaacaaggtggcgcaacggtgagccaaaatgcctacgagaggaggatgcgtgaaaatgtggcccggcgggtggaaagacctggttgtccacccctgtctcctgtgtggtccgaccagagacaattgagcccgggggtgccatgg

SEQ ID NO: 511616 - DNA, 889 bp, Homo sapiens
ctccggttccgaccaggctaatgcttgagcagtggttgagtcagtagcccacagccgagccagctggcccagattgcgatgcggagaacgaggaggatgagcactctggtcaactacaatgcccccggtccagaagagcatcaggagatccagtgagcttggacaaggacgagcgagagcctgcgaagagtaccaggagtggcctgctgggccgcgtgtccgttttccgcagacctcgcaacgttccccaacgtcggggtgacgtgggctgaccctggtgtgcagctcggccccgggccccctggagcttggagctgaacgtgggcgacctgggagagcttcaagaagcattcgttagtgctagaaggagggatgctggagtaccggataataaatctctttccgggttaaccgtagagatagtgtccggcatgagagatacatccgagcatagcgtacaggagaaggtctgtcaagattgacaagactgacgtacatggtacggcgatgcttatgtggccccgggccgagtgagtacgagttcctgacctcccgtggaggggtggcacccaagggtatgctgggccggggcagctacagcgtcaagtcccgcttcacagacgatcgaaaagagcgaccacctgtcctgggagtggacatctcagcatcaagaaggatctggaagtgactgatgcccaggtcagaaggccgggtcagggccagactgacggacgtgacgacgtgatagcgcgtttttttttcccccccataaatgtaaaacctccaaaaaaaaagtagcgagaggacgcgcgatgcgggcccgcaacctggcggcggcctttttgtgggcacagcaagaaaaagcacaatagagcttgtccgtaaccat

SEQ ID NO: 511617 - DNA, 115 bp, Homo sapiens
ccggccctcacagcttcgggctaacccgctcaaaataaagacggatacttggtgacggattctttacaagctgaccagtgttagtgcccgaagctgtgttgaaaccctgtctcgt

SEQ ID NO: 511618 - DNA, 518 bp, Homo sapiens
  misc_feature (29)..(29): n is a, c, g, or t
  misc_feature (34)..(34): n is a, c, g, or t
  misc_feature (126)..(126): n is a, c, g, or t
  misc_feature (138)..(138): n is a, c, g, or t
  misc_feature (145)..(145): n is a, c, g, or t
  misc_feature (153)..(154): n is a, c, g, or t
  misc_feature (157)..(157): n is a, c, g, or t
  misc_feature (166)..(166): n is a, c, g, or t
  misc_feature (250)..(250): n is a, c, g, or t
  misc_feature (262)..(262): n is a, c, g, or t
  misc_feature (488)..(488): n is a, c, g, or t
cccagcctcttttaattttaaatttaagnttgcntctgaaagttttacctgtacgtacatttaaagatattttaagggaatctacgtaactccatccaagtcagaattgccagcttctcggagccnatgtgtctcttnccctacngcaacttnncangctcctttnccagccttccctttttccctttttattttcatgccttgatttgacttgtgtggtgggaacatgtgaactatgaaacttaaaccntgctgcccaccncagagcagctgtgaccaagggctgcctcaaggggttgtccacgcaggttgggctcctctctgctgctggacccaagactctgaaccttccaagggacaggcagttcttctaagaagggctcccctgtgtgtgagcaagaccacagctctccttctatctacagatgcatgagggttggaagagtctgggctgtttttagaccttctggtcagctgtatttgtgtancaacttttgtaataaatagaaaaaccctct

SEQ ID NO: 511619 - DNA, 269 bp, Homo sapiens
ccccggggggggcctttttcgggggggccccccctttttttaggttggggggaaaagagggggcccttttttccgggcttgccccaggggggtttttcccgggccgggggggccccccctttttttttttttcccccggccccttttttttccccggggggttccaggggggtttttttttggggtttgggtttttttttttttttttttttggggaaccccgggcccggggattatttttttttttttgggggggtttttttccccca

SEQ ID NO: 511620 - DNA, 744 bp, Homo sapiens
  misc_feature (744)..(744): n is a, c, g, or t
cgcagtgctcatgcctatcatcccagcactttgggaggccaaggcaggcagatcacatgaggtcaggagtttgagaccagcctgggcaacatggtgaaacctcatctctactaaaaatacaaaaattagctgggtgtggtggctcatgcctgtaattccagctacttgggaggcagaggcacaggaatctcttgaacccaggaggtagtggaggttgtagtaagccgagatcgcgctgctgcactctggcctgggtgacacagcaaggctgtgtcttggaaaaaaaaaaaaacaaaaaaactttaaaccttgaccagaaagggtaaaactactaggagaaacttagaaatacggggtaaaaacttccagtgacattgggtcggggcaaggacttttgggatattgaccccaaaaagcacgggcaaccaagggggattacagtcaacgttaaaaagcttctgcagaagcaaaggaaccagcagattacagagacaatctacagaatgggacgccacggttggtaaaccagaatctcattcactcaggctggagttgcaggcgggtttgcagtggtgcactcacgggctcactgggaaccttcaaactccgtgggctcacagctgatcctccacactcaagctcctgaggtagctgggactacagggcattggcttcaccacgcccaaagtaaatttcgggatattgtggtaagagaccggacttggacaaccgtgcccaggctgn

SEQ ID NO: 511621 - DNA, 1596 bp, Homo sapiens
ttttttaataaacccccttttttttaattattattaaatgtccccattttcataaaaatataaggcaaccaagaggcgtggtcaccattttctataaaaaccgggtcatttaacaaagcggcattccaaaggttaaacgtgggccaacccacacaggtacatctcagagaagaagaagacacaaataatataaaggtgttattatactcaagggtgtacatattatattgtgagctcccaatttatattttaaaaggctcaggaaaagcctgtgcaaataggcggggaccaaatatacgtgtgagtgggtcgcccatgtgtttctccagtgggatgtggcaccagacacagacacactgtgagagtctctcacacacaagagtgagagagagacacacacaaactatctctctatattatccacacctatctctctgtggagaaaaaagagtgtttgtgtggtcacagacatacagagacgcacacaaagagaatagtagggtgtgcgctctcacagcagacacagtaggcgtcggtctgtgtagagaccccaacgtgtgcacaagaaacacacgcagcacacatatatacatacgcgagtacacacaacggggtgtgtgccacagaaaacacacatctgtcgtgcacgcgtgcgcgtagaaaacatccgtgtgggggtgtaggacaaagaggcgcgccgcatacagagaacacaaattgtgttgacccccacagcaggagaagaggggggacaacagttgtggtctgctgacaacaggacgaggcgaactattctataaccagcactgctctcctgcaaacactcctttctattacgaacagaacaccttcacacgtcgggcggcagaccacacactaataaattcaacgaggcgtcttctctcttaaaaacacacgagtgtgtctcctttttgtctgggccccaaccctttttataataatagtagaagcggcgggcgaaagagcgcaacaaaatattcccgagaagatgatcatacaataatcctttcaccgtccactatactctcaccgcggcaacaaaagtatttccacacaagagggggtagtgggaggcggcaccacccaagcagaggtgcgggttcgactgcggcgataatactcttacgagagcgccccaccatatggggggtgtcccccccacacatatgtggagggggcggcgacaaccccactatttaagaagaccccgccccctaatatgtggtgtttgtgctgctcccccctctataaaaaagggcgcccgtggggagtattaactaccaccagagtttggttctcactacaccaatttataccccttttttcatctttttcaccaatattgtcttacggactgaaaacattactcacaacaacagtgtgcacaaatatatatggggaccccaatattcgccgctgcttcccccaatatattcctacacgggtctataaaaaatggcgaagagggggccggctcatataaagaatacaccactctagggggggcccccaagaatatacggcggatcaccacgcgttttttgtgacataaggggtgcccccataagaggagga

SEQ ID NO: 511622 - DNA, 202 bp, Homo sapiens
tcgagctcggtacctacgtttccacagagcataaaggtattatttttacctgccgaaatttccccgcagctcaagcttcctatttacagctttataaaaccaaaaccttcatctgtgggtttaatatggatctaacaatctggtcgaacaatagcattgttataataaaatcatgcactccgtagaaaacctaaccctccct

SEQ ID NO: 511623 - DNA, 146 bp, Homo sapiens
  misc_feature (62)..(62): n is a, c, g, or t
  misc_feature (65)..(65): n is a, c, g, or t
  misc_feature (69)..(69): n is a, c, g, or t
  misc_feature (71)..(71): n is a, c, g, or t
  misc_feature (73)..(73): n is a, c, g, or t
  misc_feature (75)..(75): n is a, c, g, or t
  misc_feature (88)..(88): n is a, c, g, or t
  misc_feature (96)..(96): n is a, c, g, or t
cgcccggtgcactgtgtgacgatgagtcagtggttagtcggcgccaggtacgtgtgcgtgcnggnccgntncngngtcagagctcganccagcggngcccggagagattcggagatgcaggcggctcggatggccgcgagcttggg

SEQ ID NO: 511624 - DNA, 206 bp, Homo sapiens
tatcccaggataatgtatcatcccccttcgtccgcactgtatcggatagacacacgaagggggatagacacacgaagggaggatagacacacgaagggggatagacacacgaagggggataagacacacgaagggggatagacacacgaaagggggataggacaccacgaagggggatagaccacacgaaagggggactcgacaca

SEQ ID NO: 511625 - DNA, 604 bp, Homo sapiens
cgacactcttggtcggtagttttttgttttgttttgtttaatttactgattcaatttctgaacttgtactggtcagttcagattttcactttcttattgtttgaatcttgggaggttgtgtgtttccaagaatttatccatttcctctagattttctagtctgtgcatagagatgttcataataatctctgagaatcttttgtatttctgtggtattggttgtaacgtcatctttgtcatttctgattgcacttattttgatcttctctttttttttctttgttaatcttgttagtggtttatcagtcttgcttattcttttgaagaaccaactcttggtcttatttatcttttgtatggacttttgggtctcaatttcattcagctcttctctgattttagttttttcttctactagctttgggattagattgttctttttcttctagttcctctacatgtaaggtcattaatttgagatcttcctaacctcttgatgaaggcatttttagtgctataaattttcctctctacactgctttagctgcatccaaagatttgggtaaattgtatctctattttcattaatttcacagaattttgt

SEQ ID NO: 511626 - DNA, 390 bp, Homo sapiens
tctctagagtatccccccaacatacgcaggaatgataggtatcagatcgatcatttctataaagtttcagaggtaagctaggctcaggcatggctgagattccagaacttcaatctactagttttccatattctagttgtccacccattcctcttttcagcttgacatcattctctccccttgacaggttttctccacgtggagatcacgtaacatctggcagctccagaactgcgtaccagtcacatttttatgatctttagatcaaaggttatgcttcctccagccccaagcactctgattatcccttcataactacacctgaaaaaaaatcatgtggcaaatatatagagtctgtgactgactagccccgagttacatgcccacctc

SEQ ID NO: 511627 - DNA, 117 bp, Homo sapiens
acaggaaacatatgacgtcatgggaccagatgtcgcagccgaggtgaggtgtgcttagctctccacttctgagggtctcagctaacgtgggtccaaagcacggcttgccaggcttgt

SEQ ID NO: 511628 - DNA, 869 bp, Homo sapiens
agcaggctggtactggccggaattttggatgccagtgccagcctcgtgagccagtcatgtgagcatgggagctgggtggaaactgacgccaggaagagggtatcgcgccatgagaggtgcgactggtggtgctcgggaagcctgacagggcttttgcgcacagctgccggctggctgctacccgcccagtgccatggccccggagaacgcagcgaccaggcacccagtcctggtcacctgcagcggaggagcatcgccgatcgcatgcgagcgaggcccggagcggggccaccgcgagggaccctcgcccagaccgcctggtgccgccctggatgtgcactaaaatggaacaagccacttctaccagcgagcgactcatacacagctacgggatacggccggggccccttgggtggcctctcgtctacgacgacttacaaactcgcgtgaaacctgtgcctggcggtcaaaccatgtgcctgagcccataccgggaggtcgtcaaaatgctgcctggtgggctctgcgggacccctggcccaatgacgtggagcagggacggtgttgggctgtgccatggcttacctttattccattgaggtcacaagggggcttctgggaacagcgacagggccggccggttatacatacaaaggcgttccgagccatcctttaccgggagacgacaatgtgggagaagcggccccattggcaattttgggtcccacgcctatatgcgagggccaataacgtggaggcgcgtttgaattcacctcggtaagtcggaacagggcccgttacgaagccctccgccctgtgggtaatccatgggtacccgttttattaaccgctcgccggcgtgtggtgga

SEQ ID NO: 511629 - DNA, 210 bp, Homo sapiens
  misc_feature (16)..(16): n is a, c, g, or t
gctctgcttagaattnggaagttaacttatgcacgcttaactatcttaacaagcttggagtgcaagagattgaagagttcaaatctcttgcactcaaagctgttaagatagtaagcgtgcataatgatcccgtaatctgcgtagaaggcggaattaaattaggcggtatgaatgtaccgagacattgcttaatcaatatcgtactgaagt

SEQ ID NO: 511630 - DNA, 117 bp, Homo sapiens
  misc_feature (26)..(26): n is a, c, g, or t
  misc_feature (35)..(35): n is a, c, g, or t
  misc_feature (95)..(95): n is a, c, g, or t
ggaacgtaagtacaagcagttaatcncccaccatngggcatgattaacaaagcaacccccttcccccgagtgagcgaaacccccttttcccttcngcttgcttagatgttccaaatt

SEQ ID NO: 511631 - DNA, 160 bp, Homo sapiens
  misc_feature (1)..(1): n is a, c, g, or t
nattgtgctattactcccaaaggtcccaacttttcccagtgccattaccatggtattgtatatccagtggagaaatgtattatttccatgatcaaatgtagtctctgttaaggtcaagttttcttttataagcctttaattcatcctcagtgactctgga

SEQ ID NO: 511632 - DNA, 516 bp, Homo sapiens
acatcccgagccctagccaaccatggattactttccgtctctatagattgcctattctggacaagggattatataatatatggcctttcatgacaggcttctttcactcagcaaaatgttttcagattcgtccatgttgtaacatatcagtacctcattcctttctattgctgaataatctattgtatggatatatacctcattttatttatctattcgtctgttgatagatatttgggttgttttccatttttgggccattataaataaagctactatgaacattcatgtgcaagtttttgtgtagatacatgcttcttttttcttgggtatatgtaagagtgaaattgctgggcaactctgcatttaaccttttgaggaggttagactgttttccaagcagcagcatcattttacattcccaccagcagtctatgagtattccaatttctctacatcctcaccaacacttgttattatctgtcttttttattatagtcatcctagtgggtgtga

SEQ ID NO: 511633 - DNA, 289 bp, Homo sapiens
  misc_feature (165)..(165): n is a, c, g, or t
taccaccttgcgcacttctgcaccaggcgcacttcatgttgggcgacagagtgagactccatctcaaaaaaacacaaaaaatgtaacccagcaacgattcattaattatactagggatgctattaagggaacagtttaacaattatgggccaccagtcaaacggnctgagaaaatacaatagcattagacatgatactagcggcgaaaggtgtagaatgtgtcatgattgggacccagtgttgtactttcatccctaataatactgctcccgagaagtgcgcctgggtg

SEQ ID NO: 511634 - DNA, 879 bp, Homo sapiens
tgacaggatcctggctgattccggaggagtaactaacatcaggatggtagagctctatggctgatctcatgcaagaacgtaggctatgggttgtgtgcagtagtgaagaattgtcgtcaatataatcgtgcacgttggtgtccgggagttcacagcgtgcccgaggttcgcaaggggtttggggactgatggttcagaactctattcagggttaccagtatggcattccattacagagtatttctgctccgggcagtgggatctggagtgatgggaaagataaaagtgatggagcacaggcacacacatggcaatgtagaaagtcttgattgacgttcttaaagaactgaatccaagtttgaatttcaaggaagtaacttatgaactggaccatcctggagtttcaaattcgtgacagtaaaggacttcataatgtggtttatggcattcagaggggttgggtatggaagtgttcccagtagacctcatatatagaccttggaaaccatgctgaaggccagctctccttcattcaagattcccttatacttccagagatcttctgtatgctgactatccctgtcatactgttggcactgatattctgaaagcaccaccagaggtatgaccacattccgatgacaattggcacatggcacagagctggacttttgattggaatctctgcgtgagggttggagaaggtgggcaagatcgagcaagtccaaacagtcttcagttccctatcaacatgtgcagaaatgctgggatggcttacctaagattacacactctggggtaccttgcgcatgacgttactccctctgtgcacatttcctgaaaactcaaaccaggaatttggactcttgatggacagcc

SEQ ID NO: 511635 - DNA, 136 bp, Homo sapiens
ttcgagctcggcacccattcaatgtcttgcggccatgatgcttcgtcgtcgccaaagctaacttgcttttgatgctcgcgtttgttctcaaacgctccgtggtgaacatcatcgtatcgttccctgttggcgggag

SEQ ID NO: 511636 - DNA, 294 bp, Homo sapiens
  misc_feature (28)..(28): n is a, c, g, or t
  misc_feature (30)..(30): n is a, c, g, or t
  misc_feature (40)..(40): n is a, c, g, or t
  misc_feature (50)..(50): n is a, c, g, or t
cactgatattccatcatgctacacgtgnanaggcagtggnactccttagnaaagtctggaggagctccaaaacgcttctcctgaactgtcaccttcatgttcgaatcattgacaaaatggcatccatgacctggatacatttccttccccaacagggctcctaacatcatgtcctccctccccactggccagggaactttttttggaggggcttcctttattttttcctactctttcaaggcgcacttttgataaagggttaatcaaaaataaaggggactttggatttaatgg

SEQ ID NO: 511637 - DNA, 260 bp, Homo sapiens
atttagggcgtctttgggagtagttgtgggtttgatacaaaatctcgtttctcacccagtgtagagtgcagtggcacaatcttggctcactgcaacctttgcctcccaactcaagcgattctcatgcctcagcctcaagagtagctggtattacaggcacacaccaccatgcccatctaattttgtatttttagtagagatggggctttgccatgttggccaggctggtcttgaactgctgacctcaggtgatctgtctg

SEQ ID NO: 511638 - DNA, 206 bp, Homo sapiens
ccgaaagcaatctaacacatgtaattaatgtggccacagtgttcagttagcattcaagccttgtaagacatacaataatttatactggagacaaactttgcacgtataatgactgtagcagcgcctttagctttctgttcaaggcttaataaccgttagctagaccatagaggacagaaactttactaatgtactgaatgcgtccg

SEQ ID NO: 511639 - DNA, 697 bp, Homo sapiens
gcctaaatccgcagggtttgcactatacccagtgtgccacccacgtgcttcaccggagggcatggccgtaaccccagactgccacacgatttttacaaaggtgtcttgtgaataccatccgattgggggcagtcctcgcccacaaaatatctagggggcccccctcccccttgttttattctggggcaggcgcgcccctctgcagttcccccgaccagtttcttttcacgactcgggtggcgccgcacacccccggcggggcacaatcccccctggtgttggctcaccctgcgtgccgcgtcgccacctaatgtgttcggcccaccccgcttcctgcttaggcggcgacgcgtgcggggtgcccctcttcacattttcggcgagggtctccgcgcctagtcctgcccttggttcgcaccagctgtacaaaggatagacatactctactacattggctgtttgttgcacgcccgtcccctctttgtttgtctaccccgtgatgtatcctgagagtgtcgagccacactacccatctagcgagtgtcaaatacgacgagtttgttttgccacaatgcgcggagtgctgctgcgtgttgcggggttacctgtgcgaggcttcttatgatccgcctcaagagaggtcgaggcgcaatgataagaagataattcttcaatcgcccaacaatagcagaaaagt

SEQ ID NO: 511640 - DNA, 595 bp, Homo sapiens
cgactagatcctggggaatcgacagactgagttcacaagggttgaactagtttacagccccataactcttaagaccactgcaatagcttatatatcgctgtcctttccaaccacttttctccctgaaacacatatcttacttacccttagttgcctgctcaaaaccttttaatggcttcaataaccttggaatatcaaattccttaaaaccattcaagatgtgctataaattaaatgccacctagacttatgagcggaattggcacagtctgtgtcccagccaaatcggaacacattcaaccttttctaaaaccatttcatttccctgttctcttctggtgcctatagcccatgacagtctacctccgattctcatcacttttttagtctacttgatatcatactcttttttccaaggatggactcaaatgctaatacgttggtgagttcttatgccaatactagaggaaaaaattaggtcattttccccctcagtgttatcattaacaggaagtccaacttcacattcatcatagtctcatgtacattacaattagttgttaataatctgtctgctccaagtagaattcaagct

SEQ ID NO: 511641 - DNA, 510 bp, Homo sapiens
gcaattttcctgtctcagcctcccaagtagctaggactacaggtacctgccatcacgcctgtggtcccaacactttgggaggcggaggtgggtggatcacttggggtcaggggattgggaccagcctggccagcatggccaaagccccatctctactaaaaatacaaaagttagccgggcgtggtggtgcacacctgtggtcccggctacttgggaggctgaggcaggagaatcgcttgggcccaggagatggaggttgcagtcagccaagatcatgccactgcactccatccagcctgggtgtccgatcaagactgtctcaaaaaaaaattaattatcattttttacaaaagatccatctacattcttcgagacggagtctcacatctgttaaccaggctggagtgcactggtgcgatctcggcatcactgcaacctccgcctcccagattcaagtgagtttcctgccggagcctcccgagtaggtgggactacaggcacgcaccatca

SEQ ID NO: 511642 - DNA, 159 bp, Homo sapiens
actgattatctttaccacaattttcccattcgtcttatcttcaataaaattccacacactatcaaactaaatcaagagtgggatccgtctagagtctgaccgtgcagtgcattgcaatgccttgtgcactgtgcctgtgtcctgttttaccaactgtct

SEQ ID NO: 511643 - DNA, 168 bp, Homo sapiens
atttgtattagaaaagtaaagttgaaggaaataaaatttgcattcttgttttaagtgatctttaattgtatatatcgcggtagtatgttcaaaatccactaagtactgtgacttttagctgcaaatctttgctctttgcttttttttttctttctcccccctccccag

SEQ ID NO: 511644 - DNA, 528 bp, Homo sapiens
gtcaactctgtgagttcacacatcagaaagaagttctgataatgcttctgtctagtttatatgtgaggatatttcgtttttcaccataggcctcaaagcgctccaagtgtccactaccagatacaacgaaaagagtgtttccaaactgctctatgaaaaggaatgtttaactcagtgagtcggatgcaagcatcacaaagaagtttcggagaatgcttctgtctagtttttatgtgacgttattcccgtttccaacgaaatactcaaagctgtcctaatatccacttataaagtctacaagaacagtgtttcaaaactgctgtatcaaaggaaatgtttaactctgtgagttgagtacacgcatcacaaagtagtttctgaaaatgcttctatccactttttatgtgaagatatttcgtttttccctaaaggtctcaaatcgctccaaatgtccacatgcagatttccaaaaagagtgttccaaactgctctatgaaagggaatgtcaagtctctgagttgaaggcaa

SEQ ID NO: 511645 - DNA, 139 bp, Homo sapiens
  misc_feature (31)..(31): n is a, c, g, or t
  misc_feature (39)..(39): n is a, c, g, or t
cttgctctggtggtatcctcctgcgcttgtncttctgcnctcagctcctctccttgatgattttctgtaggttcctccaggtctcctccagtgcctccatggtaaaccaggtgtaggggttggaggagtaccacctagt

SEQ ID NO: 511646 - DNA, 701 bp, Homo sapiens
gggccaatttttcttgtggattttttggagaccccggttggccctttttagaacagtgctcccccttctgtccgggtcattaactccgctgttgcgccttttgtcataatccagggcaatatgtcgtgtgccccgacgtcgtttcccccaattagggtcgtgctgccccacagacaatttgggtttccgccccccatcccccatcccccatcccgttcgttgttaaccccccctcttgtttttcttgcacaaaataactggaaaaccttttttacaaatagttttcttatggcgccatcatacacttttctctatgttctgttcacatacctctcaccccccaccatccccaatactttttttggaattattaaactgccgcgtttcttactcggcgagtagtggttctaacctcttccctgttttataagaagccctctccgctgttgaacattcatggagcgtagcagcccacctccgctctctccaaatatgtgcgaggcataatcacttaatgtgtgagtaacacctccatctatactctccctctcttttcccatctcataattaccttctctcctgttttcccctcacaccaacactttggagcaagcgctcctctctcgatgactctcctcccttgcggtccagacacaatccacaaccgccactttcttcttctccacacaacatgaacaaac

SEQ ID NO: 511647 - DNA, 693 bp, Homo sapiens
atcagttggatcgtggatgcgcggttagaggcctgaatatgatggtctgcgcaggtatgcttctggaccatgctcgactgtcatggttgtgtaatggttggcctgatagattatgcaagtagccatattgtactaggcgtgcatgcttgcgtctctgagatttcacgaattcaggttgggatatggactgagtatcgtgatggagatgagcgaatgtggcaggtgcacgtgggtgattgaataccaagtgtggtcaaaggacactagagtgtgtgagcctcaggtgacattgcgacatgagtgattgggatgggtcggcttggcataaaactggtaagggtacgtaagagagttacggtgcccaagaagggactgcagtggagtggctggatagctataatccactacactagatacgcaaacggactacccgcggaacgacaggctgcgcagcacggactaaattgcacgatgaaccttcaggaagcacgctcatgggccagacgggttcggacgacttaggtgccgcctactcaccgggggcgacccgaccgacagacgcttcccaaagacatggaggccgctcccgttcacactacgaatgccgggggtacttcccacactgtgaccgggcgcccgctggcgacaaacagcaaggtcgcacagcatggacaataacagcaggagcactcc

SEQ ID NO: 511648 - DNA, 154 bp, Homo sapiens
gggtacggagggtccgtcacgatcgaactgctgcgctatttgtatatattcaaataggatattacaattttgagggagagaatgatgtaagtcctaaattacttgagaggtgtgtttggatctagaaatctaaaaatatgggttttgttattgt

SEQ ID NO: 511649 - DNA, 393 bp, Homo sapiens
gctcgacgacagagtcttgctctgtcacccaggcatgagtgtagtggtgcaatcatagctcactgcagtcacttgacctcccggaatcaagtcgtcctcccgcctcagcctcccaagtagctaggactacaggcgtgtgccatcacacgtggcttattttgtaaaacatttttttctgtagacacggggtctcactatgttacccaggctggtctcaaactcctgggctcaagcagtccacccaccttggcctcccaaagtgctgggattacaggggtaagtcactgcacctggcacatagatctcctttttaaggctgaataatgttccgctctgtgtgtgtgtgtgtgtgtgtgtatccatttatctaccagtggacacttaggttgtttt

SEQ ID NO: 511650 - DNA, 373 bp, Homo sapiens
  misc_feature (77)..(77): n is a, c, g, or t
  misc_feature (160)..(160): n is a, c, g, or t
cttgaccgcatcgtgaaggaatctggaggaaagctgaccaggcggcttgtgaacagtcagtgcgaatttgaaagagnaaaccagatggaacacgacgttgggacttctccatctgtggatcccattgtaggagagccaggtactgcctgtgagactggantgacactggaagacttcagtctggagtgtttacggaagaagagtttaacaacaaggataaaaggaacaaagtcactccagtgtgatatctgaattatgggccatacagtttatatgcaccgcattatgagtaccacattcgcaaatatcaggcaaggatgaattcatgatgttaatctattcaacctatggaggaagactctgatattcacaa

SEQ ID NO: 511651 - DNA, 312 bp, Homo sapiens
ctgtccttcccaccagcatactacttcccgcacttcgacctgggccacggtctctgcccaggttaagggccacggcaccgaaggtggccgacgcgctgaccaacgccgtggcgcacgtggacgagatgcccaaagcgctgtccgacctgagcgaactgcacgcgcacaagcttcgggtggacccggtacaacttcaagctcctaagccaatgcctagctgatagaccctggccgaccacctaccccgacagagttcaccccatacagtgtcctaagcctcgagagatcctactagacgtcgacctagcaaga

SEQ ID NO: 511652 - DNA, 117 bp, Homo sapiens
cccaaactctccttcagattacactcatcccactctaagtacccacgccatcacctaatcacactcgaagcagccctgcagaaacatcgcccattatctctccatatcatcccccaa

SEQ ID NO: 511653 - DNA, 230 bp, Homo sapiens
  misc_feature (77)..(77): n is a, c, g, or t
  misc_feature (160)..(160): n is a, c, g, or t
cttgaccgcatcgtgaaggaatctggaggaaagctgaccaggcggcttgtgaacagtcagtgcgaatttgaaagagnaaaccagatggaacacgacgttgggacttctccatctgtggatcccattgtaggagagccaggtactgcctgtgagactggantgacactggagactcagtctgggtcaatacttgcaggtcgtcaaagaggataaaggaccaagtcactcca

SEQ ID NO: 511654 - DNA, 377 bp, Homo sapiens
  misc_feature (15)..(15): n is a, c, g, or t
  misc_feature (61)..(61): n is a, c, g, or t
ctagaacccaattcnctgtcccagcaggagggctcctcatctgctcccaccctggctaaantttgtatttttagtagagatgcggttttcgccatgttggccaagctggtctcgaacttctgacctcaggtgatctgcccgcctcggcctcccagagtgctgagattacaggtgtgaggtcgggagtacgagaccagcctgaccaacatggagaaaccctgtctctactaaaaatacaaaattagccaggcgtaatggcccatgcctgtaaaaccagctactcgggaggctgaggcaggagaatcacttgaacccgggaggcgaaggttgcagtgagccgagattgcgccattgcactccagcctgggtgacaagag

SEQ ID NO: 511655 - DNA, 273 bp, Homo sapiens
gatggatacctaagtggtgtctatgagagatatagaacatactacccatatccagctgatgacaagggagcgtagacaagacaagcatgacaagaaacatgtcctggtcggatgaagctgctggagagcaatatgcgcccatcagcatttgcccacagctcgttgttcctccttcctcttatctggtgacctttctactgattgcattgtacctctttccctgattggactcaagattggggggtatcctcttatgagtctacctgcacgcat

SEQ ID NO: 511656 - DNA, 488 bp, Homo sapiens
cacgctcattatataaatagcatcaaagcaggactcatactccatgtggcagaaagtgtctatgtactttcaagggcctatgctttacaaagaaaattcgtaacatgttctatattatagtggtgggcagaaaaactggagtgaatcattctagaaagtatgattttctgcagcagagaaataccaaagtatttctgtatttttaaaatttttatgcataacttcaaaggcatatgattttcccccatgtaacctacccaatttcagtaactttattattttgaaacaaatctcagatgtaacatcattttatcagtcaatatttcattatgggtctgaaacagaattgaagtactttttcagaacagacggatcatttattatttgaagacctctagaatatgaatgtggaaaattaaaaggtcaaatgggaacccatgaaaatgcaaaagagtgacgtaccaatgagatatttcaggcacccaggt

SEQ ID NO: 511657 - DNA, 176 bp, Homo sapiens
tttagaagttcaatagcagaagtataggggttagtcctggcgatattatgctggatctaatttttcatctttccctgcggtactctatcgtatgcgcccggtttcactttctatcggcctatactttgctattgaaacttctaaaactaggtgctattgaaacttctaaacctcgg

SEQ ID NO: 511658 - DNA, 320 bp, Homo sapiens
aaggatctagacaaggtgttcattgcgagccaaccatcgtcagacgattgcgtgtcttgatcacggtacgggagggaaccgtggcgtacatgagtgaggcccagggatgagacactccaatactgagacctagagtccagatgcttgtaggagccaaggcgttgtctaggtacttatttaaaacaggcgaatcagcgcatgccatttgtacttcagtgctagcctcagatttgcacagacgggtactgtcgagtatgttctatgatgggccaagtgctgtacaacagtgaacagaggactgcagaggtcctcctgcctgg

SEQ ID NO: 511659 - DNA, 108 bp, Homo sapiens
  misc_feature (92)..(92): n is a, c, g, or t
gctcgcgcgcacgagggaaaaggcaaggctttgttccaggtgaatcagtggctaacctggttagaaactgctgaagaagaagaatcagaggnagaagctgactaaaga

SEQ ID NO: 511660 - DNA, 116 bp, Homo sapiens
  misc_feature (98)..(98): n is a, c, g, or t
acgaggatgcagccagtgctgtatctcagcagcgtcatagcatagcagatctgttgttgcaagacagagtaagcatccggactcgtctccgcagcatntcatcagctcctccagct

SEQ ID NO: 511661 - DNA, 400 bp, Homo sapiens
aaaagccatttctactaaaaatacaaaaattagctgggcgtggtggtgcacacctgtagtcccagctactagggaggctgaggcaggagaatcgcttgaacccgggaggtggaggtttcaatgagccgagatcacaccactgcactttagcctggcgacagagcgagactccgtctcaaaaaaaaaaaaaagtgttatttcttcctgaccaaaccttttgtaaatactggaagaacgcggcatactatagggggttaaagagtgtataacctttttatacctggaattggctttgggcctcaaacccccaagcttcgtgccagttaaaaatagtggcggtaaacgccactcccacaatttaaggattttagtttaaaacaacaaaaattagcgtgggttg

SEQ ID NO: 511662 - DNA, 161 bp, Homo sapiens
cctctcttactgtatctaggctagagtcaatggttcatctcggtcactgcaacctctgcttcctgaattcaagtgattctcctgcctcagcttcccgggtagttgggattacaggcacccgccaccatgcctggctaattttttgctgttgttgttgtttt

SEQ ID NO: 511663 - DNA, 136 bp, Homo sapiens
acggaagcatacagaatgctagaataagccgggctcggtgcagtcctggggatctgagtgagtcggggggttgagctgctgcaggaaaagggtcggaacagcagaggggacagggggctctgtacagaggacaagc

SEQ ID NO: 511664 - DNA, 256 bp, Homo sapiens
ggttagtgtcccggggggaagggtggctggtggttaggcagtgctctttggggaagagatacctgacagggtcttcaatggataagcacgacaaggcaaggccacagtgagaaggaaaggagaagagaaggggacttgggcatggtgagccaattgacaaatggccagtatgtgcaatgaaacattggtaccttgggatgtgaactacaatgcatgtcctgtgacttgctagagtggctattgtccgataatgaaa

SEQ ID NO: 511665 - DNA, 783 bp, Homo sapiens
gcggtgagccgaattgccggcgtcttggcgattcggcccgagagctccgttttcgctacagcatggtggcctactgagacaggctgactcagctacatccgatactcccagatctgtgcaaaagcagttgagagatgcactgaagaccagaattcaaagcaaatgctgagaagacttctgggcagcaaccgtaacacacttgtgacaacgtaaacgaaggaataattctaccctgaataaagcttgaaatgctacatttccaccggtgacagattgtgtggggcacattgtttatgggccagacttgacacagggatctcatttccagtgggaacacaacacacacacaaaagaaaaaaacaaaaacactttttgcggggcggcgatagcggcccacgaggaagaaacgtttttcaacgaacacacactttcgggtgggggggcggcggcggggcccacacagatggtgtgctacggtagacaccaggggcggcacacaccgcgtggtccccaagaagggaaaacacccggggcacagaagacaccatagcgccggctggagagtgttcctccaaccaagaataaaaaagaaacggcgccgggggtgagaagcacgccgagcggagttgtgtgcaacaacaaacatcccggggaggaggagagtagcaggaggaggcacacaagcaaggggggggctcacctaacacaaccagggggggagccacacaagagagcgacccctcgatatcaacaaatataagcccccggcggcggagaggcgag

SEQ ID NO: 511666 - DNA, 162 bp, Homo sapiens
caagtttaatttcaaaaaaccctttttttttgagattacttttggggtaatatttaaaatgaaagaccttttgtaaccctgtaaaatacatagggaatataacattccagggtatacaaaaaaggcaaattttttaatcaaataaagggccttattaaatta

SEQ ID NO: 511667 - DNA, 245 bp, Homo sapiens
tagacgtatactcatctgtggacctattttcatatccaaactataaaaccactccttaatctctcccaatggagggcacggctttagagcattagctttggtggtctactttgactggcaaagctgtaaagctatttattactccttcattgcaaatttctgtctccaagtctatgtgcaaattctgcaccgttggacagaggctgagattaggcaaatcagtgtatcaaaatttactctcattt

SEQ ID NO: 511668 - DNA, 1599 bp, Homo sapiens
  misc_feature (214)..(214): n is a, c, g, or t
  misc_feature (1599)..(1599): n is a, c, g, or t
tggggggtaaaatttttaactctctctacaaggtttttccctagggtccaaaagagctggttccttctggggactaacagttaaatttacaagggggattaaagaggggttcggggggcaaattttaaaggtgagaactaaagatcctatctgggacaaccagctatcaccagggctcggataggttggtcggcctcataccataataaattcnttccacaacatatttgggcgtacatataagacggggtggtggctcttttatacgcgtggtgcctatagggtacgctcggtcgtgggtatccggggggtctatacgcttggggcctctccttggcaaaaggtatatttctcataagtataatcttacattatattggcaagaaggggtaatagcggggtatagagtcacttgagcgataatatttatacgcgcgtgggggtataatacatttttgtcacactcgtatctcgcctgtggcggggtactatatatattcatatttggcgcgcacagggttttacaaattttctctatatctcggcctataaatactcttataatgcggcgcgtacacatggggttgcgcgccataaagggggtgggctcctgggatacgatacagggggcgagaagtggggagtttgggggcgcctctttcaaaaaattttattgaaacgccaaatttgtgttagacaccgcttttccgggagcatgcgggacttcatacattggagaacgcacagaattctgggaagacatatgtgtcttgggtcacctgagaaacggcaagtgtttattggtttccggacaaaatgcggtgggctgggatccaatcagaatttttcgggcacgtcacaagggggaacaaggactttttccatttagaaacaagcgcggtccaaggaaaaaagtgggggggtgggagtttccctataaaaaaacaacggctggggcaagtcctctcaacattcgtgtggtcagctcaacacaaacaaccgctcgtcggtgtgttacattatcaccaacgtgttggaacaagaaattgtccgaggaatggcgacctgcggacttcggaacccaagcattggtgcggggggtatacaatcggtcgacaaccacaatcaacacgttaccacacgagacaacacacaacctgtcgtctgtacttttcgtcgcaccacgcatctctgcaccccacacgatgatttgttcgactcaccacgcacgatctgtacgacaccaccccgtcataaaaaacaagtgcagaccaatcacacgcttcacgcacaacccgagagaacacaaccgtgagtcggttgtgggatacaacgcgaccacaactgaggcacaccagctccacacggagaccacagtggccacgcccaacacttgccggggcgccagaacctggcacacaccacagcacgcgtacgacagcggctgacaaagaccacgaacccaagcaggacgatacgcgcccacgacacggaacaagacggagcgcaccgccaaacaagaacaccacaaaaacacgcgactcaaaccagcacatccgcgcatgcacggctagtccccctactacgacgatgcgtacn

SEQ ID NO: 511669 - DNA, 338 bp, Homo sapiens
tgctttggcccacctctgcgaaggttcagagggctgaccctctctgcaaaactctccccttcctctagaccccaccctgggtgtatgtgagtgtgcgaaggacggtgttgcatccccagtggctgccgtagagtgcggagacctcctggactagttcggcgaggagactggccactgggggtggctgttcgggactgagagcgccaagggtctttgccagcaaaggaggttctgcctgtaattgagcctctctgatgatggagatgaagtgaaggtctgagggagcgggccctggggcgaggccatctctgcctgcctcccttgcaggcgccagcggg

SEQ ID NO: 511670 - DNA, 958 bp, Homo sapiens
gggagtcatccggacttctcatgcacccggaggtcatcgggggcctcatgaagtggtacaatccgcatgaaggcgtcttcaaggttcctgcgctctgatgctgtggccctactatggggccaaaaggaagaagaacatcaacatgacctactgacgatacgctgagtccgggccatgaggtactactacatacgggaagatctctggaacgcgttcggatcggccggcgactcgtctaacatcgtgttggcacaaactcaagcggtctggaagcatggaagaggctctcacagagtcggaatccgagcgagttggaactataccctggtacccaactcgcggaccactcgaggcctgcataccttcctgggaggacaggcaggccagatggcccctccactggggaatgctccagctagtgctgctggagagaagctgatttctttggctgtattgtcagccatcgctcctgggactccggagatctatggcctcgcctccccaccctcctcttggaattacaacgccctggggtattgaagctgactttatagctgcaagtgtatctccgtgttatctggtgcctcctcaaacccagtctcagacactaaatgcagacaacaccttcctcctgcagacacctggactgagccaaggaggcctggggaggccctaggggagcactcgtgatggagaggacagagcacggggctccagcaccttctttgctggactggcgttcaccatgccctgcatcagtgcttcgggctccacagggcaggggtcagagcactccctaattctatgtgctatataaatatgtcagatgtacatagagatctattttctctaaacattcccctccccactcctctcccacagagtgctggactgttccaggccctccagtgggctgatgctgggacccttagtatacggctccgagctcctttctccc

SEQ ID NO: 511671 - DNA, 99 bp, Homo sapiens
taagttagtcggaacgcgggtcttcttctggattgggaaacatgccaacgaggaggagaagaacggcgcagcaaccactgcacagtgaatactcaagac

SEQ ID NO: 511672 - DNA, 669 bp, Homo sapiens
gcggagccctgccaggtggcatgtgcgaggacaaggacgaggaggagaaggatgtgagcagtgagtgaggaggagggatgctgtgctgtgaggcccagagtgtgggctgggctgtgtcctgcgttgcactgctgcacaacactgccctgtggccagctcctgctccgtctgcggtgggcccaacgcaggctctcgctgccactggaacccacccccacactgcacatttatgacgggagaccccgacaagaggactgctttgagccaggaatctcaggaccccgcccagggagctgccagccgcaatggggccttcgaggcgttatccccaattgggggtcctcgcggcggaagtggcagtttcacatgacgaagaatccagggtgggaacccgtggcaatgatccgggaccattggtacctagtgccacgtatcgcttgataacgggctacgaacgtacggataagattatcccatttcatgatacaccctcatacggcttgtcgacgcgtgggtaggaggaccgccattcgacctctatgacttctctaagccatttggtcttcaggagccaccgatgaccgatacggctcggcaacaaggaggcagcgctcgattgtctctattgatcgtctagtccctacttttagcttttgatctccacacggt

SEQ ID NO: 511673 - DNA, 568 bp, Homo sapiens
gcacgcgtgtgctcatgaagggcccgtgataccgactgttcgatctctgatgcccgccaaacatggctcgataatgttcctgatgatgggaataaaaggaccctgggtcccgtcacacatatcggatctgaggatcatcctatggtctggcgcgactaccagggcgggtcccagaagtccataccaccatggatagcaccatataaaaggatgtaatctcctgtggagaaaactacaatgtgtacacccttcggcagtacagctgcagagaagtgtcccattccatcagcacacgtcgtgacccattttactcgtgccataaattgggcgacccaagggttgcacgagtacccaattaagtcctgtccacagcttaccctgcaggcttcacggtgcccactcaggtttcagcgcaaaattcgatcttgcacttagtcctctccacaatggtgtctagggcaacctatagcaacatgctgtcacaagcaaaggatgcggtgcccaaccttgaatgcttgccactcattcctccatgtgtcccaagccgcagagaaaaccaaaacccata

SEQ ID NO: 511674 - DNA, 669 bp, Homo sapiens
  misc_feature (617)..(617): n is a, c, g, or t
cgcccggtggggcgccccattttatttttttggcccccccccccttttttggtcccaaaaatcttcgaaatcccccccatatttgcaaaacccccccccccccccccccaaaaaaaacacctcccccccaaaaagccccccaaaaacctttaaaattttgcagaactcccccccccccccctttttggaagtttccccaataccccccccaacccccaaaaaaaacccccccccgcccgaaaatttaaaaaaaaaaaatttttcccccaaatttttttggggcaaaaaatttttaaatttttttttttaaccccctgtgggtttgccaggggaaaaaaaatataaaaccccttttttacccccccaaaatgtctggttttcaaagtttttttttaaaaaaaaatcccaatgtttttcccccccttttaacccctcctttaacccccgtttttttaggaaaaaaaaaaaatttttttccattatatccccccttaagcgccccccccccccccccttttttttttgggggaaatttctttaaaacaacccccctttttttacaaaaaaaaaaacaagagggggggtaataaattacaaaaaaaaccctttgaatcccncttattaaaaaacaaaataataacattaaaagaacaaaaaaaaacaaaaaca

SEQ ID NO: 511675 - DNA, 838 bp, Homo sapiens
  misc_feature (10)..(10): n is a, c, g, or t
  misc_feature (93)..(93): n is a, c, g, or t
  misc_feature (97)..(97): n is a, c, g, or t
  misc_feature (158)..(158): n is a, c, g, or t
  misc_feature (180)..(180): n is a, c, g, or t
  misc_feature (211)..(211): n is a, c, g, or t
  misc_feature (236)..(237): n is a, c, g, or t
  misc_feature (281)..(281): n is a, c, g, or t
  misc_feature (286)..(286): n is a, c, g, or t
  misc_feature (303)..(303): n is a, c, g, or t
  misc_feature (311)..(311): n is a, c, g, or t
  misc_feature (324)..(326): n is a, c, g, or t
  misc_feature (333)..(333): n is a, c, g, or t
  misc_feature (341)..(341): n is a, c, g, or t
  misc_feature (345)..(345): n is a, c, g, or t
  misc_feature (353)..(353): n is a, c, g, or t
  misc_feature (357)..(357): n is a, c, g, or t
  misc_feature (361)..(361): n is a, c, g, or t
  misc_feature (365)..(366): n is a, c, g, or t
  misc_feature (368)..(372): n is a, c, g, or t
  misc_feature (676)..(676): n is a, c, g, or t
  misc_feature (721)..(721): n is a, c, g, or t
  misc_feature (829)..(829): n is a, c, g, or t
tggggaagtnaacacaaaatccgtcagataatcttttctcataagttaaactgaagcaaaacatctacaatttcagctaaaactattaaagtnaggngtgtgctgctggtttcagaatagttgaaaattgcatctgaatccttttagttgttaatgtnaaccttgtttgttttatcaggntggggggggtggggggttcctttccagtggngagctgctcatttccccttccaatnngtttcttacaacatgtgccccaaacgtgagggaaccagccagtnaaggngctatttgccagggtgngggaaagngggttctacaaannngtttggntaataganaatnactctggnatgnttgntaanngnnnnngggggggaggctgatagattcaacagcagattcatatacttctccacccagcctcaaaatacacagaactgaagagcatcttgtgaggcctcaattagaactaaaaggaatcttaaaatgcaggattttgagttcatgtcacatcaaataataagcaaaactgtacgtacatggttccggattgagcctgagacctccactcccagaagggggaaaaaaaattacaaactcaagtattttccacagggatgtgttctcagggacagagctctggaaccagcctctgggtttcgttcagtcagtntaaaataccagaatgtccacctgctagcaagagacttacccagtnttctggaactgattgtactcatcagaggcaaacccagcccttgacacttttaacaccccaaagggctgaaaggtacaacctccacttggcgctccggctccctgagtnaatgtctaa

SEQ ID NO: 511676 - DNA, 127 bp, Homo sapiens
gccgaactcgtctggactttgccgctacgcactccgcctcgagatctccctggactctccctgcgcacatggggtttgaacggtattttcagccttatttctgttcttgtattgatggtcttgtgtc

SEQ ID NO: 511677 - DNA, 222 bp, Homo sapiens
ctgcgccggcgccggctgccacgcctgttcacggcgctcaccaagtaccagcacttgggccacggcggcgtcgaggtggccttgtcggcggacggtatcggcgcggcggcgttgtgggatcccccgggcaagtggcagcagacgcgcggcgccgagctgcgggccgtgcccatgatgctgttgacgttcggcatccgctggtgctgccggccaggcggccgc

SEQ ID NO: 511678 - DNA, 250 bp, Homo sapiens
tcgcaccatcaacaactaaggatcatgttcccgcgcaagtatgttttgtaaatcgcgaatcgcccgagggttatgtcttccctgcgtgcgccgattgcaatgcgaaggatagaaaatctgagcaagttgtggcgttccacatccacgccatctcaggtcacgcgaacgaattttcccgcacctactctggacttaaaaacaacagcccctcggccttaccaaatccctatatgtctctcggcgagaaggc

SEQ ID NO: 511679 - DNA, 1394 bp, Homo sapiens
  misc_feature (218)..(218): n is a, c, g, or t
  misc_feature (966)..(966): n is a, c, g, or t
agcggagtgtctccgggacagcgggactccggcatgggtcgcctctgtacaccgttctccacggaaggaacgtaagcggtgcgcctggtcccacaattcccgaggagacgagaacgccaggcgccgagacaaggtccagtgtctcgaggaagagagatcggagaaggagccgctcgatgatccacagtgccgaagcatgcatctctgagtcatccganagactgacgtagatcccaacaatcgtcccattaccacgctttcgtcgcaactgcaaaccgagaatgacactagtaccttgaagggcggaaagcatagatgagcaccaaatgagaaacctaaatgaggcaatacgtaatctgggcctggacttgacctagaaaggcattgaatcgtataccgaagcgcgtcgcgaaaatgaagaagggacgcagacgcgatgagatgcctgatggaattacttcaataggggccttttgcacgttcccttttggagctacacaagcacaaagaccggttgaactgatccgtgttgagaatagggactcggtgaatcaccacctggcaccttatagcgccagtaccaatgggttcttctgcaggagacagaaagcgaagagcataccaggggcacgtatcaccaattggacaggtccggggaaaccaccaggcgcaaggcacattgcccaagacgaacaagccctctatgcggtcactcacccagaatacgacgcttgcaagttgatagcctgccccggacgccttggcaaagcgggcaatgcgcacattcacccgaccgccgcgcccccattccgaggccactcatgcggactcccaagggagccgcagcaggcacaccattccgcacaggccacacttaccgctcgagcacactacacgcaaaaccgtaacccgccccatgccggccccacccgcaacacgcacacaggcggagacgccctacgcacntgccaccttacaccccctatccaccaatcaccggctgccaacacagcgccccatcccgaccccaccatcccctctcgatcaacacacaccgcgaacccaattcattctcgcccacccacgacccacacgcgtctacaccccgtctggccccattccgccaccgcgggacatcccaaagagccgctctcacagagatccctttcccctaatcacaccaaccaacaattgcaaccatgcagcaacagaccattgccctcgccacaacggacacagcggccacacccccagtacaccaaatgcctgggaccacccaccatcactccccggtgggcacagcacaaacaaggacgcaccagacgagccgaagcaaccagcgattgccccctgcccgccatggcgcgccacatcacccagcacaacctgacaag

SEQ ID NO: 511680 - DNA, 422 bp, Homo sapiens
aataatgtgtgccaatcgaaggggttcagtatatcaaagagatatctgcagtcctatgtgtgttgcagcactgttcattatagccaagatttggaagtaacctaagtgtccatcaacagatgagtggataaagaaaatgtggtacatatacacacaatggagtactattcagccatgtaaaagaatgagatattgtcatctgcaataacatggatggaactggaagtcattatgttaagtgaaataacataatgagcataaagacaaacttcacatgttctcacttatttgtgggagctaaaaattaaaacaattgaactcatggagatagagtagaaggatggttaccagaggctgggaagagtagtggagaggactaaggagggggaagtaggaatggttaatgggcacacattatggag

SEQ ID NO: 511681 - DNA, 215 bp, Homo sapiens
tgagagaccgtgttgcaatgatgcggcataaaaagaaaagaaaataaaacaaaacaaaatgaaaaactggagagtggctgctgtggtgcaatgcctttgtggatcactgggatgcaggttcaatccctggcccggaacagtgaattaaggatctgatgttgccacagctgcggctaaggttgaaattgtggcttggatctgatccttcattgcaa

SEQ ID NO: 511682 - DNA, 464 bp, Homo sapiens
aaaatatatatcaaaatacaattaaaaccctcatgaatccttcatattcactctgatatccacattgataatattcttaacttccctgtttgtataaaaatgttatcctcactttggtttatttttgactctgcatcctttatctctctttctgtctgtctctcaagaattataatccagattttaaaaaaatcctccttaaaatcaatacacaagacaataaaaaagataatcgttataattaataatttattgatttttacagcatttattctaatatagaaatcacaaagacattctcctatatattcttacaatattttaacttattgtttagtctacaggaaattgattgatacagtgtaactacatggatgatttaaatttgtgtaatattccaattttattttgtttcccatagattacctatcatccatggccaagaattgtagttgttggctctt

SEQ ID NO: 511683 - DNA, 1147 bp, Homo sapiens
cgcggtggcgcgtgctgtagtcccagctactcgggaggctgaggcaggaagatcccttgagcccaggaggttgaggctgcagtgagccatgatcatgccagtacttcagcccgggcaatagagcaagaccttatctctaacaaacaactaataaaaagacctcacatttagacaatgtggtagttgtgctggttcagaaggagcccagcttatgcatggctaagggcaaatccctgcaatggcgaacggacagtcgaacacaatggttgactaaccctgagaaacagtctttgggcaacaagggtgatctcaggttctcatgcagggacaattataggaacacaagagagcaacgccaggcacgaaggctgagaactttattccccattcagtcaaacattctgcttttaagtcaaagatcctgcaaatgggccttttcaccaacaagccccttgaaaattcaggcagaacaaagacttgggcctggtgagttgagtgcctacgccagagttcttgctgccgtgattcagtgccagttagaaacctgtgctcttctttagcctggggaaaaaccaaagtcagcaaaaccagatcaactcagcaaaactttcgtccgcgagttattgctaccctataaggcattgtgcgtacgggactggtgcgcctctggcacagacccatacgaataggaaccttcctgtaagccgttacaccttagctggggtacaggggcatcagcgcgattataccccacacacaaacacaacaaacacaaccccactaactaacaataatactcactgacaattagcggaacccccttccattacaggaggagagtagaacgagcaacacaaatctcatttggcacacattattaacgggcccatgggtagcgacctgagtccggccgcactcgccgatcacccgcacttttcacgccgcgtaggttagccccgtagcaggcactaacaacagcgtgccaagtgaaacaagcattaaaacaaaccacgcggggggggaggccgcgacccccacaggagccaagtatccagaggaagagtgacatgaagccctacgacaaaaaaaaaagaaggggcggtgggtcgatgaacttatgacatctcacgcaatactaatcgagaaa

SEQ ID NO: 511684 - DNA, 386 bp, Homo sapiens
  misc_feature (223)..(223): n is a, c, g, or t
tggcaaatgctgaaaggttcaaggtggatctaagcccctaccctaccatcagtcacatcaacaaggagctgctagccttagaggttttccaagtgtctcacccccgtcgacagccagatacccctgccgagctgaggacttagctcccaaaccatgcccattggtacagggaagggagtaggcccagattgctgggtgttctactgctgtgaagagacaccantgaccatggcaactctgacaaagaaagacgttcaattagcttacagtttcagagattcagtccattatcatgatggttagaaagcaaggcacatgtaaggcagtcatggtgctggagaggtagcagagaattcacatctggatccaaaggcagcaagaagagt

SEQ ID NO: 511685 - DNA, 301 bp, Homo sapiens
gcggtagtcctgtaacggctgcactccttttttcttgtgtcgggctctctttaaatcttacgttttttaatcatgggtagatccttgatcttaaacttagactcgcagggaagtctaatctgcctgttctttatctcctaacaacaaaagggcactttcttaatcgttttttactacagatcagactaagggggtttacccttaggcattaatcgaagacgttgttttagaggctacctttttgtcttttatagtttggctatatggaggtcgacctttcttactagactgagactgacta

SEQ ID NO: 511686 - DNA, 100 bp, Homo sapiens
cttctccagaacctccaggcaaatcaggagcacaaacacagagcaaggcaccgtttctttaaacaatggctttaactgtcgaatgagctctgccaggggg

SEQ ID NO: 511687 - DNA, 392 bp, Homo sapiens
caccactcagtacgccaaggccaacgcacatactgaccgatctggccctcgacgaacctgctccgccagtctccaacccatgagcgatggctgggctctcacaccctccacggatataatgagttgcgacatggggcccgacggcacgcctcctcctcgggtatcactagctacgcgctactacggcaaggattacatctccctgaacgtatggtacctgcgctccttcgcacctgcggcggacaccgtggctcagatcaccctgcgcttcttttacgccacaggaatatgcagaggatttcaggacctacctggagggcgagtgcctggagttgcttcgtaaatacttggagattggcaaggatacgctacagcgcgcagatcctccaaag

SEQ ID NO: 511688 - DNA, 190 bp, Homo sapiens
tgctggtatttcctgggtcagctcagcctcctcctcggtaacactttctccgtgaccagtgttgtagagcagtgtgaccacgctgcacgggaagcacctccgtcccttctcctgcaccagtgtcctcaggacttgcagccccccgagcttcaggaactgctgctggcgattaggggaagtggcgcagaag

SEQ ID NO: 511689 - DNA, 122 bp, Homo sapiens
tccatgcatatggtattttcgttggggggcatgcacgcgatagcatgcgagacgctggtggaagggagcctgacaaagccttctgcacatcaaacttgtccttcagagctggtggaagggag

SEQ ID NO: 511690 - DNA, 325 bp, Homo sapiens
ctatagtcatcctatagtgtataaaacactacaacttgtccctcctaattttatgtcctttaacaaatctgtcctttcctcctctcttccctttcagccactagtatcctctattctgtttttacttccatgagatcttttgttagcttccatgaattagaacatgtggtgttaactttctgttcatggcttattttacttcacataatgacctccatatccatctatgttgttgtgaatgccaggatttcctttcttacggctgaatactattccgctgtgtatgtacaacatgttttcttttatccactcatctgttgctgga

SEQ ID NO: 511691 - DNA, 284 bp, Homo sapiens
tggcgggatcctcggtaaaaagctgacattgaaagattttgaagagctttagttaaaaagttaaaaacagcccagcgcagtggctgacgcctgtgatcccagcacttttgagaggctgaggtgggcggatcacttgaggtcaggagttcgagaccagcctggccaacatggctaggccccgtctctgctaaaaatactacaagaaatagccaggcgtgttgatgcatgcctgtaatcccagctactcgggagactgaggcaggaggatcgctttaaccccggga

SEQ ID NO: 511692 - DNA, 879 bp, Homo sapiens
gagactgtggtcaggcggctcggattgagcaggactttgccttatcccagttgattgtgctcaatactactgactgtcgcttgtcttctattcaccatggcttcttctgtagtatccaggtgaatagaactgagaggaagggacgtgccatcagagccagggtcgttatggagctggatttctcgatgccgctcggtcaaaagaatctgttccaggagaattctccccgtttcttcctccaatagaagaacggatcgtttctcctggacggcatattcacgtagacgattcatgtaggaagagctggtcagatagacaagacgcatgtcccatgaggctgaggtctagaaagcagcgtggctggatcaaacgagagctactgagccaagcaagtgcctttcgaaacatggcacctagatagagcaacatacaacttcagttaaaatgggcagcaagagaaactaggagctccactgagacatggagagctactgaagaagaaaccgacgaggcacaagatggtgtgccaagactggtgacgtttgccggagaccagggataaggcgcatgggaaaaacgtgccgggacaaggaaccaagggaatccaaagaccctgctggagcgagactgaaagctgactagtttgtgtctgagaactgactttctcccccatccccttcctaaatatcaaaggactgtactggccagtgtccatttatttttgtccctcctgacaaatattttaagaagcctaagtgtaggactgtatagggtaagatccaggatccaggactgtacgcatggtggttaacggggcaaacggcggcagacaacctggaagggggtttcactccttttctcaagggggtgggcctcaaa

SEQ ID NO: 511693 - DNA, 329 bp, Homo sapiens
gttggcaatctggtgtccagggacgatgcgagcacaattaacagtgacatatcgccagttaggataagggttagtgaagagccccatatcgtgatacatgaaggaataactcatgccatttggaagtccttggtcaacattctcttattagtcatgtcactatgtaaagcatacagtatttcaccattcacgtagatctccaaacctctagcggatactcaaaatccagagtgtcccaagccgtcattagtcggtgcagagtaagtgaaggatccctttccctcgatctcctccctcagtattcgaggcggtcagaactagcgcatgga

SEQ ID NO: 511694 - DNA, 124 bp, Homo sapiens
gagatagtcaaatagaagcggcgtaagagtgtttgagctgcatgtgcgtgcttgatgcttgtctcttttgatcgtgtgatataagcagggtgactcactggaatggggatgcttgccatgtgta

SEQ ID NO: 511695 - DNA, 874 bp, Homo sapiens
tctatgttaggaagaaggtcgaagggcaggaggagggagcccgttgagttgtgccgctgttcgccgtgtgtagtgtgtctgttggcacctttggggcttccttccaacggtgtctgtcacacggggttgcgctgggagtggccacgcctctttgtgccacctgcaggttgggaccaacaacaactctgggacggaagtgttgtgctccctctcccgcaagaggtgtgctgctcgtcctctgctggagacgctaatccaccgcggcgttgttgggtccccctcatgcaggacctcctggcgaggacgctttctctttgcagtcaagaggcccccgcctttctttcattcaaacccgccccccgcttgtaataaattttcaactctgtcgatcggtctcctcccccctatgcaatattctgttccgtttaacctccccagtgttcagtagtcattcaactttttgtccccgctcgtccttcatcacgacctccactgagaaataccctggccagtggttccaataccccaaatagagctggtttttcaggcgtcgcttccccacacattgctgactcacacgctccgtctttttcttgcgcgcgaacttaatcaagggcggtctaatgacgcacccttctttggcgagggacccttctctctatcttcgggaggctgaatccttatggcccccttagtctgggcggggcatatcgcacgccttcttctcgtcggggggattctgctcttactgtgcccccccccgatgcaagctctgtcagtctggccggcgggaggcatatgtttttcgcatagttctaacgaaggaggtgcgcgcctcatcgtgagccacccgcgaagtttttccacagagaca

SEQ ID NO: 511696 - DNA, 241 bp, Homo sapiens
acataagacggagcagctgagccccagccacgacagcgagcagcagcagcactcgccccaacagatcggctacagccccttcaaccgtcccacactacagccccgtcctacccgcccagtcagcgcgctcacagtacgagtacaccagaccaccagagacagccccccaggcaacagctggcagccaccatctaacaccaccttgtagcagccgctgcatcgccgtgctccccagtcgtga

SEQ ID NO: 511697 - DNA, 383 bp, Homo sapiens
  misc_feature (60)..(60): n is a, c, g, or t
cgggtcatgccccaactcgcagtgggaagatgcaagcttgctgccatgcgaggatggggncctaggactattgggtgttctgagttctaaagaaaatgcagaccttggcttggcgcggtggctcacgcctgtaatcccagcgctttgggagaccgaggtgggtggatcacgaggttgaggtcgagatcatcctggccaatgtggtgaaaccccatctctgctaaaaatacaaaaattagctgggcgtggtggcacgtgcctgtagtcccagctacttgggaggctgaggcaggagaattacttgaacctgggaggcagaggttgcagtgagctgagatcgtgccactgcactctagcctggtgacagagtgaggctgtgtctc

SEQ ID NO: 511698 - DNA, 1188 bp, Homo sapiens
  misc_feature (213)..(213): n is a, c, g, or t
  misc_feature (239)..(239): n is a, c, g, or t
  misc_feature (241)..(241): n is a, c, g, or t
  misc_feature (251)..(251): n is a, c, g, or t
  misc_feature (255)..(255): n is a, c, g, or t
  misc_feature (261)..(261): n is a, c, g, or t
  misc_feature (279)..(280): n is a, c, g, or t
  misc_feature (283)..(283): n is a, c, g, or t
  misc_feature (311)..(312): n is a, c, g, or t
  misc_feature (320)..(321): n is a, c, g, or t
  misc_feature (541)..(541): n is a, c, g, or t
aatggttaagggacttgacccaattctgacagccagagcgttagaggggccagcggccctaccaggcgatcttgtgtctactctaggactgggcccgaggatggcttacctgcacctgtgactcagtctagtttaaaaatctgccacctgcacaggtatttttgaaagcaaaataaggttttcttttttcccctttcttgtaataaatgatanaattccgagtctttctcactgccttngnttagaagagngtanctcgtnctcactggtctacactgnntgncgaatttacttgtattcctaactgttcnnatatgctnnattgagacttactgcaatgaaggcgatttttattcatgtattaaagggaaagcaaatctctcgaagatcactgaaggtgactataagatagctgcatatgcctacgaaaagctctgaattcaagtgtcccatgttggctgtcacaagaggaggtgagtgaaactccacaaccttaccccctttttgactattactaaaaggtgccttagcatgtcgttgntatgcgtgtcagcgcacgtacagataaggctggttgcacggatgttctctccatctgagactttcacgaagtaacagaagaagccatgttggccaaacattataaaaaagacaaataaaaggaaaaacataaagataactgtggtgcgtaggcgtgtggcctgtggcttcactggaaaaaaatgctcttctcaagaaaaactcattttgtagtgagtggtgcccggggagtccccacgtttagtgttcttcgtgtgtagcaacgtggcgctccaataggagttgtgacctcatacgaagggaagacaataatccgctgggggcctcataagagacactcaacggtcggggtgtggggagggtttttttccccaactcaccagattatttcagattaacaacacaacggcacgctcggggggagacgagttcaaacgagcagatacggtgtggtctttcagtcgtgaaaaccaagaatatcaacctcacagaagagttcggggtgggagttacttcatgcggaagcggagccccatgtcaaaagacgggtgtggagactgtgccccatgtaaagagcaagccgaggggcggcgttagctcacggagggggacaaactgccagcgaatttccctcgaaagattagaccc

SEQ ID NO: 511699 - DNA, 388 bp, Homo sapiens
  misc_feature (213)..(213): n is a, c, g, or t
  misc_feature (239)..(239): n is a, c, g, or t
  misc_feature (241)..(241): n is a, c, g, or t
  misc_feature (251)..(251): n is a, c, g, or t
  misc_feature (255)..(255): n is a, c, g, or t
  misc_feature (261)..(261): n is a, c, g, or t
  misc_feature (279)..(280): n is a, c, g, or t
  misc_feature (283)..(283): n is a, c, g, or t
  misc_feature (311)..(312): n is a, c, g, or t
  misc_feature (320)..(321): n is a, c, g, or t
aatggttaagggacttgacccaattctgacagccagagcgttagaggggccagcggccctaccaggcgatcttgtgtctactctaggactgggcccgaggatggcttacctgcacctgtgactcagtctagtttaaaaatctgccacctgcacaggtatttttgaaagcaaaataaggttttcttttttcccctttcttgtaataaatgatanaattccgagtctttctcactgccttngnttagaagagngtanctcgtnctcactggtctacactgnntgncgaatttacttgtattcctaactgttcnnatatgctnnattgagacttactgcataataactgtatattcctcacaagttctgaattcacgtcccagcttctgtc

SEQ ID NO: 511700 - DNA, 233 bp, Homo sapiens
gtctctgaggatccccttaaatcgccagaatgttcatgtgaatacgcccctcccattgatcttaatgttcgcgtctttttttttcaggtccgaatggaagttgaagggccccttgtttagcatgcctggacatgcatttcttggcccccttcatctcccttcccgatctgtacttacacttttcacgccccttagtctaagggtatatggaattctagttcccttttcaaggc

SEQ ID NO: 511701 - DNA, 407 bp, Homo sapiens
agtgtaaactccagccgggccagatgtgggtgaaaccccggtctctactaaaaataacaaacaaataaacaaacaaacgaaagtcaggcatggtgctgggctgcctgtaatcctagctactcaggaggctaggcaggagaatggcttgagtccaggaggcagaggttgcagtgagccgagactgtgccattgccctccagcctgggcaaaaagagcgaaactccatttcaaaaaaaacaaaaaaaattataatatgtaccctgcaatcaagagtccctaaaaggaaaacccccatacacacgcatacacacactaaaaatgttaaaaaagtaaaacatatgcaaaatcaaagacacaacacactatgtgggagaacagcataacctttgaaggcagacaccctaacc

SEQ ID NO: 511702 - DNA, 194 bp, Homo sapiens
aaaaaattttttgctggggggggttaggggccataaaaatttagggggaaaaggtgttcctttttggggggggaaaaatggggggccccagggttggggggtccctttttacaatttttggccctccggggggaacttttttacttttgggaaaggtaaaaccccatataaaaaagggcctggtttccttttga

SEQ ID NO: 511703 - DNA, 919 bp, Homo sapiens
acgccccgggtcttaaaggcttttcagcgcactatttgccgtcacaagccagttccacctacccgggcaaggtcccgaccatgaccccgccacgggacccccacaaacaaaaccggggggccccctatccaaatggggtgggccccaaaccatgcagccagaaggggaacgccagcgaccagatggccacaacggacttaaccgggcaaccaaagagaccttttccgaaatcatagggaatcaatcaacaatgacaaccccgtcaccaccggagatttgcatgatagagcatcgatagaggataaccccccagtattaggtcaaaccacaacgcccggtccgtggctcacgcccaaatcccccgcaccttgggagcccagtgggtggatcacactgagggcacagagttcaagacccgcccggcccacaagggtggaaccccctctccgtagctcaaaatatcacaatcaccccggcactggtggcaacttgcctcgtgatccccgcttctcaggaggtcttaggaggagaatctaccttggaccccggaggccagaggttccactgaatcagaggttgccgcgtactgcactcccaccctggccaacagagggagacttccctgtttccaaaaaaaaaaaaaaacctacagctgttcaaggacccagctgaccaggtcaagtgtgcgcccttttctggtctttgaacaccatcatagaaagtgaccaatgctgcacaagccatgaagaacatgaactataaacgggtagactaactgccccgcttagacacttatctatgccaccaaacagctggatttgtcacatttatatcttcccatatgggaagtattgagatccaaaccggattcccttgatctcattatattaagctaataaactaattttttgaattttta

SEQ ID NO: 511704 - DNA, 479 bp, Homo sapiens
  misc_feature (29)..(29): n is a, c, g, or t
  misc_feature (68)..(68): n is a, c, g, or t
  misc_feature (251)..(251): n is a, c, g, or t
  misc_feature (258)..(258): n is a, c, g, or t
  misc_feature (444)..(444): n is a, c, g, or t
  misc_feature (448)..(448): n is a, c, g, or t
  misc_feature (469)..(469): n is a, c, g, or t
  misc_feature (479)..(479): n is a, c, g, or t
ggtggaaatcgaatcaaggttcaaaatantaacccgggttccgtaagcgtaaggccccgaatgatgangaaatccgttcgggaaagcccggtaaccaaaacgccctgaataggccctggtagcgaatttgcttccccagaattcgttgaatgtcgaatgccgtcgcgtccgaccatggggaaaaggcgggtcgcccccttggccatcactttgaacccggtggcgcacacgagtacatcgatctcgtactncgccacntcggtggtgaaccaccgccgccggtgtgatcttggtgatgccctcggtcaccaggtttacgtgcggcaggttataggtcttgaagtattcgttgtgcatcgacggcccttgcagccgagttgatacttcggcgtgagcttctcacgggtctcgcgatccttgacctgggtgcgcatccacagcttncganagcgcttcggcgccaccgatncagcggtccn

SEQ ID NO: 511705 - DNA, 1032 bp, Homo sapiens
ttgtggttggttctctcccgctccaagtttttttttccccttttgttgtggtggttgttcttcctcacccccgcgtgggatgaattctctggtttacacatccagcggcgccgcgcggaagattatttttttgggccctctttttagtatggccgtctgtcatagccagtgtgttgtggggcaccgcgcgttttttcgttctcgtgttgttggtttttccccatcattatttattcctcgcgcacggtgttttttcttctactagggtgggggggacaccttttttgttccgcgccaggattttttggcggctgttgcaggtcgcccccggcaggtttttccccccccgttttttttttcggtgggcgactcatactcctttttcgtgggtgtgttctcccccgccacgcgtttctccccgttcttgttggattcttctcttttttttgtggtgccttctcccccccccctgggtgggtctcttcttgttggagacgctgtcggccccatgggtgtttcttcatcatgttcgttggggagttttttgtatgcaccacttctttggtgggcgttgttttccgtgattaaccctcttggccaagatatttttcctcccgcggaattcactctatctctctgattcccccccgacgaaaataggggggggtgtacaccacgtcgttatcttctttattcacccctcacaacaagagagagaatctccacccaccccacgacttttgtgggggaaataaccattcttgtcccccctctttgtgtgcacggagccactctatagagacccacacatttctttatattgtgggtgttctccgaagacaaaattaattaatcaacaccacctatcatcttggcgtcttttttgtgtggtagccatgctcacacttggtgcacttctttgttctaacaacatatctcgtttctcccgacaaacaccgggggggggggggggggccggggggttcggggtaaaaacccccccccccccaaaaaaaaattttttccccccca

SEQ ID NO: 511706 - DNA, 312 bp, Homo sapiens
actacactatacgtggctacagaggtcctccaccatgacccgcatacctctgcaggcgctgcaatcgcagagactgcctccgaatcaccgaagaaatgctgtcgcatccgccccttgagatcgctgatatactgctcgaccaaaggctcccgtgtatctgcttcacactcgttggtgccctgtctcctgcaccaggttccacttggtatccagctcctgtgtctgctgctccaggaaccgcaccttgtcgatgaaggaggcaaacttgttgttgagggtcttgatctgctcacactcctcggcccgcacccg

SEQ ID NO: 511707 - DNA, 259 bp, Homo sapiens
  misc_feature (256)..(256): n is a, c, g, or t
aggaggaggcagtattttctggcaagggggcatgatggagcatcgtggagtgctggcgctcttcctgtatcttgatctgagtcatggctacatgcatgccttgcttttcttgaagcttcactggagctgtatatcataagacctgtgcactttgcttgtatgtatatcacaccatcaatggaaacttgtaaaaggaatttaattacttttttttttaacagcttctaaggtgaactttaccttaaaggtatatcangta

SEQ ID NO: 511708 - DNA, 104 bp, Homo sapiens
actcacctggctaaatattagtgtgtgactgtgtggagatggggtctcgcatgtgttgaccaggatggtctcaagattcctgggctcgagaaatcctacatgcc

SEQ ID NO: 511709 - DNA, 451 bp, Homo sapiens
ctatctccctagctgcaggggtcacaggcatgagcctgtgtgtcctggcctaaactcaccctttgataatgacactgatctgattggtcagagatggcgcccttgtgccctaatcatctcttaaagatcccagctctaaatactgtaacaaatgggaataaaatttcaacatgagtataggaggggatgttcaaaccctagctcttggatttcacaatccatttgatgttattgaaagttgcaggaattttcttgttggaaattaccttctgtaatctgaatcacttcttcaaaagggtactcttcatctttctatccttaatctttcggcatatgcataggtccttttggcttgtgactaattttgaatggggtagttctgtcagggcttcttatatatcacaggaataatatagatggatttcactgacctttatttaccttggcagtg

SEQ ID NO: 511710 - DNA, 824 bp, Homo sapiens
gctgggacaccgccggcggggagagaagcggatcccgtccgagccccggccccaagtaacgccgccgcccggagacgcttggaggtccccctccccactaagtgcctctttgcatagcaccagtccccacccgcacgacctctctggtaccactacagctggacgggcaatggcgggtcggggaggcgccagaacgacccaatggaccacgctgctgggaacaagatctgtcaatttaagctggttctgctgggggagtctagcggtagcgcaaatccaagcctcgtcctccgccttttgtacaagggacacgtttcacgaggtaccaggagagcacaattggagcggccttcctcacacagactgtctgcctggatgacacaaccacgtcaacgttcgagatctgggacacagctggaaccaggaagcgggtaatcacagaactgagccccatgtactatcggggggcccaaggcctgcatcgtggtctatgacaatcaccaaaacacacagatacaatttgccacgggccaagaacctgcgtgaaaggagcactacagaggcaaggccagaccccaaaatcgtccatcggcactccgacgggtaacccagggcagaaccttggcccacgccaagcagcagctggtggactctcccagcgaagccacaagcactcttcagacgaccgacacagtatgcctgttcatgagaggaaaatcaagcaaatttgcaatgcacgctgcaccaaatcttcatgccacaagctcagaagctcgccaaacgaagccccgatgcactggggctccgcgaaccaaggtgcctcc

SEQ ID NO: 511711 - DNA, 919 bp, Homo sapiens
ctgatgtgaggaatgtggaaaagcttttggtcagagctcaagcctcatccaccatcatagaatccactcagggagagaggccctatggttgtcgtgagtgtgggaaagccttcagatcagatagtcggtgcttggttatgtacacctagcagtaactcacactggtggtagtaggcgctacccttgcaaggtgtgtgggaaggccttcagtctgagctccactcactagcccagcatctaaatggatgcatactgcggtgagtcagaggctctaatatctactagcctcagagcctagtccacgccttgttgtacatctgagacacttcgcgctgtagagaaaccatttaggtgtgatgagtgtgggaagagtcttttagagtggtatcttctctgtcctgtacgttctagcactcctacgcttgattcactactgcagagaagtcgttatataatgccaacacagtgtgcaaatagcctttggtatgtatgttctactggtgtattattgcgtcccactctaggagtaagcatcagacctggcacagaaacatccatgttatgttgtgatgtagtgtggcaacagcgctctgttcgaggcactcactaccttagttcaggctagtcagcgatagtccgacacctggaaggagcaaaagcccctagtgtgttgtactgactgtggaggacgcctttcagtctgaggttcccggcttatttaccatcagaggaatccagagtggagaggagtccatacagagatgtcctccattgcggtactacagccttcgagtatgagcacaacagcttacaataccagtcaagaggggttcagcactggatgcagagcgcctatagagatgtctttgaatgtgggggaaaggctatccgtttcgggaactcgaaccctttttccaat

SEQ ID NO: 511712 - DNA, 854 bp, Homo sapiens
gcaaagctggtgctgcacgcccataggaaggagctggaagtgcctccggcatgcgatgccagcaatgagttgagtacttggcatgcagctgcaggaggaggagggcaaacccgaggagcccatcgatctcttcgaaaacctagctggtgctgagtcctgtttgcgggcacccacacatgagacccctcttcactcaggaggcccgctgggcagacaggggagccggggcgtttgccctggtgctgtgctctcgtgtgatgaccctattgacggtatcaagtagccactactcccccgtgcctggccctgcagagcggctctgtctgtcagtctcaagcagcccctgtccccaggccgttcgccctgtgaggtggtcttcttcagtctgtattcccgcgatggccactaggccttgctacgatgccccatcggatgcttgccgcgatggcactggtgctcatcgcgatcctcgcacccgaacatgacaacagctcgagggactggagtccgaggccatcttgtcagactcctcctttctcctgtggcatcagtgatctcgttcatctgctttttgctcttcttcgcccgcagttcttctttcctcttgagcgccctaccccttccaggtgcggttcctgcatacacatgctccttcggagcacgtttgcgccgtagtgttcctagcctgtgtagcatgctcggttctttttccttaccatcccgttaaggctatcccaacgcggcgattgcgatgccatgggcgtcgatggaggatggctgcgacctctaggcatccatggagaaatccttatcattgctagcctcgtgtgatggtgcactggcttacaaggtct

SEQ ID NO: 511713 - DNA, 1736 bp, Homo sapiens
  misc_feature (1730)..(1730): n is a, c, g, or t
ggggcggggggagcgcggcgagccaagctcgacttgggcacggcgccccgtcccctcagaggccggccttcccgtgacgcacgcgtgcatgtctgctgtgtcgccgttgggtcccgtagttgctccgctcggccgccccgtacccgtgggcccagtcgctctccacgggccgcgctcgtacatggagcgatagagcggtctcctgcacgggcaggggagagcggacgtgagggggcggccacggcagggatttaaccctctcatgtcatgcttaaatcatggtgagagcattaaaggtcgtcgtcctgatttactacactgcgtttacgacggtacacgtgtccctcttcaagacaagggcagttatcttgttcgtgccactgagtggacttgagcgaggttgagacgaattagtgggctgcggcttgcgtgatgcaccgtgcgggaggcccaccacaaggagaagttgaattcatggggttgtccccttccgtcacattagtttgccacatgggctccgctccttggatcctaatgctcgcgtagagcgttggcatagtgagttgcttattttttatatgcactgcgtcaatgaacttgtgtggtgactatcttgtagcttgggcatatgggggcgttttaaccacggggggctataaatgcgggattatttggctaggtttaattcacaatgggttatacagttttggaggaacaccaaatatccttcttaaagagtttcgtggttgaatatggcgcagattgtcctaggcaaagaaagaccgttgttttaaaaggaagcccgacgttattcccctcaatgttccggggaccttgagacaaggaattaccacactccgtatatcatctgtggggcgcacatgtaccgttgtcgggcgcgaaaggcgacgttatcattcggcgcgcccgaggaacagaccttgtgggccgttgcgaaagctatacctcgattccaacgaacagagttgtttccctaggaaggatccgaatattcccccgtaacggtcacctcctggcgaactattacccagtttgaaggctggcacgaggacctccatagttcttctcacaaacgcagaaacgttggcggaaggtaggcgaaaacccagggccttctttggggcgtggcacgtgactatgcctcaattcaacttgtggttccagacacaaagcgtagatttcattggggaacatcttttgtgccaatcactgggccacgagtgttgtcccccctttagtgaatggtgcatgaatgtgcacattcgaactcttccccatggggttagggaccagggggtataagaacaaccggttttcggggctcagacaggtgacccgggcgcttcacacgcaacttttacgccttgacatttggccccgagcttcccttattgtgtgcgaaccccccagcgtaaactttcggggacgcatacctggtaacccaagttacttggccattgctacagtaacagaggcgaggttcaactgacaggatacacaacgcacagcgccgagcggatctcatatccgcaagacaccctggaaggagcagccccacacgtccaacaccagcggcacataacataactaccattggtgcagctgcaaaacagagcttcacaatctagacagtgagcgcaaacagtctacgcagcgctcagttacagtgcagcggcttgttctatcttcttcgtgcactattttcttangcggcc

SEQ ID NO: 511714 - DNA, 187 bp, Homo sapiens
gtttctgtggtgttaccgtcaaatacaacacaatgtatactggcattaaaaaacatacccatgataaaagaaatgaatggagagccccaaataaacccacccatctaggatgaagtgatcttaaacagtagtcaacaatactactctgggaggaaatggagaggtgtttttttttccttttagggcc

SEQ ID NO: 511715 - DNA, 1508 bp, Homo sapiens
  misc_feature (282)..(282): n is a, c, g, or t
ggtttaaaatagtatggattaggatggacgaggacgaacagtaccacaagcctcagtttggacctttccgtcatgtgggacagtgacttcatgactgatccgtgtgcgctggcacgtcctagagtgacgcaggatgtgattgcatcctctgagacggacatagacgcacatcctgaaagcttgttacacgtggtaccgtgcggagtgactgcgataggagccagagtgcctgagtgtttagcgagggcagaactccgctggtccaagtgaagtcagtggacnctgcagcacgcgacacgtctgtgtcctgcatgcgcgatcgaaacatggacagacggtcaacacaacaggagagctctgtcttggacgacgccagtatgacgcattgaaggggcccgcaagaacataggacaagacgcggctaaccaattcacaaggaggtggagacaagatctcacgacccaaatctcctagacgtgggcgtggggactcttctaaaggcgtcctttcggccattcttgccaaggggggtcctcgacagatatgcgagagggacgagattgaacccttacggagagacgttgtacgcggatgccattattcacgccgccacatgcggcagaactcctgactaggaaaacttacgaacttcacgtaggaactttcccttcacctggaacagtccccggccacggatagtcccgaaatcatcggccaagagcctgttgacaccaatttggtccgggcttctagagagcacgttgggatgtttttcccaatgtccacacccaaaacaacaaacgggggaacggcggacctaattggcggtctccgtataccggggagaggttccacggacactggagttgtgtgacccggagagggtcgtggtatggccccctgtgaggggacactaccacacggcattcaacttaagttgtcggcctaagcggcaggaaaccccctgtatgggactgcacctttgtaccccttctgtaaatcgcttgcacaagtgaatgggggcgtctgttttgtggttggaaaaagttcccccggagagggacacggcatttgttactttggcaaccacagctacgtgtttccaatgccccttgtgaaaggaaggtatggaaaactttgtgttggtgcgtacgttgggtgtcgtaccccacggggagtagcggtgtcctcttttgggaacttgaaaagccgcagagatatatcacaagaggccactttgggtcttgtgttcacgtagaataggcaaatgctctttggcaaaagacacctcttggcttcggtgtccaccacgctgacacaagccgtaaccaaggagcggccatattttgcagtaagcagaaagagcgagccaaggaggcccaggcattcgcaacagctttccggggccgcggtgcaaaccgtgggggggggctctttgtgcatttgtggccctcgaagggccccctgggtagggttttctcgccagagacgctggagaacaacttcag

SEQ ID NO: 511716 - DNA, 175 bp, Homo sapiens
  misc_feature (18)..(18): n is a, c, g, or t
  misc_feature (41)..(41): n is a, c, g, or t
  misc_feature (75)..(75): n is a, c, g, or t
  misc_feature (110)..(110): n is a, c, g, or t
  misc_feature (131)..(131): n is a, c, g, or t
  misc_feature (172)..(172): n is a, c, g, or t
taaaagttgggggtgttntgcccagtcccgtcattttgggntaaaaggcaggggcccttggcatgtggctggccnccccaagcaggaagcccaaactcccccaagttgantcatcctaactaacagtcacnccgtgggatgtttctgtccccattaaactaacagcattaangca

SEQ ID NO: 511717 - DNA, 1222 bp, Homo sapiens
  misc_feature (227)..(227): n is a, c, g, or t
gcgccattcttgtgagaagcaaggtgggcgccactgtattccctgagcgtcttcttcgcttagcctcgatcagccccttgaccacagacatgtctcgagatcagtgttccggagtcagatggcggtggcggtggtggcttccacagagcgtggaggaggctggcggtcagtggcgtgtcatccgacgtacttccgtttcatccagcctgacactcgcatggagtccntccgatgtcatagatcgcgagcctcgcattagggtcctgtggtcacgtgggcgagtagcaggtcgctgagcacttcacggatctgcggcactaactgcacatcgcaatagccgagaacgagccaagcctgggcgaggcgctaccctagcgcggccagctacgagcaccagacaggaagatgagctcgcccgagcgagatcaagatcgacgcgtgcagtctgtcgcacgagaccgtcgatccagactagctagtcgaggccgacggccatccgccgcaaggactctttccaaggcccgatcaatcgcctcagggaaccgcgggaccccgcatcccggacgtaaggcatgcggacaccacacagacgcatccagcgtcgagccccagactcgccacgtccagcaagccatcgagggggcccccgccagggtccgaggccaggcccgaactccgagcaccaggcgactgcagtcaccatcggaccctcccggggacgccgacagacaaaccctgcacaaggaagcgggggatccctaacagtacctccatcagagccggaaggccagacacgccgtcacgaccgcgggaggtccccgggacccgggtcccagggcctaagcagaggcgccgcaaggagtccggggtagggatcccaagacgggggggcaacaaatgccttgagggggggccagacaagccaaaggtgggcaggccccggggccataaaggaatacgcccagtttcgcaggagaccaaccgcagcaaaagccacgtccggcgatcgacaggcagggcaggggggaagacccccgtcggtgtggggccacgtaccaagacagcacaacaccaggaacactatgcacgaaacaaaggcaagaatttccacccagggggggccccccagcaaccccggggggagggacccagggacggggcacgacagtcgtagggaagacagcaatctccccggaacgccgcgaagggggcgtttacacgc

SEQ ID NO: 511718 - DNA, 271 bp, Homo sapiens
  misc_feature (5)..(5): n is a, c, g, or t
gttantgttcccactattatttgaaactctgttttaaatagctgcataatattccattgtaatgggcacagtgattcattgaacccaggggtccgcaacccctaggccacagaccggtactggtgggtggcctgttaggaaccaggctgcacagaaggaggtgagcagcaggcgagcgagcattactgtctgagctctgcctcctatcagatcactggcgggcattacattctcttttatttaaattacaaaaaaatttttttttgagaca

SEQ ID NO: 511719 - DNA, 377 bp, Homo sapiens
  misc_feature (274)..(274): n is a, c, g, or t
  misc_feature (276)..(276): n is a, c, g, or t
atggaccttcttctggccaaggggatcccaaagaaaccctgaaccggagtcctcagccatgacggggtagaggtcaggcccctccttctggcccgagaagagatcagagattggttcggagcagtccatggagaatttgctcagctggaccagtacacgcttctcctttcatgaatattcatgactcctcctgaagcttattgaacatctctatttggccatctccttcagcgtaaattcctgtcccctctgtccctcccctccaagtgtctgntntcagcttctggcctgaagctacgcttcctagcctgtcagaagggctccctgctggctgcaatctcttatgagaaataaagctctcctgtgtgcaaaaaagt

SEQ ID NO: 511720 - DNA, 147 bp, Homo sapiens
cgcttcaccacccccgctctctctttaaggaaaagtaagaagtagaagaaagaggcgaggaagaggaggcagctgaagaggaagaagctgccaaggaagagtctgaagaagcaaaagaagaagaagaagggggtgggtggagagcgg

SEQ ID NO: 511721 - DNA, 706 bp, Homo sapiens
ggcgggtaaacagacatggccggcgaaggagatcagcaggacgctgcctgctcaacatgtggcaatccatcctggccgtcctgcctgcagagagtgaggaagaagcatgacatggacgtagaagacgcaggatagtcaagaagccaagaaaagccagcacagtcatcaaattattgacagcagtctgctcgacatcacatacatacctaggtgctgatatggaagaatttcagtggcggaggacttggcacgatgtacgacagctgttcaggtgtattccagtgcttccagcaagtgatgatgatcctgattcccaggagacaagcacgattacctcattcagctattctcagcctcagagagaagtcgagtgatggtgcgggaatttgacttcgaggaaagatagtaacctttgctgtccttgtcatacagcagtgtacaggaaagggaagcacagcttggatacaacgagctagagatcatattgcctatcgagagagaacaggatattggaattgagcatagtgagtagtgagagccattggacagacgaaggttcagaagtccttgagctaagaacacagtcagatggaatccagcaagctaaagtgcaaattcttgcccagaatgtgtgtagccttcatagcatgtctagcagttcaattagaatccctgcaatagagtgccagatatttccttcaaaact

SEQ ID NO: 511722 - DNA, 246 bp, Homo sapiens
  misc_feature (140)..(140): n is a, c, g, or t
gggtcttgctgtgttgccaggctggagtgcagtgtcaccaacagctcactgtagccttgacctcctgggctcaagtggtcctcccaccttagccttctgagtagctaggaccaactacaggcgtgcactaccacacctgnctaattaaaacaaatttatttttgtagagacacgatcttgctgtgttgtccagactggccttgaactcctgcgcctcaggcaattcccttaccctgcccctcccaa

SEQ ID NO: 511723 - DNA, 359 bp, Homo sapiens
cttaagactgctttaaccattggggcttttttaaatatgaattttcaaattattttttctaattgccatgaaaaatgaccttggtgtttgggataggaattatactgaatatgtagggggcaattttaaccatattaatttaagcttttacaatccaagagcttaaaagggcttaccatttgcttttgtcatcactgactaaattggtgttctgttccatgcactaatgagaagaatgcatattctatggctgctgagaatattctgaaatttctaccaggtccatttgatctagagtccaatttaagtccagagtttctttgtagactttctgtcttgatgacccatttagtgctgtc

SEQ ID NO: 511724 - DNA, 479 bp, Homo sapiens
  misc_feature (7)..(7): n is a, c, g, or t
  misc_feature (51)..(51): n is a, c, g, or t
  misc_feature (208)..(208): n is a, c, g, or t
  misc_feature (467)..(467): n is a, c, g, or t
aagtaangccctatgaaatattccctttttgccccctgaacacagggttanaattggaaaacacgggcctataaagtatagtaattgtgtaattgtgaaaaatattaaggccttcaacctcaaaactgaaacacagtagggccttagaaatcctttgaattatttataccccctcagtttaaaaacttcccagtccccggcgcagtgnctcatgccctgtaatccccagaactttgggaaggccaaggcaggcggatcacctgaggtcaggagttcgagagcagccctggctgaacacggtgaaaccccgtctctactaagaatacaaaaattagccaggcatggtggtgggcacctgtaatcccagctacgggggaggctgaggcaggagaatcacttgaacccgggaggtggaggttgtagtgggccaagatcatgccactgcactccagcctgggtgacagganaattatctgtct

SEQ ID NO: 511725 - DNA, 915 bp, Homo sapiens
agcggggtccggcggtgccgtgctcaatagtgccgagccatagagcagatgaatggcctccaagctcggacctttgggatctggacgctgctctcatcagatgattcagaatgacatacgtgatgccattgacattcatcaacaagacgtatgtaatggaatcataataaaaataaaaaatcataggacaatatacataccttgaacaatggaggaaaataatacatcataatgaagatagataagatataatgagaaagatgaaagaaaataaaacaaagaaaatagagaagataccatggaaaaaaacaaatgaaatggaatgagacaaagatatatatacaaataacatggagataatgacatggatcagaggaattaagagatataatagaaaagaataaaaaaaatgattataaaaagaaaacagaaaaagataaaagaaaaaatgaagagacaaagaaaaatttaataaaaaataaaaaggaaaatatataatcagataaatataacataaaaatctgagaaacaatcaatacaatatccaatataagaatcagaataatacaatacaatcaatatataaaaatatataatattatataataatataaaaaattaaaataattgagaacaaatataaaaacttaaaaatatatataagaaaatcattaataaaaaaaaataaatatataaaaaaaatatataaaaagaaattaatagaaaaataaaatgaaaaaaagaataattataaaacatatcgataaaagttatacaaataatataaaaagaaaaataaaatttatttaaaaaagattgaaaataaattaaggataaaaaattacaaaataaaaaagaataaaaagaaaaatttgaacaagaaatatacatcaaagaaaggaaccaacatgaaga

SEQ ID NO: 511726 - DNA, 509 bp, Homo sapiens
  misc_feature (259)..(259): n is a, c, g, or t
  misc_feature (261)..(261): n is a, c, g, or t
  misc_feature (422)..(422): n is a, c, g, or t
  misc_feature (426)..(426): n is a, c, g, or t
  misc_feature (433)..(433): n is a, c, g, or t
  misc_feature (471)..(471): n is a, c, g, or t
  misc_feature (478)..(478): n is a, c, g, or t
  misc_feature (480)..(480): n is a, c, g, or t
  misc_feature (484)..(484): n is a, c, g, or t
  misc_feature (489)..(489): n is a, c, g, or t
  misc_feature (505)..(505): n is a, c, g, or t
taactgaatcttcccagtcttccagcactttcagtgacaatgagcacattagacatacgtcctgtgcttcctctcctggttctcaaaaaattccaactaatcttcccaatgtcccttttactccaagccttccttcacagacttcacgaacttgcttgccacacttggcttccttccttcgggcttccatgccttccttccagggacaatccatctgtctggatggcgactacttgctcacgagtagcacctccttccntntctcgctgcggaaacacaggcatgcggcccgcttcttgtagccgtcgccgtcgtaggtgcgggtctggttcgacttgagcttcatcatcctccgggcccagggtgggggtgcggtgcgggtcgcaggagtcgaggggtggggagcccgctctggacaggcncgtngcgcgcnccccggctcggccaagggaagcagggagggggagcttntccgctnancacntcacngctggcccgccgcggnccgc

SEQ ID NO: 511727 - DNA, 287 bp, Homo sapiens
cgatgttctacgacgaagcttattactcattgtcagatctgtaacctgtgtgaccttgttctcctaatattccgcgagtgctctagtgcagccctgtgtgaggtagtgattcgctgagatcatatgaaaattgcccagcgagttcttccagcttggtgggaggactcagctagtgaatgtgatacaataccagggaggcagtgcatggcttcctgtttctccctggttaaccaaaatgatgatgttacgattgacctcaactcatttaagagttacttctataatga

SEQ ID NO: 511728 - DNA, 750 bp, Homo sapiens
acactctcaatagaatgcataatgttggtttctacgagttacgactccataatgattgttattctgtagtaaaattgtacagaaggtaaatagaatagcttcaatgggaatataattgttaatttatgattagaattttataaaaatttatttccattgctttgaaagaaatgggtagcatgtgtctttcagagaagaggaggctattcggttatgcactttgtcgaatcttaggtctctatattaaatctttaaacaagtttcttcttgtggatgataagaataatataaatgtactgttgctgatcatgactgagtgcctattagttgtcatggcttttgtacgacaactgtgttgtaagaaataccggtttagcctctctggttgacatgtggtgagcatggatggtcaagattatgttgcaactagattattcgagtgttatattgtcttatacttaatagttatgaatacgtccaaatcagtctgtatagaaggtgccgcttgcttgacgtgtggaatatttgaggagcatgaaagagtcctttgttcttggttatcagggggaggctttcacgtgagagaaagtgtaccagaacagtcagaagtttataggttcactatgtccaagactaggactgggttaataaagattccttttgtgaaggaacataatgaaaatttgccataatggattactttagtatggtaactttagattctcttagctgggattttgaggttagaac

SEQ ID NO: 511729 - DNA, 368 bp, Homo sapiens
cgggagagattctcatccgggccatctccatacctggaggcatcatttttaaccgaccagaagtaaacaccgaggagaatcttgaacgcgggaggagagcagtgactcatcccacagaagcaatcctcaataagaacaacagcgtgacttctcaccagaaaccaagttagcaggatggcatggtggtgttggttaacaatgtggcatttgctaatatggtgcttgtctcctgaaactcttatagaatagagatcctgatcttgtctggtgggtgtgtacatttgtttgttggtatggtagagattctcatacaaaaagccacttacaaggaggttccttaggtccatctctcttctctgcagccttgc

SEQ ID NO: 511730 - DNA, 924 bp, Homo sapiens
taacaaactagatagaaacctttatttcacaactttatcatcattcacattctaaaaagacacggacggggggacacagctgaaaacagggggaggccagatgcgggcatcttccaaacgggagcatagccagtggtcactctagccgatgtctccgggggctctcaggcggcaaggaccagatgcaccactactgtccaatcccagttttacttagagccacctcctttttgggggccatatagtccttatttcatgccagattttcactagcggctcccgtgtgcttccaaatcagtccatgaccgtaagtaagcataccatattgccaaaaagagctcccccaagatgtgccgcatgatcaaaaaatttaccaatcccaaggatacattacctggctggtatccatgggcagataaggggctttacagggcattccctgctgtagaactgtcgaacatcggaaggaaaataatgggcaagcctcccttctggggatcttcagtggcacgacagctgcgaggactgtcatagatggccccagatgcaccaagggagggtccatatcttccggtggcaccttgacccaggataactgacaacaatgggaaataacacctgcacaataggcacacggccatgaacggctctgtgacccagaatgtcacctatgcctggaaggagaagctcccacaaaaacataccatattagctgccatgtgaaaacaaggacgaacggcacggaatgtgacagggcaacatgggcaaaacaaaagggaccatggaaggccggaatccatcgtgacaatccggcacatgtgccgctggaaaaaaggtaccctgcccaaagcgaaaccaggaacgtacgacgggaataaaccggccagccgcgggcaccaatagggaaagcccccggggaaaccc

SEQ ID NO: 511731 - DNA, 279 bp, Homo sapiens
  misc_feature (40)..(40): n is a, c, g, or t
  misc_feature (73)..(73): n is a, c, g, or t
  misc_feature (92)..(92): n is a, c, g, or t
  misc_feature (143)..(143): n is a, c, g, or t
tagtggtccccataagattataatggagcctgaaaaattnctatcgcctagtgatgtcatagcctagtgatgncatatgtattgcaatacantcctcacgtgtttgtggtgatactggtgtaaacaaatctattgcactgccngtcaagtaaaagtacagcaattatgtcctgtacataatatttaataatgacaataaatgactatgttactggtttatgtatttactatactatactttttacaatttgtattagttcttgcattgctatgaataaa

SEQ ID NO: 511732 - DNA, 297 bp, Homo sapiens
ggtctcattcctctgagatgatagccataatcagataaaagattagaaatcttctgcacgttaacagcatcattaaatggagtggcatcaccaagtttcaccgcttcttagccgtgtacctgtcccttgaaggcattcaatataagtgaccagatagtcatacggagagggagatggcatggggaattgatagatgatatcagggggtgatacgcttcacagggtgaaagtgcatatcctcgtggtctatactcgtataccacaagttacccgttttgaccgatatcgcactagcag

SEQ ID NO: 511733 - DNA, 342 bp, Homo sapiens
cttgtcatagtccaacgactggcctagacgggtcggctcgacgcgatacgcgacgcgcttgaccggcgagtacagagcgtcgacggcgatcaggccgatcggcgcgtcttccggacggttgcggtcggccgggacatagcccttgccgttgttgaccgtgaactccatgcgcaccgaagcgccgtcgtccagcgtgcagagcacgtggtcggggttcaggatttcgatgtcggcaggcgtctcaatctgacccgccgtcaccggcccggggcccgtggcgcgcagggtcatgcgcttggggccttcggcgtgcatgcgcatggccagttgcttgatgttcag

SEQ ID NO: 511734 - DNA, 392 bp, Homo sapiens
cgatcaacgcacacaggaagccgcattccggcgccgacaggaagcgcttgcggatgaccatctccaccagcctgtcgggcacccgctgcgcgccggcgaactgaaccatcgcctggcccggttcagggtatcaggatctgccggatggcgtggccactggccagcgcatcgagcgcgtcgttgatctcggccatcggccgcacgccggtagcagcttctccaccggcaggcgcccggcccgccacagcgcgatatagcgcggaatgtcgcgcgccggcaccgctgaacccatatagctgccaatcaccgtcttggcctcggccaccaggctcaccgccgggatggtgaacggatcggccggattgggcaggccaacggtgacgatgcggccg

SEQ ID NO: 511735 - DNA, 264 bp, Homo sapiens
ccggcggtgtgttgtgtgttatagtcccagctatctgggaggctgaggttggggaatcacctgagcccagaaggccaaggctgcagtgagctgtgattgagtcactcactgtactccaacctgggtgacagagtgagaccctgtctcaaaaaaaaagaaaaagaaaatactgggggcgagatgtcatgaaaactaattttattatacgttcagcaaaaacaaaactctccttgaccaagattccctctaatgggactagagtgg

SEQ ID NO: 511736 - DNA, 398 bp, Homo sapiens
caaacattcatttgtgagagggtcttgctttcccatgctggactcgaactcctggcttcacacaatcctcttgccttggctctcaaagtgctgggattgcaggcatgagtatacaatgttcataaagtctatagtagtgtacagtaatgtcctaggccttcacattcactctactcactcactgacccacccagagcaatcctgcaagctctattcatggaaagtgctctacacaggtgtaccattttcttatctcactgcatttttactgtaccttttctatgtttagatatgcaaataccattagtgttacagttgcctgtagtattaagtacagtaacatgctgtatagatttgtagcctaggagcaatagtctatgccatatagcctaggtgtg

SEQ ID NO: 511737 - DNA, 145 bp, Homo sapiens
agtaatggacagccaaggaggaggtgttccgcctaccccaagaggaggaggaggggccgggggcgggggatgagagttcctgtgggactggtggaggcacccaccgggcgcagtaaaaaaggccaaagccccttgagaggccggg

SEQ ID NO: 511738 - DNA, 714 bp, Homo sapiens
  misc_feature (644)..(644): n is a, c, g, or t
gtcaaatggtattcagttatagatccttgaggaatcgccacactgccttccacaatggttgaactcatttacactcccaccaacagtgtaaaaacattcctatttctccacatcctctccagcacctgttgtttcctgacttttagtgattgccattctaactggtgtgagatgatatctcattgtggttttgatttgcatttctgtgatgaccagtgatgatgaacattttttcatgtgtctattggctgcataaatgtcttcttttgagaagtgtctgttcatatcctttgcccactttttgatggggttatttgattttttcttgtaaatttgtgtaagttctttgtagattctggttattaaacctttgtcagatgcacagtttgcagatgttttctcccattctgtaggctgtttactctgttgacagttccgttttctgtgcaggagttctttagtttaattaaggcttatttggcaatttttggttttgttgcagttgcttttggagtcttcatcatgaagtctttgccagggctgatgctcaaaatggtatttcctaggttttcttctagtattttcatagttttaggttttacatttaagtctttaatccactttgagttgattttatatatggngaaagatgggggtcagggtcattcttctgctagggtatcagtgatgccacatggggttcgagccgaatcg

SEQ ID NO: 511739 - DNA, 278 bp, Homo sapiens
gctcggtccagaatagggcaacggtaaggaccagaacttgagtatgtcgtggggcaccatcaagttttcaaagctcttcggacttttgtgtgattcctaccttgccgggatttgtcacaggttttggagctattggatggaggggaggcttcagcatgcgagcctgaccgattgacatcatcatcagttttttcaacataggggttgtggaacagagtgaggcattttactaaagtggagaaagcagtctgctcctggagaaggcagcatatcccttt

SEQ ID NO: 511740 - DNA, 294 bp, Homo sapiens
cggtcatacaagcccgacattgctgaagttctggagccacggcgaggacgagatcatctgacgtcgaggttcgagatcattctggcccctatggtgaacccctgtctccactaacaatcgaacgcttacctgggtgtggtgtgtcgtgctttttattgcagctactttggcggcttatgtgcgagaatgacttcaaccccgaaggcagatgttcctaggtcagccgtgatcgcaccatctgtactcctgcctgtcgtatcccgcatgcgaggcagaagctgtgtcggccgctgt

SEQ ID NO: 511741 - DNA, 251 bp, Homo sapiens
gccgaacacagtatgccatgaccgactcagacaattacacccatagccaaccccgttaaacacccctccccacagtcaagcccgaagtgatatttcctattactctccccgtcaaccgaacacagtatggcgtgaccgagctcagacaattacatcctagccaaccccttaaatacccctccgcacatgaagcccgaatgatatttcctattcgcctattttagaccagcccctgttcggttgagcgggga

SEQ ID NO: 511742 - DNA, 325 bp, Homo sapiens
ataccttccctgttttagaattgttatcgcaaatcgtcatcgatggacaatcgtgtgtgatatatggttatactatacccatactgacctctcaattgaggcctttaaatgtcttctgtgcattatgcacttaaacttggaagggcttgggggccttgaaggcagggaagcctttgtcctctgcccaggtgatgggagccacctcctctgccgcaggactgatagctccttcagctttcatggctttcttctttaccttcatgggtcagttggtcatcaggatcctccaggccgtgggcgtcccaggctggggcgtctgctgctg

SEQ ID NO: 511743 - DNA, 99 bp, Homo sapiens
cacgagaactactgggatccctaaaaacgcccctggtccggccctactttgtgcccttcgatctcttaggctttttctgtaggcataccgtgtacccaa

SEQ ID NO: 511744 - DNA, 268 bp, Homo sapiens
gcccccccaggtaaaaaggctgccccgaaaacagtttacagggcccccggggttcccactgttttaaattggtcaggggccctgaaaaaaaacttgtggttccccgaaaaaaaaaattttaacctcgaaaaactttaatattatgggaaaaaaaccttgcccaatattaaattaattaaaaaagggaagggaacttttgaccctatggtcccagccaaagcccggtttagccaacataatggtagtcctagatttctttttggtttta

SEQ ID NO: 511745 - DNA, 333 bp, Homo sapiens
  misc_feature (40)..(40): n is a, c, g, or t
  misc_feature (277)..(277): n is a, c, g, or t
cgcccgaaagtttttgtttcccaggaagcaaaatggcctnaaaaaggaaggttgtgatggttgcccaccaatgtgaatttaatgcccctgaagggggcccttaaaagtccttaaaaaggtaaattttggatgggttttcccattttaaaaaaggaaaaaaagtaaggcccaaagcaacccctttccaaaaagggggttaaaaaccaaatttttagggatgggagaatgctggctaaattttacttatcaatttgaaaataaattgtttttatgttgnccccccaaaaaagcccttattttgaaaaaaaccttttccttttttaaaggttggga

SEQ ID NO: 511746 - DNA, 102 bp, Homo sapiens
  misc_feature (35)..(35): n is a, c, g, or t
tggaaagcgactccaggtggagtctgatgagtctngatttgttggccaattaagaaaggaagggctggctgggcgcagtggctcatgcctgtaatcccagca

SEQ ID NO: 511747 - DNA, 573 bp, Homo sapiens
gtcatcgagtcggcaccatggtgctgcgtacagtgaataaggtggagtatgccctggaaaatccaaaacgtgacaattggttggaccttttaacagctgaagagtgttgtcactagctttttcctgtggtgaaaatacagagctggctgtcttccatgatgaaacagaaatacaaaaccaaactgacttactgagtcttagtggaaaaacactttgtgtgactgcaggatcggctccctctctgatcaacagttctagtactcttctttgtcagtatatcaacctacagctcctgaatgcaaagccacaagagtgtttaatggggacagtgggcactctcctgcttgaaaacccacttgggcagaatggactcacccaccaaggtcttctgtatgaagcagccaaggtgtttggccttcggagcaggaagctaaagctgtttctgaatgagacccaaacgcaggaaattacagaagacatccccgtgaagactttgaatatgaagactgtgtatgtttctgtgttaccaacaacagcagacttctagcatgtactttatcaatgttgttcggt

SEQ ID NO: 511748 - DNA, 256 bp, Homo sapiens
ggctgatgtgtggcagtcaataccaagactgggggcggggtttatttgttgggctgcagaatgaggagatgagagggaactgcaaatccgtcctcctgaggagtttggagctagggttatttaaggattttggagtgggctggaatgtggagattgttgggtggtcagagagagaaaggtgaagtaatgggacccggagatgaaaaaactgtattatgctgattttatttctctctgagggtcttcaaactggttg

SEQ ID NO: 511749 - DNA, 633 bp, Homo sapiens
  misc_feature (497)..(497): n is a, c, g, or t
  misc_feature (522)..(522): n is a, c, g, or t
cacgagcagaaatggaaagtggaggttcctgtgtccattatttcaaactgaagttgctcctttatttagaaaacaaagcaacatgccagacaagtacataaacatttcatgtaattatattaagataggcttggaaagtgctgatggagactttaaaaacacctggttcaaaagcatgtatttatcttctctgaaattaactggtgttttatgtcatttacagtctagtgtgcacacttcttatttagcaaaaaataccacttcattttcattttttccttgttgtagatgtggcacatattactactggaaacttcgatgcccagtatttttttctctattctttttattaaagaatggggtatctttttaaaactctctttgcacactggcatgaacagggaacacagtattggtggagatggggttgggggaggtttagagggaggaattgcattcttttggcattcctgagaggaaaacagctgtattaactnttttttttttttttggaaaaggcanaaggcatttcccctgactctcttccagttctttacaagtgagcacaaacagcatggcatattaattatgcctggagtcagcatggatgtgtgctggcctgatattagccgg

SEQ ID NO: 511750 - DNA, 866 bp, Homo sapiens
tcacaaatcaagggccctccactgaggcatattttcttaggagccctggaaacttgacggagagagaagagctggcagggagccttggcccggcctatgtgcaggtggagacgagtaagcgggcagccctaagttggcagcgcgtcctggccagcatcgtgtggcctctagagtgttcaagcttcaggaggcctgcttccgcactatggccccatctaggactgcaggatcacacttgaagacgctgcctcgtgccgcatccgcgcgcgtcgctcatgcacacgttgtccctgcaggtccaccccccacgtgcactgttgcagctctccaggagacaggtgttctcagagctcgtttcccgcccagccgctgcaacgctgggtcatcggatcggtgcctgtgtgtgcctgagcgcagccattgcctcttaacggggttcggcaggactggggaccctgctttcctctacttgctgtcagctcctcgagaagccccagccacaggacctagccttcagcacccccacagaagatggaacgggtaatttggacgcttgtttcccccattcagtttggggactaaccacccaggcccccagccagctgcatccagcctgcccagtccactcccagcgccagctggtcctgtccttactgcaccttcactcaatgccccagaccggccttggctgtgagatgtgtagcacccagaggccctgcacttgggacccccttgactgcagcttccacctagcagccactagaggtaaaaggggagagtggccgttccctcactagtccgacatctcaggccccccctgaactgccggggacctctacgactacgtctgggcgtcaccacgtggg

SEQ ID NO: 511751 - DNA, 908 bp, Homo sapiens
gcttgaaaaagagtgtgcgcgttatgacaactgtttcgcgcgagtgaactgggacacacgcgctgggggtgtgttgacgcaggtggcgcctttgaaagcgcggagtgacccccgttctaaaagacccgtgcgtgaacgccctgtgagggccccgccaatcggtttctggtgcttatagcgcccgttttaaaaatgttgctggtacaaatgtggttgtgacgccccccggtgtgttcgcgcgccccgaccacctggtaaaaaggtgggggtgaccacagtcaccattgggcccaattgcagctgggtaatataatattacaagcgacatgtgggttcaaaaggaaggatttttttgcccccggggctatcaagatagctataaactgagggtttgcccacagttggaaatatccccgttgtagcaggtacccaattggtgaaatacaaagatattcttagtggttcgcaggggtcccccaagataatattgttcggtccccgcatcggcccccacagtttgtgactctaatatcctgctgctggctcagcccccatcccccattagtagatgtacatgatgtctgtggtacttgcccctgttacctagttatgtgctctcaataatgccaccaacggcggtcacggagctggaacggtcaacaattttgggtaccacgagggttaaattttctcggaacacacggggtccccgctgtatgtatatactatagtatctctcgtgttggtgtcaatacgtgactggccaacaaccacctccactcacggttataactatggtgttgttgcaccctccacgacacgggtgtgttgttgggggggggaaaaaaatccaccgggggcttttttttaaaaaaaaacccaaccaaagaaaaacgccccaaaaaaca

SEQ ID NO: 511752 - DNA, 856 bp, Homo sapiens
  misc_feature (179)..(179): n is a, c, g, or t
  misc_feature (217)..(218): n is a, c, g, or t
  misc_feature (232)..(234): n is a, c, g, or t
  misc_feature (252)..(253): n is a, c, g, or t
  misc_feature (259)..(259): n is a, c, g, or t
  misc_feature (281)..(282): n is a, c, g, or t
  misc_feature (305)..(305): n is a, c, g, or t
  misc_feature (307)..(307): n is a, c, g, or t
  misc_feature (316)..(316): n is a, c, g, or t
  misc_feature (328)..(328): n is a, c, g, or t
  misc_feature (362)..(362): n is a, c, g, or t
gggcatgcacatgcttggagtcagtattcagctgtaagtgtagtatgttttatggctgaaatagaaagctaatgaagaggcctacctggatccagattttatgttaacatggcagcaaaactaggaaaatgggaagaaattacttgcggggtgttctagatctgatttttttttttttnggaaagttccagccggtgggaggaaaagaggtatcttnnaaaatagagatagnnnacttatttccctcatctnnggcggngtcactatggggtgcaaggatnntcatggtgggctagatccatttngntataatcangtatcctctggngtgcgggtagagatttaaccctgattttcccatnaaactatgagtattaagaaataatcccgggtggggagaaccgggagaaatcacccttttagggaagaacccgcggaattttctggctaacaccaagatttttaagagtgtacatagtaggttgctcaccaatttctgatgactggtgatgcaaaacctgcggagtcaaacgtgagcaagaagctccccatttctacttcctgtcacaaccccattagttgtaatagggtccttctccattgactcagggcagagttgttaaagctggggagggattcctttgcaggcccgtcagttttcttccggggtggcacctcggccggcgatgtgcccgctgttgttggcccacacggttctttaggtttcggaacatgtgtcggctaattaccggcgggggaggcgccctgttctctgggaactcttggggagacgggggggggctcctctggggaaccattttgaaagcgccccgggtgttgtgagtgtctacttgcc

SEQ ID NO: 511753 - DNA, 185 bp, Homo sapiens
  misc_feature (157)..(157): n is a, c, g, or t
gaagccaagaccaaaaaaaaaaaaaaaaatggacataggacttgaatagacattccaaagagtggcaggtgccaacaagcacatgaaaagatgatcagcatcatgaatcgttagagaagtgcaaattgaaactgcagtgagataccacttcatggcnagtaggacagccatttcctaaaaaaaaa

SEQ ID NO: 511754 - DNA, 329 bp, Homo sapiens
  misc_feature (104)..(104): n is a, c, g, or t
  misc_feature (122)..(124): n is a, c, g, or t
  misc_feature (131)..(131): n is a, c, g, or t
ctaccagattccagagtcattaaaaagtatcacatggcagagattgggaaaaggcaattcaggacagttcttagatgctgcaaaggctctccaggatggcctcngtagtaaagaggttatgnnnggatggncatgcaggaggatgtttttttcagacccaaaagaagggttaaaagatgttgatactcggaaaatcataaaagcaatgctttcttatgtgtggtccacagacaggccagatctacgagctagagttgccatttcgctgggatttttggggggagcaaggccatgaatattgtgggttctttaatgtttaaatttgttgt

SEQ ID NO: 511755 - DNA, 307 bp, Homo sapiens
caagcagatcacctgaggtcaggagttcgagaccagcccggacaacatggcgaataccccatctctactaaaaatacaaaaattagccagctgtggtggtgtatgcctgttatcacagctactcgagaggctgaggcaggacaattgcttgaacccgggaggtggacagtgcagtgaactgaaattgcgccattgcactccagcctgggctacaaagagtgaaactccatttcaaaaaacaacgaaaaaacaattaaggtgggtagaaaaataattggtatatacgctatagaaagggagtaaaagg

SEQ ID NO: 511756 - DNA, 796 bp, Homo sapiens
  misc_feature (179)..(179): n is a, c, g, or t
  misc_feature (217)..(218): n is a, c, g, or t
  misc_feature (232)..(234): n is a, c, g, or t
  misc_feature (252)..(253): n is a, c, g, or t
  misc_feature (259)..(259): n is a, c, g, or t
  misc_feature (281)..(282): n is a, c, g, or t
  misc_feature (305)..(305): n is a, c, g, or t
  misc_feature (307)..(307): n is a, c, g, or t
  misc_feature (316)..(316): n is a, c, g, or t
  misc_feature (328)..(328): n is a, c, g, or t
  misc_feature (362)..(362): n is a, c, g, or t
gggcatgcacatgcttggagtcagtattcagctgtaagtgtagtatgttttatggctgaaatagaaagctaatgaagaggcctacctggatccagattttatgttaacatggcagcaaaactaggaaaatgggaagaaattacttgcggggtgttctagatctgatttttttttttttnggaaagttccagccggtgggaggaaaagaggtatcttnnaaaatagagatagnnnacttatttccctcatctnnggcggngtcactatggggtgcaaggatnntcatggtgggctagatccatttngntataatcangtatcctctggngtgcgggtagagatttaaccctgattttcccatnaaacctactggatgtcatttacggaaaataatcccctgggtttgggagacagaaacactggggaagaatatcacctcttttaagcggaaaagaacacctctggggaaattctctggcataaacaccaagggattatttaccaagatgtggtcacatcaggtaagtgtgcgctccaaacaaaatattttacctgcgagacactgcgaatatgcgaatggtgcgatgtcgggcgaaacaaaccttgggggggcaagagtcgtccacaaaatagtgtggcaggctaagaaaaggcctccctccccaattttcactcaacgtctcctggggtgccaacaaagtaaccccaacattttttcaaattttcgggtgaatataacaggggggcccctttcctccccaaactttttgggaacttttccaaggcggcaaagaag

SEQ ID NO: 511757 - DNA, 187 bp, Homo sapiens
aagaggggggagtgatgctgaggtgatctagaggatcccggctacatgtgctggagtaggtggattaggcgataggatttctaggcctacgttttcatacttctagtaagcctctaccaactacgtaccaataaaaaaaaaggtgggtttttttttttttttttttttttttttttttttttttttt

SEQ ID NO: 511758 - DNA, 694 bp, Homo sapiens
cacgaagacttatgactgacagccaggacattccttcctgtcctgttcaagtagtgatctttctgattgcatcaggcagtgtagacctctctaaatccgttcatgaaactcctccctgtgaattatacacatactcatcaactctactattagatcatcctcagtttcttgaatgggcttgccacccgtgtaggccccttacatgttgtctactcccaaatgatcgtacatatgctaaatatggcattgagtgtggaaagtgccggctgaagcacatctgtttctacaatacatggtcatagctataagaaaaaacatgggggcaaatcccaaataaggaaaaacccagtatggtgtggtatcagagggtcttgtctagatgagtctactgggaatatattatgtagagtagataggttattgtaaatggtcttgttctcagaggagatcaggttctttaattgtttcattccttgaaggggacaatgtcaaagctgttgagcccaaaatcaccccctttgactcatttagctcacatggaacaattttccctaaagaatgcagaaaggaattctaccaagcaattaattaatcctcttttgccaactgcagcagtagcacatgagctgggcattcctgtagctataacaaaatcagcttttgcctcggtttgacctatgtccagatatgcagc

SEQ ID NO: 511759 - DNA, 293 bp, Homo sapiens
  misc_feature (19)..(20): n is a, c, g, or t
  misc_feature (46)..(47): n is a, c, g, or t
  misc_feature (75)..(75): n is a, c, g, or t
  misc_feature (113)..(115): n is a, c, g, or t
  misc_feature (132)..(133): n is a, c, g, or t
  misc_feature (136)..(136): n is a, c, g, or t
  misc_feature (140)..(140): n is a, c, g, or t
  misc_feature (157)..(157): n is a, c, g, or t
  misc_feature (181)..(181): n is a, c, g, or t
  misc_feature (204)..(204): n is a, c, g, or t
  misc_feature (212)..(214): n is a, c, g, or t
  misc_feature (267)..(267): n is a, c, g, or t
  misc_feature (291)..(291): n is a, c, g, or t
gtaaaaatggaccacagtnncttatttgtagttgttagttgccctnntacctagtttgttagtgcatttgagcanacattttaattttcctctaattaaaatgtgcagtattnnnagtgtcaaatatatttnnctntttngagaatgatttccaccnttatgttttaatatcctaggcatntgctgtaataatattttagaaantgtttggnnntttaagaaataacttgtgttactaatttgtataacccatatctgtgcaatggnatataaatatcacaagttgtttanct

SEQ ID NO: 511760 - DNA, 454 bp, Homo sapiens
aatccaatcagtgccccgagcacgggctgttggaatgcaaactttacaaactggcaatatgagtttctgtaccttttggataacgaaacagtcaatagcaagttggcgcatggggatcggccaggtcgcttataggacggctagtgtgataggaacggaagccattacgacaagaagggtgtctgctgtgacggaaaaaggcttggcgaggctgaaagaagactgaaggtggttctctagtattatctggtagaagacaatacctgtcccactgggcatggaatgaattcgtggaacgttagcttaagacaggccccatttcagaaggttctgctgtccctgggaaagaacaacgaatgcgagaaacatcctggcttcactgcctggggcctgggaatccttgcccatgctaatcacagcaatagctgatgcttacagagtgctgtatactctt

SEQ ID NO: 511761 - DNA, 107 bp, Homo sapiens
  misc_feature (107)..(107): n is a, c, g, or t
gtcagaagtagagcagaagaaggaagcggaccttccgcaagttcactacgcggcgtggactcggaccagctgctggacaagtccttacggagcagctgatgcagctn

SEQ ID NO: 511762 - DNA, 951 bp, Homo sapiens
agcggggttcgcgggtgggtgggcctgggggcgcggccgggtgtgtggcggtggctgctgggacggcggtcgcgtacggcgtcaggctcggggtcggtaagggcgtgcggaatagctgcatcctgcgggagactctgtgtaggacatcgtgtccggtacgaggccccactggctgtgtgtcttgtgcgtgcctggctgatgtgacggtgtgggggcaagtgctggtgtgttcctgtggagctgtgttggggctggtctgtggggctgggtggacgcctgcttgcgtcccaagacagctctgtgggctctccagcatccatttgatcgccacagcgccggtagaccctgctgtgtcaagggagtaacattccgatggtttcctggcccagtgtaatgtcgattcgaaacaacgcgcaaagtcgcgacgagaagaatacctgcagatgtgttgggttgctgagccccttgctagtaatcggaacaagagacgaaggactccaagcagtaaagatagtagcgccttttggcttttaactcccggacggcgtttggagacctatcaacgtttaatgaaaagctcaaacagtggaaagataccagcagacgccgggcgcttcgcgtatggcgtaggcgttccaaagcgagtacggccccatgattccactcgtggcctttaaatttccgtaggcattacacattgagccgcgagcattattccagttccgaaggcaccatcggccccaggtgggacccaagtgcacgtcgccttgtagtcttggtcctgcggcaataagactccagacataaccaatagacagccccagacattgtgaaaccaaatcaccaacttttagacgcccttcaacctggccacaagacaaacatcatcaccgccagcattatgattccgccatctgcctttaaacaacattacgcggtgtacacaacagc

SEQ ID NO: 511763 - DNA, 452 bp, Homo sapiens
  misc_feature (415)..(415): n is a, c, g, or t
gcgtgtattcgacggcagtgtaaacgacggccagtgtaaaacgacggccagtgtaaaacgacggccagtgtaaaacgacggccagtgtaaaacgacggccagtgtaaaacgacggccagtgtaaaacgacggccagtgtaaaacgacggccagtgtaaaacgacggccagtgtaaaacgacggccagtgtaaaacgacggccagtgtaaaacgacggccagtgtaaaacgacggccagtgtaaaacgacggccagtgtaaaacgacggccagtgtaaaacgacggccagtgtaaaacgacggccagtgtaaaacgacggccagtgtaaaacgacggccagtgtaaaacgacggccagtgtaaaacgacggccagtgtaaacacgacggccagtgtaaaccgacggccagtgtaanacgagggccagtgataaaacgaggcgcagtttaaaac

SEQ ID NO: 511764 - DNA, 497 bp, Homo sapiens
  misc_feature (465)..(465): n is a, c, g, or t
cggatctccagaggacagacaggggaagggggtctctgggatactgtctcttcccaaagggccaggcaaaagtaggttctggtttaatttatcatatttaactcatctggctctggggccttgagggagggcaggggtggagggggagatccgatccaggtgtggactgacagctggccagccagtgcagaggctagaggaactcactgacctgaggactggggggctggagcagctgcatcatgggccttgtatttcaggccagagtaagaattttgggctcggggactcttagccggtggatgtacatggccgggtctgtgctgggctctgcagtggccaccagggcgggtgcacgcagaaggcctggcccccacccttccagtgcaaagtcttggggagaaacagcatccacgggtgaagaacaagatagcaacacaagagaagcctccttggtggctctgngctccttggttgctctgggggtaccgagctcg

SEQ ID NO: 511765 - DNA, 184 bp, Homo sapiens
gctggggccttgggcacagaacttcttcgcgcgccaattcctgcttccccacgaaggagaacccgtgaagagaaggttttggcggccgaagacacccagtaaagcagcagggctctggcagccaggggcagccctaccctgcgttgcgctatggggcatcctttgtggcagcacgggtaccgag

SEQ ID NO: 511766 - DNA, 497 bp, Homo sapiens
tcttaagccagcgcaccggacaaacgcccggggtccggggcccggggcaaaagcgcccagcccggcccctcccaggcggcggcggcggcggcggcggcttcccagtcaccctggagggaaaacgcgccgaggggagacgcgcggagggctcgcccgggaccgggctgcaggccgcgcccccaccgccttctccgcggttcctcacccgccgcacatccacgcaggttcaaccccagcgcggggcgaacgcgcgtcccggccccaggcttcccacccgctgaagccaatgggtcgcacggctccggcgccacgtcctcgggggcgaggccctcagggaagggaccctgctctaagtccctccgaacagtggactgggtgcagggggagtccgagcccccccgatcctcggctggcccgcctcctggctgccagtttgtggggtcccggcgtcccgatccgcggcctctgtttagacggaaggcgccaggacgcagaga

SEQ ID NO: 511767 - DNA, 106 bp, Homo sapiens
gagtgggtagggaggagtgctgtggatcatgcatgtattcccagaattttggaaggctgaggagtgtggatcacaaggtcgggagtccaggacgcagcttgaccaa

SEQ ID NO: 511768 - DNA, 383 bp, Homo sapiens
ccgttttttgatttgacttttttcgccggccggtttcaggccgcacaaaggttccaaaggaggagggggacatttttactccctttttgggggtacccatttaagcttttgtacatcacccgggggcggccggagggggcaggggggcgggggcgaggggcgttcccatcaaatttttaactttttgttaattattaatcccccttttacggcgggttcgggggtcatttttaaaatttttttaatttttttttttttttacttttactttttccctcttggggaaatgtagggaatttatagggaaatatgtcctttatggaataaattttaagaactaaaaaatatttttttttaaaaaaagtaagggccctttaatttta

SEQ ID NO: 511769 - DNA, 510 bp, Homo sapiens
  misc_feature (373)..(373): n is a, c, g, or t
  misc_feature (437)..(437): n is a, c, g, or t
ggagacgggggtttggtcggtggaccaggcgggtctagaactcttgagctcaaacagtcctccgggctcagcctcccgaagtgctggggataacaggcatgagccaccatgcctagcctaaacatcttcttttataatgggaccggttcagtccttggctcattttttaatatgggggtggggagtcttttccataaattggtagtagtgcttgggggtttcgggtccttcacaagatacagatatcctataggcaaacgggataggcagattatcttctcctagtcggtgcttggccttttcactctcctaaatggtgggtatacggtttttttcttttaaagacaaggtctcactcggtcacccaggcggnagggcaggggggcaatcatgactcacggcagcctcaatctccccagctcaagcgattctccggnttaagtctccggagtagctgggactacgggaatgtgccaccatgcctacctatttattgattcatgtattcat

SEQ ID NO: 511770 - DNA, 330 bp, Homo sapiens
  misc_feature (32)..(32): n is a, c, g, or t
  misc_feature (165)..(165): n is a, c, g, or t
  misc_feature (219)..(219): n is a, c, g, or t
  misc_feature (249)..(249): n is a, c, g, or t
  misc_feature (312)..(312): n is a, c, g, or t
  misc_feature (326)..(326): n is a, c, g, or t
ggcttgttagtcacgtgtcttaaccaacactnctacatacacgcaccacaacctggtctctcactcatttttgttttaattttaatttttggtagagacggggtcttgctatgttacccagactggtctcaaactcctgggtctcgagcgatcctcccgcctcancctccagaaaggtgctcgtattacagggcactattacagggcatgagccacccncacccagccttttcactcgttttttcacanttacaaccaggaatacagaggctaatcagggggcctctgtgttttgccctaggctttgggagnagggcaaaggattnttat

SEQ ID NO: 511771 - DNA, 180 bp, Homo sapiens
gtgagtctagaggatccctcacacgccgagcctccagacgtccgagaaatccgaatggacgaagttgttgcgcaacaacttcgtccattctgatttgcggcggtatgggtattcggcgtgtgcagcaacaacttcgtccaccccgatctgaagaagtatggagattcggcgtgtgcagga

SEQ ID NO: 511772 - DNA, 234 bp, Homo sapiens
cttttaatttctatgaataaaagaaatttttaaaacctttaaaattttaaatattagtcaaaatcctttttaagtcctgagggcttccaggtagttgttaaaaaaattttaaggccaggcatgggggctcgctcccccctataatcctaggatcttgggaggtcgaggcaagctgatcgcttgagcccaggggtttaagaccggcctgagtagcatagcaaaacccctgtttta

SEQ ID NO: 511773 - DNA, 192 bp, Homo sapiens
aaaaaaaaaaaaaaaaaaaaaaaaaaaaaaaaaaaaaaaaaaaaaaaaaaaaaaaaaaaaaaaaaaaaaaaaaaaaaaaaaacttaatggatcccgtgaacttgaatgatgatgatgatgccaaccgggaaattccggacgggtcccggcaggcgtccaagtttcccttaaagggggtcgatttaaagttgg

SEQ ID NO: 511774 - DNA, 239 bp, Homo sapiens
ttccctcaaaggcatttgcatctttaaataattttttaaaagcctttaaagtgatcaggcccttgaggccaactaaggaaatttgttaagcattgaatttctgaaggctctatgaaaggaaaagcatgatgggctgttaaaatcaaatgttacggctaaaatttacatgttgtgatgtaaattgggtagaaacccattaaatcattcaaaaaaataaactatttttattagagaatgta

SEQ ID NO: 511775 - DNA, 186 bp, Homo sapiens
tccaccaggcagtcgcatctcccaggctggcctgggtgctggcagccaggtcctcttggacctctcgccagcggtgctgccgagccggctccaggctcgcttgttctgggctgctgtccttcttgtgttttctcttgcaatcctcccagcagtggtccaccgcctgttgtccaagtcctcccccac

SEQ ID NO: 511776 - DNA, 588 bp, Homo sapiens
  misc_feature (264)..(264): n is a, c, g, or t
  misc_feature (304)..(304): n is a, c, g, or t
caagtccaaaggtcattcgtggctggccccaccccttggcccaagaagcccagtttagccccacaggaaggagctgaacaagggtggtccaccatccccaaccgcttgtacacagggcccggtggttcccggcccggccgcttcggggctcagggtcccaaaggagggtttggggccggcccccccccttaggaggggatataagggccctttttctttaaaatgtttgtcctttaggggggccgttgggaccccaaaaccttnccgccgttttcccaaggccattttgcctcaaccctttggnggttcccttctttggaaaaataaggtggaacccgaggggaaataaccggcctcctttttttgttgggcccccccaaatggtccttaaaattccttgcctttaaaggtgaaaccggaagggggtttcggtcccctttaaaaaaacccccccccccccccccgggcgaggggggggggtttttttttttttttttttttgcctggcgaaaacccccccaaggccgggaaaggatgtttttaaaatttgtttttttaaaaatgaaaaaaaaaatgtttaccctttta

SEQ ID NO: 511777 - DNA, 1084 bp, Homo sapiens
  misc_feature (242)..(242): n is a, c, g, or t
  misc_feature (288)..(288): n is a, c, g, or t
agcggggggggggacccgcgcacctgcagggcccgctgctcccgccctgtcgtcctgcctgggcatcctgcgcccgggcatgacggcgcgctcattcgccctccgcggtcgtcatatctgcagccatcgttcttggaggacctcgttcgagcaatctgcgggcccgtggtctctgggccagaagaggggcccagaccgcgggaagttgactcattcaaccatatgactagggatctgaccanactgaccgatcctgctggctaaatccatcataactgcgctcaatcngggcagtccctgagtcggcaagaacgttggatagcctcctcgctgttgtgccgcgggcccccatgcttggagcgggaatgtacgagcccagtgcttggattagcgatggctgtcgtcttcgcctggtgagcgaatgttgaacccggcgctgtgagccgcggaactcccaggtggtgaccctagggctgctactggtacagttgaacatgctgagctgccctacctcgttgccccgtggaatccagagcacccaactttcggtctccggcatccctactctccctcgactaccgagaacatagtgttcgtggcgttccagcaccacgcaatcacgcatcccatgacatgcggcagctcgcaagtaggaacccggggcaccctgcgaagtggttcgctagccctgggattcccctggtgaaagtcattttcgccaagggggcattttacgcccgaagggcccacgtctccccggggcctcgcgttggggggagacgcccgcatcggggggccacgacgtcgaatgctgtggccgcaaggacgggggtggactgagtccccgtagtcgtactccaaagtgaaccccctggcggaacgtggccttgcctccgtggagagtttatagcccccttccttttgttccacccaccatggtgatgcaattggcctttgactatggggggaaaggcgtagggataatcccgggggtgggggagagggcacctccggacccctttttgtaccatgcgaacgggggcgccttgggaaatgcccaagtgggagcgtgctatcgttcgcg

SEQ ID NO: 511778 - DNA, 536 bp, Homo sapiens
aacctccgtagtgttttccataatggcaccactaatttacattcccaccagccgtgtgctaggatttctacatttccacatccttatcaccacttacctttgtgttttgatagtagccattccaacaggtgccagctgtcatcttactgtggctttgatttgcatttccctgatgattagtgacactgaacattttttcatatctctgttggccatttgtatatctccttttgagaaatgtctattcggggctggctgcaggggctcatgcctgtaattgtagtgctttgagagtccaggaaggaggatcgtttgagcccaggagttcaagaccagcctgggcaacaaagcaagatcctgtctctacaacaatttttattttttaaaaccaactagctgggtgtggtggcacgtacctgttgtcccagctacttgagaggctgaggtgggaggattgcttgagactgggaggctgctgtgagccttgattgtaccaccgcatccaccctgagtgacagagtgaagaccttgtctcc

SEQ ID NO: 511779 - DNA, 790 bp, Homo sapiens
cgacagcgacgccgcgagtccgagagaggagccgcgggcgccgtggatagagcaggaggggccgggagtattgggaccgggagacagcagatctccaagaccaacacacagacttaccgagagagcctgcggaacctggcgcggctactacaaccaggagctgaggccgggtctcacaccctccagaggatgtacggctgcagacgtggggccggacgggcgcctcctccgcgggcatgaccagtccgcctacgacaggcaaggattacatcgccctgaacgaggacctgagactcctgggaccgcggtcggacacggcggctcagatcacccagcgcaagtgggaggcggcccgtgaggcggagcagctgagagcctacctggagggcctgtgcgtggagtggctccagcagatacctggagaacgggaaggagactgctgcatgcgcgcggacccccataagacacatgtgaaccatcaacccatctgtgatcatgatgtcacctctgaggtgctgggccctgggtttctacctgcggatatcacactgattctggcagcggggatgggggaggaccacaactcaggactagcgtagcttgtggaagaccatgaccagccatggagattagaacccttccagaagtgggcagctgtggtggtgcctttctggagaaggagcagcacaaatacaaattgcccatgtacaggcattgatgggggcttggcggaagcgccatcacccctgagattggggaagcccatctttcccaggtgcacaattcccaa

SEQ ID NO: 511780 - DNA, 220 bp, Homo sapiens
gagaactcatacaagaattttccagataaatgagatttaatgctcggtgttcctcctcgttcttcgtcctggttaatctgggaagtaacgtaattcgtaactctctttgctgttagcaattacgcgcaatcagtcaggtagattattcttcttcaaatattttcgggtgagatatttcagatacctttgggagaagggcaccccgggtgtagaaatagaa

SEQ ID NO: 511781 - DNA, 148 bp, Homo sapiens
atccgtgattgttcatttactatagttgccccattgtgctgccaagacactagatctgtactccgttctatgtcactgtatagtatacccacgagccatcccctttctactcccctttccactacccttgccagcctctgctaaccac

SEQ ID NO: 511782 - DNA, 211 bp, Homo sapiens
tcaagaaatgcaacagagctcagaaaaaaggtacatcagcagtggtcattcgacaacgaaagtcatacccgtagaaaaagatggcggtgtttcttttatttttgaagataatgcaggagtcatagtgaacaataaaggcgagatgaaaggttctgccattacaggaccagtagcaaaggagtgtgcagacttgtggccccggattgcatcc

SEQ ID NO: 511783 - DNA, 162 bp, Homo sapiens
ccactctgtgccctgcgtttcgcctccaggccgggcgggagcagtgcctagcccaggtgtcctcgacgcgagcagctgggcgccgctgcggagggagggaagcgccgcgccggtcccgggcccagcgctgcgcccagtcctgaggcgccctcctgcggccgc

SEQ ID NO: 511784 - DNA, 160 bp, Homo sapiens
cggccacatatattagggaaggaagaggggctacaggcttttttatttttatttttttgaagcagggtctcgctgtcgcccaggttggtgtgcagtggtgcaatcactgctcactgcagccacgacctcctgggttcaagcaatccttccccctcagttc

SEQ ID NO: 511785 - DNA, 576 bp, Homo sapiens
agtgacaaacagaggcctggacagcaggtgcaacttgtgtgcgattaggtcgtaatatctaactccaagaggctcttgggtatgtggcactctgaaggataattttggatcgattgaaacaggcaatcatgataaggaaatctgatcatccattcacagtgagttctctggtgatgtgggatagcctgaaactggagggaacatgggtcgagtatagctatgtacaaaggacaaaggcaacaaagtcagtgcagataaagtgagcaaaacacactcaatgaatggcattagcaagaaggaagcgatcccacaatataaatctgggcaaggaactcaggcccccatgaggacgtgtgcaatccagcacggacggggtaccaccggcatgactcggattgggcaggagaggcagaatagaaagttaggtctatccaatgaaactcgaaggaaggcaagcaagggatgcccgaacagggagacccagtcatgaggtccggacaagacaacacggtaaaaagacctggggacaggaagtggagaaagcggataacgaaagagagggagcagaaagcagaa

SEQ ID NO: 511786 - DNA, 406 bp, Homo sapiens
tgaggatcccgaccactactggctgtgaagaagacgcctgtgtgggagagaagaatgcggacagcaggaggcatctggggcaagtgagcgtacaagtatgctctactaattcagaattcggtggaacaatccaaattcgacttcgacatgatagagaattgatgagaaatagctgtacggtttccaaaatttagtgaatttggaacctgaggttaaaacttataggataagagcaacctcaggttcagactggccttgggatgaaaaggcaatcacagacggtaatgagtgtcagtgcttgagaagaagaattgccaaaggcactctacatatttgacttgactcaaagagaggggaaaacaagtctcatttaagaaggatgagtctgcagcaaaaaatcaaaggg

SEQ ID NO: 511787 - DNA, 999 bp, Homo sapiens
  misc_feature (55)..(55): n is a, c, g, or t
gtagagcagtgcttagtttaaagattgctggagctggtagatagctcttctggantctctgtgtatttaagcatagtctccacgtagtaacgccgagtcttgttggaaatatatccctgtggggtacttacgctaccaagctagaggcaaggggcctctcggacaattcttcgtacagtgcgctccaatagcatatgtgatgtgtactcgtgtgaggatataggtatgaacgagagctcacttcggactgctgcatttctccgcagccgatccgtgggcccactgaggtggctagatgttactgttcacgttgcaggcctggggcagtatgagctagttgaagatcgtcgctagatatatacttgactatttgtttagatccataatcatatgaccaagatgctcacacgcatcccatacacgcaacccttgtgcgcactcggaaggggcactttggggaattgcgcgagatctttgactcggagagtataaccacacaaaagatgattatctagtacacttcttccagagccttatgactcactgcgaccatcataatgttagttgcatcactggtatacatacaatacgataagggcgaagttagggatgatcatactagtgattagagggtcatttggatctaaaatactttcgaggtgtaagttgtggactagcttgttcgggggcatggtttggggcgaagtattgagggtaagtagcgggggcatggggtagaattcactgaaagtaaaattggaagagctttctagtagcagttgtatgggaggaaagggaagctttcgttgcttgaggaataggggacgctgggtgagacccgtggtggaagggtcgaagaggttttggtggataatttggagtgaagggggacgaccaaggtgatttcacataaaatcagtattttgtaaacatactatatcttggactggtgggaagggggggtcggccggttccatattggttgtgaggatggtaaca

SEQ ID NO: 511788 - DNA, 439 bp, Homo sapiens
tcatagtgagtcctagagtatccccctaacaggctttggagctatgacgcgatataaacttcatcctaaagatgtggggacctctaaagacttaaacacaaaactcatgattaagttgtgtttcagaatgatcattctggctgtcgagagtggatatagactaacggtcctggaaggaagaaaagtagggtggaggcttttataatagtccaggtggtaggggacagtggcttggaccagagtagtggcagtagaattggagagtctagagatttgggaggcagaattggcaggacttgggattgacaggcatgtgggagttgaggaagagggagcagtcaaagttgactcccagtttctggcttggacgacggctggatgggagtgctattccctggtaaagggaacatcagagctgtcagcactcagtgctaggtac

SEQ ID NO: 511789 - DNA, 227 bp, Homo sapiens
agtttttcatcgaatgcagcccagaggttctttttactccatggtaccaaatgcaactattcaccaggatccccagtttatttttgttacgaatccagttactttaaccccccctcaaggccccccagctgcagtgcagcttttttcagctgtgaacattatgaatggttttcagatgcacataaacccagcaaataagtttttgccccctttccccccccatccta

SEQ ID NO: 511790 - DNA, 262 bp, Homo sapiens
actttgggggggggttaaaaaaaggaaaaaaggtttttccccccccccccaaaggatttggccccaggaaaaaggggtttaggggggggtcctcaaattttttagggggggggggaagggccaattttttcccctttgttgggggggccctttttttgaatggggggggggggggtttttggccggtcccttttccccccctttttgggggcaatgtggtttggctttttgttttccccccccccaggcccgggttttgttt

SEQ ID NO: 511791 - DNA, 263 bp, Homo sapiens
  misc_feature (96)..(96): n is a, c, g, or t
tcattcggtaagcagaaaaggcacttgaaggctgcctctagaggttgcgggtccccaagaggttatggtagatggcacagggtggggtgtcatcangggagcccagcccgtgatactacagtggtctcagctacagtagttgggtgcagcagcagaaagggcccaaggcagtgtcagtagtgctccagttagagactcctgtacaggcagcacgtgaagatcatgccaaagacctgcacacaggcaagtgccgatcccacaga

SEQ ID NO: 511792 - DNA, 908 bp, Homo sapiens
ctgggcctcggctagcgctcgagggcgggcacaaggccttgaggcctgagctggcccgcgtggagtgtgcagtggcgcgctggtggaggcccagctgggtggcctgcgctcggtctgcgccggtggctcggcctcggtcgcgcgcccagcccagccccgcgtgcagtgccggttcccctgcccgggactgcacccgcaagaaggaagctgggggaaggggctcaacagtcctcgagcagcgttaggaatgcagccctgggtcccaggcaccatctccaggacctgccacctccccagcctctccagacctggacccggaggcagtgcgcggtgggccctccggggaatttccgtgcaaggagctgcggtgagttgcccaaagagggagacggggacggacactatcgggagccccagacccacgttgcccgtgacatctgccgaggctgcgcccgagacttgcacgtgctgacgatgtggcaacaagcgcaggccacaagaccatcagaagacggggctaaggggcagggccttgcctggacacgcggcggggatgggcatcgacagcacgactgagagggcaaccgcccggcggcgacagctggttctattggcacaattgcgcgcgctcagcctttcgattgccgtcggggggtaacccaacgtcgcgtggagcagcccgtacgaggcgcgccatcgcccctagggaacgtagcgaagtaagtatttgttcgccctgcgcgtcccatccactcacgaacctggaggacccgacgggcccgcgggttacgccaccagcccgtcgtggacacccaagagcgattgtgcgcgcagaccagccgcttcgtcgaccacatcggtagcgcccccagtagcagaaggtggcccgaagcgcggcaagacaaggc

SEQ ID NO: 511793 - DNA, 281 bp, Homo sapiens
ctctccttcggaagttgtcggacacggcagtagctgatacccggcgccttaactcgaagccgcaggacctgaccgacgcttacgggccgccaagtaacttcctggagatcgacatctttaatcctcagacggtgggcgtgggacgcgcgcgcttcaccacctatgaggttcgcatgcggacaaacctacctatctttaagctaaaggagtcctgcgtacggtggcgctacagtgactttgtacggctgaaaaatgagctggtgagagatagcaagattgtt

SEQ ID NO: 511794 - DNA, 330 bp, Homo sapiens
  misc_feature (234)..(234): n is a, c, g, or t
  misc_feature (257)..(257): n is a, c, g, or t
  misc_feature (286)..(286): n is a, c, g, or t
  misc_feature (325)..(325): n is a, c, g, or t
aacaccactcagtttcaacaataaagctacagtaatcaagcaatgtggtactggcataaagacagacatatacaccattggcacagaataggaagtgtaaaaataaacccacatatatatatggacaactgaattctgacaaaggtacaacaaagccaatgcaactgatttttggaaataatgataataacctttcaacaaatggtgctggggacaattgggatattcatatgnaaaaaacaggaaaatccttaggntccattacttcggcattacacatttaaanctggtttcccaaatggtttattaaaccttaattggcctnaacct

SEQ ID NO: 511795 - DNA, 722 bp, Homo sapiens
  misc_feature (119)..(119): n is a, c, g, or t
  misc_feature (123)..(123): n is a, c, g, or t
  misc_feature (146)..(146): n is a, c, g, or t
  misc_feature (540)..(540): n is a, c, g, or t
  misc_feature (593)..(593): n is a, c, g, or t
  misc_feature (603)..(603): n is a, c, g, or t
  misc_feature (609)..(609): n is a, c, g, or t
  misc_feature (666)..(666): n is a, c, g, or t
  misc_feature (668)..(668): n is a, c, g, or t
  misc_feature (673)..(673): n is a, c, g, or t
cagtgcggggggggtccagctctggcccacggtctggttacagtcaggagtgcacgtgagcacagacacctcgaaacacctcgggaaacacctcgggaagcctcagcttagcctcgccntgcngttgtgaggccggagggtgaacngcgcccggtggggatggaggtctcgggtcccatgtcctttcccagcccgtagcagcagccacacacacctcaagtctcccaaagctcctcagtgaggtggctgcagggagaagcccagagcctcttccttggcagcccagggccccaggggcctctcctcactggatgccacagggtcaccctgtttatccaacaggcactgactgtctactcccctccctgctgcagggacacagtggaagtggggatgtggggatcaagcctaagtttctgcaccccagctccctcaggattcctccccgctaaggccccagaggcagtggcagggacagtcctcttagcctgccacctattccctctccatgggtgaagcacagccagaggccccaggttngactgtttggcagtttcctcgggaaccgatacagcatgaggcacacacccatnggggatggcnaggggntccttgaagaagtcctttgcggtggaggacactccaaggaaagtcctgacccagggnanccccncactgagggtccttaaagcacacacttcccagggaaccccccccgtact

SEQ ID NO: 511796 - DNA, 1248 bp, Homo sapiens
tgagcagaggacccaaccgtcagcactcctgggattcctccaggagaagggaccaattatgacaaatacgtagagctcaggtatcacttctagtttacttaaaaaataaaaaaatagagacagagtctcaaaaaaaaaaaaaaaaaaaaaaaaaaaaaaaaaaaaaaaaaaaaaaaaaaaaaaaaaaaaaaaaaaaaaaaaaaaaaaaaaaaaaaaaaaaaaaaaaaaaaaaaaaaaaaaagggaagtactataaggggaggggccggtgtggttgacacctactatatgattgatgtagacgaaaagatagtatttaaagaaagaagttggattatttaattagaaggacgggctgcttaggtgcgagaggtatgttcgaatcgagagttagagacagccacgagtgcgagtatgaaagacacagcatgattgggaggagacacacactatcagtggagggaagggcagtgaataatgaaagggaccccctaacacttactgggagagcgataactaatagagcgcggaggaggatcacacaacaaaaaacaagtgaataaaactcagaacccaagcgggaggagacaaaaacacacaggacgagacaaaacgacagggcggcggggagcaaaaccgatcgacgccaaaccacagtgcgcgcacggcgagaacgagcctcccgaccgagcggtactaaaagacgacagaccccaccaacacccggacgcgcgacgacgaacagagaaaaaggcgcaaacagaagaagcgagaacacgcgaagcgcagcagacacggacggacgcaacaagaacagagagcagaagcgggcagagagagacagagaaaccagcagggagctgacgaagacagaacagaggcagcgaagaggagggaggcgagacgagggaggagaaaggcaggggacgaaggcaaggaggagagaaagggaagcagagagacgagcgagaggaggagaagaagagaggagcagacaagagaggagagaggacgaggagaaggacgcgagcggaggagagacagagagagaagacgaggaagaaagaagccaagcaggaaggagcgagcagagcgggagacggaagcgagacgaaggaacgagcgagaacaacgagtggacaggagcaggagacaagccagagagagagagcacagcccgaaaaggagaaggacagagcgagagagagagagggggcgagacgaggcgcgagggaagagaccgaacagg

SEQ ID NO: 511797 - DNA, 191 bp, Homo sapiens
catgatcaacattggtaagatcattgggttacgtgctgaagcacgatacaagatacgtgataagtcatcaataacggcttgacgaatatcagcttcagtggcgttacgttattcatcacacgacgcatcgtgccaaacataatccgacgtccttcattaattaaatcaccagactcacgcatgtaaacaaa

SEQ ID NO: 511798 - DNA, 973 bp, Homo sapiens
ggctggcaggggcgctggaagctggagcggtcctgtgcgctccccgcgcccgagggtgcaggaggctctgaagcggctgctgcaccgcggggcccaggcggccggctggggggctggggggcgctgcctgctgccgccagccgggggcgtcgctaggctcggccccttagtactcgcgcgctccccctcgccgccactcccctgctgtcgcgcggaggggtggtggcaggcggcggtcctccctgcccgaggcagtcgggctcgggcctgggggcgcgcagggggcggggggagcacggccagccgacgagagtggggggcgatggcgaagctccgggtgggattacgagtacacggaagccgaggacaagagcatccggctcggcatggtatactcatcatctccgggcgtcgtgtcagctctacatcttcgggctacatgctggcatagagatcccgacgctgcagggatacaggaagcccacgggaggccaaataggcacacggatgcttgaacaggatgcagcaagaatcggcagaaggatgtaccgacgtgcaaccctttcaccatggtggcagccgacatgccagggtcgcaccattcggacagatagcacactggggttccaagggacaaaccgttgaaagcaaagatcatgacggttccaaagatactaggggcgactgagtgacaccaagcagaaacgaagacaaccaagacatacttgaagccaagccccaaaggttggcttccttaaataattcccattcccaccatgaataaacgaatgcaaggaacaaccttcaggaaaaggaaattttggcgaaaagaagatggcatcaaatgaaacattgaggcacagacaggttaaccgtgggaaacaagcaatatggagcaaagtggagtataccaccaagagcccacatataacctatgcctagaagcatgactaacaaacaattgaagaggaac

SEQ ID NO: 511799 - DNA, 755 bp, Homo sapiens
  misc_feature (17)..(17): n is a, c, g, or t
  misc_feature (624)..(624): n is a, c, g, or t
  misc_feature (667)..(667): n is a, c, g, or t
  misc_feature (670)..(670): n is a, c, g, or t
tatggtacttctgtctntggatcaccaagccattcaaagttattcataaagctgtggaggagattttgttttttaattttctgggactctgggaataatatcagatgactataactatcctgtcaaaaattatcccacttattttgtagtttccaaacaaatacatgctgttagaaaagattacacagtcaaaataagagattttcttttttcaattgtttaccatctgctttgtttttattctttcagatgtaatacacattggatgacatttagcctgatgttagttttgccttgacgttgagaatgttgagccctcattccactgtcgtagtctgtatgtcagttaaatacctcacaatagataatcatactgtaacgttaaacagctccctgaaaatactgacacagatcttaagagtttaggttagaaccataagaattggttcattcagctttcagaaagcactggcaggggagtcaaatgaaattgtgaatctcagcccacacatgaaagaacgattaagattattgtcactaagaagcccagaaatggttatcagccattgataatttaagaagtgtccttgccttcttttgctgtattcacagatttgggaatanttttatgctttagtcatttaactagagaacatatgcttactantantaaacaatcattcgtcataaactttaactttatttgctttacgaagtgtttgaaatggtgtttttatggaataacttttgattca

SEQ ID NO: 511800 - DNA, 306 bp, Homo sapiens
attcctaataaatttagcctactccaatttgtgttacttccacgatggtgccaaagttaatatccattcccacatatctactccagatttctttctgtataattgtgtgtgtgtgtgtgtgtgtgtgtgtgtagaagagggctcgggtgagaaatcagacaatttatctgttagaaaagagagctcatgccttgataagggtcgcagcctgagtgtggccattatgacgggtgggaagtgtggcccagagtccaaggctagagtaggccctccaggagggaaggagaggacggaatttgcgctgca

SEQ ID NO: 511801 - DNA, 354 bp, Homo sapiens
cggtcccactactcggggttgtgctataaggaatacaggggacaattgatggtacttatttaatgaatatgcattcttcttaccaccagggaaccatagttcgtgattatggagagcttgtaagtgtaacttccacagccacttaccaggcagaccctctcttagcttagtgctgagactcattgcctctcccatggaattttccatttgtgttgagggctgtcttgctccttacctacataattctcttgcagatcttactgtgccgagatcgctcactatgtttcctcctagaaccgcttagccatcgtggaaagagctgccctacttgccatcagagtcacttatcccgag

SEQ ID NO: 511802 - DNA, 625 bp, Homo sapiens
  misc_feature (196)..(196): n is a, c, g, or t
tctaaatggctgtgcaggaggtggtgaggttgatcggggttatctgataacagaacaggctcctctagaggatatgaagcaccgccagttctttgagtttaaaggctggtgctcgtagtgttctgccgagcagtttggttgatttaactgttgaggttaagggctaagcatagtggggtatctaatcccagtttgngtcttagctatggggtgtccagatatgtaaaagccactttcgaagtcaatttggggtcactgggagtttttaacaactcaggtgagtttaagcttaatgggggagggggtgatctaaaacactctttaggccggcttctatggcctggggtaaatcgtgtgaccgctggtgctgggcaggaaattgaccaaccctggggtaagtatagctaagttaaactttcgttaatggctaaaggttattcactgcggtttcccgtgggggtgtggatgggctaagggtatggagctgcattgttgcgtgtttaatgcttgccccttttgatcgtggtgaataagagggtgaactcactggaacggggatgcttgctgtgtaatcttactaagagctaatagacaggtaggaccaacctatacagcattaggtagg

SEQ ID NO: 511803 - DNA, 435 bp, Homo sapiens
aaggtgggagaagcacacaggagctgggcacagccacttcaagcccaggaatatgtgaacagaaaggagccattgtctccagatcacttgaagggaacagctcaaaaacacattcaaaggagcctgatgataatgaatatgctaagatggagtggtccactggacgcctgtgctacctccaaaaaaacccttatctgaccttcctcatggattcaaagctttcattgcaagtcgcacaggggattttggttaaaatcaccatgaacagttttcatttaaatggcacaaagctgggagttgtgcattcaagccatgagtatcacattggtcctgacacccctgaacttgctggggcaatgcatagattgtgactgagacttctggaccttctagctattgcctatgggtgggcagcactagcaagcattaagggtc

SEQ ID NO: 511804 - DNA, 761 bp, Homo sapiens
  misc_feature (246)..(246): n is a, c, g, or t
  misc_feature (348)..(348): n is a, c, g, or t
gtggggtcagcacgccggctgcagcgcagtgatgggcctgagatcgggtgccgggccccccatctccacctgtctggacacgcacccctggcctgtccttgcagcttcctcccgacatcccttggcggtgtctgtgtctcggccccagccccagccctcctttcctggggcaccctcccagccatctggtattggggctgcccccattgcctagtcctgggcccagggcagcccactctggctggntttacttgtctgttcctaatggcagggcgtcccaggaacagccccataagagctggtagaaacaggagggagtccttgtcagcaggcatcttcgagcttttngtttgtttgtaaaaagcggttaaccagcaagttacataaaagcttatttgttcccactgaattttccacacctcacacgtgagtcccagccatgcagtgcttgtgagggagcatcaaccccttgcctgctggcctgggcggggccctgggctcagaggggtcagccacagaggaagcgcctgtcctgacgtgtaggcggccaggacctggggcgctggagagggggccagcggggtgaagaccggctcccggggggcactggagcacaaagagggagggggactcatagtccaagctggaggaagacatgagcctgagctccaagtgagggcccttgcattggccaacagcacggggccccagaggctcaaacccgggcaattggcccgtgacagactgaagcagctggcccc

SEQ ID NO: 511805 - DNA, 357 bp, Homo sapiens
tgtccagccggtggtttttccaggcgattacctgtagtatttgagtaaagggcacgtccataccaatactctgtaggcttcgtttgtgggtcctccagcagccagatgacttgaactcctcagtacactcgtttcttgttgaagtgatctactcgaggaagaaggaccatatgcggaagagtgtgttcatctcctgagactggcccatgcccaagcgtttccgctcattagggcagcgcctaccatatcttatggtagacgtgttgtgtgaagccattgtccttaagctattcatgggaaggatgctggaacttgggccatgacctgaggggttcagccttagcttttccctttttg

SEQ ID NO: 511806 - DNA, 438 bp, Homo sapiens
  misc_feature (310)..(310): n is a, c, g, or t
gacggacagcagtcacaaggagcccttgcatggagggagccaatgagaactcattcgctttcacctttggccatggcggcgctggaacaagccagatcccaacttgggcttgccccggttcacaaacaccatgtttggagtgaggcagaagagcgctcgctcattgcccgctatcccaatgaaccgactcaggtcctagccgccgaattggggctcagcgtctatcaggtctatgccaaagccaaacggctgggcttgagcaaaagcgccgagtttcttcgcagtagtctctgtggccggcttgacgaangtttgggcgcagaattccgctttcccaagggatccgtcccatggaataagggccttaaggggctcccctcctctggccgtatgactcagacgcagtttaaggccggcaataaaccggggaactggctg

SEQ ID NO: 511807 - DNA, 449 bp, Homo sapiens
gggatttgaataaattctattaccagttcaaaaaaattaaaaaaaaaaaaaaaaaagaaaaaaaaaaaaaaaaaaaaaaaaaaaaaaaaaaaaaaaaaaaaaaaaaaaaaaaaaaaaaaaaaaaaaaaaaaaaaaaaaaaaaagggaaaaaaaaaaaaaaaaaaaaaaaaaaaaactttggggcccgtttggcccaacctctttttaaattgggccggttttttgtgggggccccttttgggggttttttggcaaatttccccttttgggggggcttttaaaattaaagggcccgttttttaaaacgtctggattgggaaaaccctggggttcccccatttaactgccttggaaaaaaacccctttttcccaggtggggtaattcccaaagggccccaccgaatggccctttcaggttgccaaccctaaggggaaatggttggaccctt

SEQ ID NO: 511808 - DNA, 146 bp, Homo sapiens
ctcctcagctgcggggtgccggcatgtttggctcccacacatcccagcacagcactcgtttctcgggggcaggcattggccacgtggttgtcatgcaccgtgtgtgtgcccgcatgtgtgtgcccagcgcgggcacggctggggat

SEQ ID NO: 511809 - DNA, 1001 bp, Homo sapiens
gtagtcttttatccctcactcccttcccaccctttccccctgagtctccagagttgagtcattcttatgcctttggatcctcatagcttagctcccacttatgagtgagaacatatgatgtttggttttgcgtcagccttttaattttttttttttttttttggaaagggagtctggctcggtcacccaggctggagtgcaggggtggcgatctgggctcacttgcaacctccgcctcccaggtttaagcagttctctggctcagcctcccaagtacgctgggattacaggcgccttgccaccatgcctagctaattttggtatttggagtaagagatggctttcacaccatctgtggccagtgggggtcttgaccgtgctgaccttgtgactccacctgcctgggcctccctaaggactaggattacgggtgtgaaccaccaatgcctggccttttttatttttggaacacagagtcccaccccttgtggcccagggcgtagaaagcgccgagaggcagagagacctgtgggccacaaagaggcccccaacttaaataggggcccaagtgagactacccgaggccataacccccccaaggatgcggggaacaacggggcagcggtatccacaaaaacgggggcactaattcgtgtatactttaaatgaggctactggacgttttgcgccacattttggcgccgcggggtgtctatcggaattcctggaaaccttgtgggtgaacccacccacgtggcgttgtgggggccccccccacaaaggtggtgctggggactatgtagcggcgtgtggtcaaccaaacacacacccaccaagtctttttgggtgaaagcgggtactttttaagtaccatgatggtgcaacaaatatgggcatcttggcgtggcgaacaatatatttttcccaaagagtctccctttatatcaagggcaactacagttgtaggaggacgcaatgttgtcataagagaatatcccgaa

SEQ ID NO: 511810 - DNA, 287 bp, Homo sapiens
  misc_feature (106)..(106): n is a, c, g, or t
ggggggttttttttttttgggccccggggcccccctttcaaggggttgggggtttttccccccccgtttttttcccccccaaagggggggggttataggggggggngtccccggccccccccccaaattttgttttttgtgtgggttcgggggggttttaaaaacccccctttgggggggccccggggggccgggggtccttttttttttttcccccccccgggccctttggtttgccccctgtggttccccgggccgttttttttttttaacgggggcccggggga

SEQ ID NO: 511811 - DNA, 118 bp, Homo sapiens
gagtatgaatatgtggaatgtgtatgtgatatatatatatatgtatatatatacacatatatatattatgagatatatatatgattagaagatatatatcttttaaaaacatagaaac

SEQ ID NO: 511812 - DNA, 274 bp, Homo sapiens
aagcaaaggggcagtccaggctgcaggcctctaaccccgagcacatggtatgcaaacaggagtatcacactctgcagtgcaagagcctgtccttcatcttgggggatgcaggcctgcagtgatgtcccccctgcattccagtactatccccgaaacaattcaccaccctcaaagacgtcctccgtgtgaacagcaagattatcttgaggatccctagaaagtggtccttcacatagtggatggcttgcatttttcggaaggtttggcttgttaa

SEQ ID NO: 511813 - DNA, 877 bp, Homo sapiens
gggccggaccggagatggcgccgccatcgtggcgtggcggcggcgtgcggcctcggactataggctccgccgcgagtgctcttggctggtgcatcgccgcggttgcggccgctgggcgccggtccagacgccgaaggcgcagctgcggcggctgcaggtctgagcggcggatccctgagaggcctgggcgctttccggttggtaggctgcttgggcgcgggacctgtgggcggtataatgtgcgagtggcccctggagtcagtgtcctatagcattccgatggcccctctatgccatgtcacgaggtctacacgtctcgtccaccaggagtggcctaggaagccttcaggccatgcaacttcctcagacctcaggaatgctcagtggtgggcagtcctagtccgaggtgccaccgtggaaggacagaagtggcagcaagagcaatcagccacagccttgggcccagaagcattgccctgtctccctgtccagtccccggaagcctccagactcaagggccctccagctgaggcagatcttcctaggagcctggaaacttgacggagagagaagagctggccagggagcctggcccgggctattgccaggtggagacgagaaggggggcagccaagtggcagcccgtcctggcccagcatcgtgtggccctggagttgttgcaggcttcagggaggcctgtttcccacctgggccccattcaggctgcaggtccacacttggaagacgctagctttgccgcatccggcgcgtcctctgcgacaccgtttgccctggcaggtccaccccaatgtactggttgcaggtcccaggaagcaggtgcctcaaagtcggttcccgcaaccggcaagtggtaacg

SEQ ID NO: 511814 - DNA, 637 bp, Homo sapiens
tccttcagaagacaggactcccgcttctgtctcccaggccggagttgcaggggcacgatcatagctcacttgtaacctcaaacctccgtggactcaagcgatcttcctgccattagccttagcctcctgaggtagctaggactgtaggcattgtaccaccgcgccgtggccgtgtgtctattttatcatctcagattaattcaatttggtatttccgggctcagatgaacttaaagaagcttcaaacttttctttttctatgaaatgttaattttaatagcatcacaggccggtaaaatattttcaagcgtacacagaattatcaaagtctttgggccacaataaactgaacactttatgaaagcatactcatcagggactcacttggaaataatacgagatctcaactttcaaggtgagaaataaaaagcctttattaaagagtggtgctaggaaacgagaacattgcgattaaattttccccattggaaattctgtgatttcagactctaaatgaatacagagttttgaccgtgtgatgttcaccatagtgtccttccttaaaatatctggttatgaaagcaagccttttttcattacacacaatttttctaggacaacctgccaaatagtctag

SEQ ID NO: 511815 - DNA, 325 bp, Homo sapiens
tcgacctactagaggatccctttgtcgattggaggaacagtacttggcttggtcttgaagtggacagaattcaaaaaggaccaagaagaggaagaagacaaggcccacatgccccaggctcagacagggagctgatggaggtagtagagacctgaagtcttgcaggcactcacatggcataaatgttattcaactccttccagttgtcttgaacagcctgactcctgccagccctatggcaagttccttttatgcattggcggaaaaacatgttggcttttctcttgacgtgggagaaattgcaaagaaggggaagggggagaaa

SEQ ID NO: 511816 - DNA, 199 bp, Homo sapiens
gaatctagattctgtcagtcgactcctctggaaaccaggcgcctggcaggctgctcacctttggggtgtcgatgtaggggtattggtgagggtgtggaagctgagagtgcaggcaccccactctggggcaccgcgccttgggggggccccccatgactctggggtgggtgcagcagcatcacctgggggcgggcgaggg

SEQ ID NO: 511817 - DNA, 894 bp, Homo sapiens
tgtgggcactgtgtttcgcgcaccacaccacggtgccttcttaccggggcgataaggatggggatacacccccgtggtttttatgtgattccgccttcctcaggggttcccaagtgaatcctggcatgatggagatctgtccctgacggggacaaccagcgcatcaaagctaggacggtacgtcgtgttcgcacacaccgtcactggggaccaggggcccactgagtttgcctgaggttccctttattctgatgggagtacttgccaaggagttaatcgcagatagttacagccattttgcccgacattatccgactgggacagcccctcccagaaatatggggtctcgtctttgtgatctaaaaggtttgtgctgccagctgatatgcaacttcaggtcttttaagccactcctggatcaaatctaccctggggagcatcccctgagggattccaccccacgaccttttccagggaaccccagcagaattttatggcccaccaaaagttccccaaaaactgcctggcaactgcgattcaccccacctcgtggggtatggtgctagatattactcttacctcatgtcccgagcggtcgcctccctggtttggcaggacgtgttttttaccggagtcccttcacacgggcttgcccgggggcgctattcccgggaggattctggccccccgtggggcgccgggaggcccctgctcactggttgaaggtatgcttcagacagtgtccttctttgagacttcgtaagtgccctcgtttccgacttggatttggacttcgaaactttcctcatggattttggattaaaggaaccctttacaccttttaatcacaggtcatgtagataatgactttgttattaatgctacagctgtgga

SEQ ID NO: 511818 - DNA, 180 bp, Homo sapiens
  misc_feature (43)..(43): n is a, c, g, or t
  misc_feature (84)..(85): n is a, c, g, or t
  misc_feature (88)..(88): n is a, c, g, or t
  misc_feature (120)..(120): n is a, c, g, or t
aggtcgggtcgccgtccagcctgcagcatgagcgcccccagcntcaccccatcttcgcgcccggcagaactgcagccccgcgtnnggnggcagccgcggccttacgacgcagcggacacnacctgcgcatcctgggcaagccggtgatggagcgctgggagaccccctatatgcacgcgc

SEQ ID NO: 511819 - DNA, 332 bp, Homo sapiens
gatttcttgagcccaggagctggaacagcctgtgcaacatagtgagaccctgtctgtatttaaaaaaaaaaaaaaaagagcctctactccaataattgggttttttccacccgtaaaaaacacggagtggctggacaggggggctcatacctgtaatcccaccatttgggtaggccgaggggggcaaatggcctgaggtcaggagtccaagaccagtctgggccaacatggtgaaccccggtctctactaaaattacaaaattaagctggggcatgggtcatgagcgctggtagtcccagctactcaggtagctggaggaccatcgttgggg

SEQ ID NO: 511820 - DNA, 934 bp, Homo sapiens
gtgcaggtgttcgctcctgccaacgccctgcccgctcggagtgaggcggcagctgtgcagccagtgattgggatcagccagcgggtgcggatgaactccaaggagaaaaaggacctgtggaactctgggctacggtgcctgggcattaccatgatggtgatcatcattgtccatcggagctggggatcatcttgggctactcctacaagagagggtggaaggatttgcagaacgaacgagcgatgatcagaaagtatgtgagagggagatgcagcgaatcactctgcccttgtctgccttcatcaaccccacctgtgagatatgtggatgacgaagactgtcgtggtccacacacagccagattccagttgatcctcaggagggcaccaccccccttatgggccaggaccgggactcctggggtcctgagccctcttcgcaggtgggcaggagtcgccatgcagagcactggtgcaggagcagaccaccctcctatcagctaggaggaacctaccactttgtgttgctggttaaaaccggtatccactcccccgctttttgtggtgaatcctagtaagagtgacgaagcaggtggccctgtgggctgagggtaaggctgggtagggtccttaaacatgtgcgcctgtgtccaatcgcctatgagagcagatgttgagtcgtgtggagtggagaccaggggcagctcccacagggatggtggcggtaaggggtgtcgagagatggctggacccccagggaactgagcagcggatagaggggggagctcccccagggcgctctgggccgtgagtaaagaggggcccagccccccgggggtgagggcacacggtccgggcaggaagacgcagggggcccgaaaaattcgttcaaactgggggccccagaggcagggaacggaacgcgaaggaagggg

SEQ ID NO: 511821 - DNA, 513 bp, Homo sapiens
  misc_feature (40)..(40): n is a, c, g, or t
ggaaaacgggaaattctgccctcaagggaccccccctgtngcctttaaggaccaatccctccaaacccctaccccacccagaacccctgaacaacccactggacccatcctcatttcctaaaaaccttgtcatttccatgtaagttaaaataaatggagcccatacgtgtgtgacccttttgggattggcttttttccctcttggcatatttctctggggatcatgtatatacactgatatggtttcaatcttggaggaatcctgattctgaaatccctagagtcccaaatctgatgatttcagggctgaacagttcccttctttgagtgatgaggacctgaaggctgagagacctgaggtgtcatgcccagggatcacccatgcacagcctgagctcacagcagagattccgcctccaggcccggagcactcctccgccatgaggtcttttacagctcagactgggcaaagctctttttaattccaccaaacctagaattgttaaaaaaaaa

SEQ ID NO: 511822 - DNA, 490 bp, Homo sapiens
  misc_feature (197)..(197): n is a, c, g, or t
  misc_feature (237)..(237): n is a, c, g, or t
  misc_feature (293)..(293): n is a, c, g, or t
  misc_feature (387)..(387): n is a, c, g, or t
  misc_feature (399)..(399): n is a, c, g, or t
  misc_feature (417)..(417): n is a, c, g, or t
cagaatttgagatggtagtaccgagaaaggttctgtttctttcttgaaagtcaactctatctttgcaccataaaaacataactatcgatatctataccccagaataatatttgtttgcaacaacttcttatgatgggtgtttaatactgttagtctgtaaattgaaactatttaaaactatatacatgccgggcgcngtggctcatgcctgtaatcccagcactttgggaggctgcngcaagtggattgcttgaggtcacttcaagaccagcctgaccaacatggcaaaaccntgtctctactaaatatacaaaaattcagcgggtgtggtggcgggcacctataatcccagctactcaggaggctgaggcaggagaattgctggancctgggaggcgnaggttgcagtgagccgangtcgcatctctgcactccagcctgggcaacagagcaggagtccatctcaaagactataaagcagaaaagtcgg

SEQ ID NO: 511823 - DNA, 396 bp, Homo sapiens
tttttggcttttgggggggactagttcctgtggaaaaaatgccttaaacttggctttttgttttaattttaattcaaaaacttgagatctttccggggccaccaggggggtaaaccagcttggtttggtttgtccaaaagtggggagtgatgggcaggttcggcaccctaacattgttcgggggcagggcccctggggggggaacccgaactgggttttttttttcctaggaacgccaagggcaggtttttggaaacccccttgggcccgggatggcaagggccccgggggggggtttccccatttgttttcattaccaaaaaagtgatgagggtttttttttccctccccccccggtttgtaataaaaggccaaattttgtcggctatccaacca

SEQ ID NO: 511824 - DNA, 128 bp, Homo sapiens
ctctaaggatcccgcctttcgctattctctttgagctcacacactcttcgcgagcttttttcctttggaggctgggtaaccatttcgaatatcatcagtccgctgatggtttactttgatcgtttcat

SEQ ID NO: 511825 - DNA, 489 bp, Homo sapiens
ggcttccctatgcagtgcacatgtctacctccatacaaatccatccagccagcatatggctgtgtgttaggtgtttcaggagatgtcaagacaaatcatccataaacctgcctgaaaggtcatcatcacaataagtcacattacttacattgtgccaggctccatgctgaactctttatgtgcattatctcatttaattgcagcaacagtccaggtgctgtggctcacacctgtaatcccagcactttgggaggctgaggtgggcagatcgctggaggtcagtagtttgagaacagcctggccaacatggtgaaaccccgtctctacaaaaaatacaaaaattagccgggtgggacacgcctgtaatcccagctactcaagaggctgaggcaggagaatagcttgaacccgggaggcagaggttgcagtgagccgagatcacaccactgcactccagcctgggtgacagagcgaggctccatctcaaaa

SEQ ID NO: 511826 - DNA, 284 bp, Homo sapiens
gcacgccgaaagctcattccattctctgagagctgatctttttagctgaacttgagaggatagtggtgtggggggggtgctgccctctcaaattacaacccgaatgcacttgccctttggtaatcctgctccttctgaatctgttccacctgatcaagcaactggcgggcgcggagttgtagctccgtcagcttatcttttgcagcaatctcagtgtagtttgtggcatgctccccaacctggatgtcgagatgcacacgccagttgccaccagcgaagagagc

SEQ ID NO: 511827 - DNA, 139 bp, Homo sapiens
caggatgttcggatctgatagatgagcgacagcgttcataggctagtccgtgacgtgaggacaaatatcattctgaggggccacagtaattacaaacttagtatccgacatcccatacatgtggacagaacatagattc

SEQ ID NO: 511828 - DNA, 352 bp, Homo sapiens
  misc_feature (172)..(172): n is a, c, g, or t
ttatttttaaaaattattttttcattgcccttggaaaagatatccccgattggggagaaaggctatttaaataatttacccggaaaacccgccgggagagttaggatttctatttttaaataaggtttgccccccgaattgaaaaattgtggggtttttctttttttgggtngggtttttttttttttttttgggcttttgcccccccctttttactattggccaaaccctttttttaggaaggggcttttttttggccccatttttaccccttttcccttttaaaccagggtaagtggtaaattactgttttttatggccaaggacccccaataaatcatatggaaattta

SEQ ID NO: 511829 - DNA, 214 bp, Homo sapiens
agatatacccgatggcgtgcaaaagatcctgcaggactacaaatcccatccaggatatcattgccatcctgggtatgagatgaacttactgaggaaaacaagtagaccgtgtcccgtgcacggaaaatacagcgtatcttgtctcagccattccaggtatgcatagaggtcttcacaggtcatatggggaagctggtaccccagaaaggagcac

SEQ ID NO: 511830 - DNA, 343 bp, Homo sapiens
tggagtgagtggcgcagcagactcggctcacagcaacctctgccttccgggttcaggtgattctcatgcctcagcctctcgagggagcgggaatcacaggcatgtgccaccatgcctggctaactcgtttggtatttcttatagagacagggtttcgctgtgtaggccaggctggtctcgaactcctggcctcagatgatccgactgccttggcctcccaaggtgctggcattacaagtgtgagccaccgctcccagtcctctgcccatgttttacttgggttgtttatttttgttgtcggatattaaaagttcattttatgttctgggcacacattatggag

SEQ ID NO: 511831 - DNA, 372 bp, Homo sapiens
gtgcttgtctggtaagtgcttatggacagcgtttgctctctctgcacccttggcctgagaaggtggtagtgattcgttcggctcttcgagcgtcacagtagtacattgagctcatgtatactggtagtattctcgagctgacgccggcaaggcctcatgtgttaacgtaatacgaaaggttctctgaagtctcatcaaggtgagtctcctttctgcaatgctgatccacgggaagaggagctggataggtatattcatcaatgtcatgaagggtggagcgtttcagttcgtccaatgaggcatcgaaatctgagatccataatgtagacatgcacgctggctagtcgagtctcagatgatgtgtcatctgag

SEQ ID NO: 511832 - DNA, 1041 bp, Homo sapiens
gccaggcttccccgcagcgggccctggaccccagccctgcactcctgaccgcctggccaagcagtgaggagctggagctgggacctgtgcccagcgctcctgaggagcggtgcaagtggtttgagtgccacagacagcagtgaccccagaggtgcctgctggtgagtgggccgcgccggtggcctgggtgcccccctgactgaggaccagcaacaatcggcttagtgaggagatcgagcaagaagtggcaggagctggagaagctgcccctgcgtggagaataatgcggtggtgcccctcactgccctgtctcaagccaatagccgcggagagcgccgagtggcccccaagtgactggccacgaggcactggagtaaggaggttcaggctcttcgggcccagcctgtacggctgtggcgtctccaaggggaggctcctcagaagctgcactgagatccccaggaggactggccacatccccccgtggctacattcttcacatggaggcatgtagagctgcagcccttgtccatgcagatggagttcctctgcaccagcacgggtgaatggaaggagctgccaggccgggcaaccaacagatgccgggagccttgcacgccgcccttgcacgtgcagtgaagaacgtgacgtgggctccttgggcttgagtgcagcacgtggcacgcgcacggtgtccctcaagcccatttgcaatgcccattgacagtaagggccctattcaccgcaacacaggctagatgccctggcggcaaggctggaagggcacagtcaatcacgcagggacagttcatcccaaggacaaggggtgtaccccgtagaagttgggtcccatcccccgggaacagtagccagccacccgaagctcacggacttgcttgtagacccggcaactcttgaatggccgcatgaaggccttgaaaagagattgcgtctatcatcaggagcacgctcactggtaagccttcggcacagtacagcagctgtcgcatatggccacgaatttagtgggcgcctcctctg

SEQ ID NO: 511833 - DNA, 268 bp, Homo sapiens
  misc_feature (172)..(172): n is a, c, g, or t
actgcaacatctgcctcccgagttcaagggattctcctggctcagcctcccgggtagctgggattacaggcgtgcaccacaacgcctggctaatttttgtagttctagtagagatggggtttctccatgttgggcaaggctggtctcgaactcctgacctcaggtgatctgnccaccttgacctcccaaagtgctgggattacaggcgtgagccatcgtgcccagccagatctggtaactttagattccgagagtctccgtcgaactg

SEQ ID NO: 511834 - DNA, 397 bp, Homo sapiens
  misc_feature (383)..(383): n is a, c, g, or t
  misc_feature (394)..(394): n is a, c, g, or t
caggcgctgggccagtctgcagccatctgattagagcaatgtttccggatcgcaggtggggcccattagtgggctgtgaaatagaactcttaaaaaaaaaaattgaggccgggcaaggtggctcacacctgtaatcccagcactttgggaggccgaggtgggtggatcacccgaggtcaggagttcgagaccagcctggctaacatggtgaaaccccatctctactaaaaataacaaaaattagccaggcatggtggcgggcacctgtaatcccagtgactcggaaggctgaggcaggaaaatcgcttcgacccaggagttcggaggttgtcagtgagtcaagatcatgccactgcactccagccttgggcaacaagagcgancctctgtctcngtt

SEQ ID NO: 511835 - DNA, 252 bp, Homo sapiens
tggtctggcatgtaccaggttgcttcaaccattcaccccactcaacaggcaccatccagtgttgttttccagttttttgccctcacatcacagctgctgtgcaacattcatgtcacaggtttttatgtgcaacatcaccattttccattttcatgggcataaatgctcaccaagggcacactgttagggttgtcatggtcaacaccccatcatcatttttgtcaagcaacactcaccctcactactggaggc

SEQ ID NO: 511836 - DNA, 248 bp, Homo sapiens
gtgtaggttggagtgaaactgcagagcagttccagggggtgtccagggaattgtctgggcttcaggacagctgattgtagtgttgaaggagatgatggagttgcagagggacctggtgggggatcgagaggatacaggcagacagcgagagcaggaagacggctagaggtgagaggggcagtgcaatgcgcagccctataggagctctgtgggagtggtcgatgcagctgcggtagatccagaagagc

SEQ ID NO: 511837 - DNA, 196 bp, Homo sapiens
acctcgcgcaggcccatatatagtagagagcttctcagactataccacctttgggatcgctttgctgtacgtgatatagagacagacagttgcggtgggtgtcatcaacagcagtgtgacaagaaggctgcgtggagctaggcaaggtcacccaagtcttgccccgaaaaggctcttatttgcccagtgctagggg

SEQ ID NO: 511838 - DNA, 123 bp, Homo sapiens
ttgatgttaaaagtatttagattctttcctcaggcaaggccagggctgttgctgcagaagccccagagttaggggagggcaggtgccaggcctcagaagagggggtggctgctgtctggctgt

SEQ ID NO: 511839 - DNA, 110 bp, Homo sapiens
agtgcgttgtagtgtgggcctgttgtcatgtgctgtcagtgcttctgtgacactctcctgggagttacccgattggagggcgtcacagagcactgacagcactagacaag

SEQ ID NO: 511840 - DNA, 432 bp, Homo sapiens
ggaagtcttttttttcttttttgtaaaatatatgtaacaggccaggcacggtgtctcacacctgtagtcccagcactttgggaggccaaggtgggcagatcacttgaggtcagtagtttgagaccagcctggccagcatggtgaaaccccatgtctactaaaaatgcaaagattagctgagtgtgtgccaccacgcctggctaatttttgggtattttttagtagagacggggtttcaccacgttggccaggctggtctcggactcctgacgtcaggtgatccgcccacctcagcctcctaaagtgctgggattacgggtcgtgagacaccgtgcctggccagtaacatatattctgtacacacaccctgatcactaatgatttcccatggcagttggtggcccgaattcccgggtatatgtgcccgtactg

SEQ ID NO: 511841 - DNA, 211 bp, Homo sapiens
agtgaacactgcagggccttctgtagggagtcactgataagggtagtacatctgccaacctccattagccagccgagttgggagttgagggcgagttagcttggcttccatgtgctgaccacattgagtagcacgtgacagctgttttggcatgcactaaatattgtgcttcctcgttaagatatttaccgtatgcttcttacttgctacc

SEQ ID NO: 511842 - DNA, 171 bp, Homo sapiens
ggaccgtgcactgaggaaaaaggattgcttgaggcagttcaaagactagcctgtctctacaaaaaatttaaaaattagccaggcatggtgttgcccacctgtgttcccggaacctcacaggctgaggtgggaggatcagttgagactaccaggtcaaggctgcagtgagct

SEQ ID NO: 511843 - DNA, 310 bp, Homo sapiens
ccaggctggagtgcagtggtgtgatctcagctcactgcaacctccacctcccaggttcaagcagttctcatgcctcagcctccccttgtagctgggattacaggcacctgccaccacacctggctaatttttgtgtttttagtagagatggggtttccccatgttggccaggctggtctcaaactcctgacctcaagtgatctgcccttctcggcctcccacagtgccgggattacaggcgtgagccaccgtgcctggccaacagtgtagaaacttgaaaaacagtaacttacccttctgtcgtcttctc

SEQ ID NO: 511844 - DNA, 787 bp, Homo sapiens
ttttttgggcgaagtgaaactgtgtgagaagatggcccagtttgatgctaaaaagtttgcagagacccaacctaaaaaggacacaccaccggaaagagaagggttcacgggaagagaagcagaagccccaggctgagcggaaggaggagaaaaaggcggctgcccctgctcctgaggaggagatggatgaatgtgagcaggcgctggctgctgagcccaaggccaaggaccccttcgctcacctgcccaagagtacctttgtgttggatgaatttaagcgcaagtactccaatgaggacacactctctgtggcactgccatatttctgggagcactttgataaggacggctggtccctgtggtactcagagtatcgcttccctgaagaactcactcagaccttcatgagctgcaatctcatcactggaatgttccagcgactggacaagctgaggaagaatgccttcgccagtgtcatcctttttggaaccaacaatagcagctccatttctggagtctgggtcttccgaggccaggagcttgcctttccgctgagtccagattggcaggtggactacgagtcatacacatggcggaaactggatcctggcagcgaggagacccagacgctggttcgagagtacttttcctgggagggggccttccagcatgtgggcaaagccttcaatcagggcaagatcttcaagtgaacatctcttgccatcacctagctgcctgcacctgcccttcagggagatgggggtcattaaaggaaactgatgtttaa

SEQ ID NO: 511845 - DNA, 789 bp, Homo sapiens
ttttttgggcgaagtgaaactgtgtgagaagatggcccagtttgatgctaaaaagtttgcagagacccaacctaaaaaggacacaccaccggaaagagaagggttcacgggaagagaagcagaagccccaggctgagcggaaggaggagaaaaaggcggctgcccctgctcctgaggaggagatggatgaatgtgagcaggcgctggctgctgagcccaaggccaaggaccccttcgctcacctgcccaagagtacctttgtgttggatgaatttaagcgcaagtactccaatgaggacacactctctgtggcactgccatatttctgggagcactttgataaggacggctggtccctgtggtactcagagtatcgcttccctgaagaactcactcagaccttcatgagctgcaatctcatcactggaatgttccagcgactggacaagctgaggaagaatgccttcgccagtgtcatcctttttggaaccaacaatagcagctccatttctggagtctgggtcttccgaggccaggagcttgcctttccgctgagtccagattggcaggtggactacgagtcatacacatggcggaaactggatcctggcagcgaggagacccagacgctggttcgagagtacttttcctgggagggggccttccagcatgtgggcaaagccttcaatcagggcaagctggtcaagttcccgtctcttgccttcccctgcccgcctgcatcttccgtgcacgctggtgtgtgtcattaatgctgtttgtcccttcaaa

SEQ ID NO: 511846 - DNA, 620 bp, Homo sapiens
ccacaccacactgaggagcatgcatacgttgtaaaagcgcgtacggcgaatccgggatgtatcagaatagttaagccttaattaactaatatagcttggacacttaaaagagctctaaattgcttgtacataaaggcttaattgttttcctgttagggtcaagggtgtcctccactctttaacagctgctggacagacacattagagcagctgttgttattgataataaaatattataaaactaaaaaaaaaaaaaaaaaaaaaaaaaaaaaaaaaaaaaggggggggggcaaaaacccccgagggccaagtttacccgaaccccccagtttcctgtgacaagagggccccaaatggggagccgataaaaaaccaaggcacgggccgcgttaacacacgccggacggggaaaaccggctacctgggaccctgggaagggaccctaacttcgggggggggacctactgggaccaacactacctacagagattaaggcccaggggaaataaaaccttcaccgtgctcaacgggtacccaacgcgccatatgctggcggctggaaagttggctaaccgggatatgatccgggaaaaattcattacacgactatttaaattaag

SEQ ID NO: 511847 - DNA, 391 bp, Homo sapiens
gaataggcctgtcttattctatactcactagcacaaatatatggttacccccaaactgtttctccaacaaccaagttatcatataagaattaaaatcagttcggtaacgtgtttgatctatataactaaaccagggctaaaggggtaacacactttacaatgacttctatcaaaaccattatttaaatcattaattcaaatcttcagaatcttaaaattatccaaaattactcgaatattttggtcatcaagaaaaatacacactcatcaaataaagcacagttcagctatacaaataggataccatacagctgcaaaaaaaaaaaagttgtttttccaggtatggattaggagaaacaaaaaccctgtgtattggaaataaaaggcaagg

SEQ ID NO: 511848 - DNA, 236 bp, Homo sapiens
cattgggggcaagaggcgttgggattggggatttggggtgagattggattgggagccccgctgggaggcttgttctttccctgaaacatgaggcctgggggagacccacccctgttgcccacttggggcccactgtgccgcctacccccacgtgtttcaattttgatttccaaaaatgagtttggcaggatgccttgaacaggaatgcaaagagctgtggtgggccggaagaagca

SEQ ID NO: 511849 - DNA, 313 bp, Homo sapiens
cggcacatggtatcgctacttatgtgcttctaagcagggatatcagttcatctatgtcttaattgctctgtcgtccaaggcaggcatatggttcaagcaaagacttgcaagtatgccagatgaagtgtccacagcccacctttctgttaggtgatcataagcttagagactgcaatgggaagagtggacgtaaacagaagaaaggaatggaaggacaattagtaatgtcatttgctgacagcgatccaccttacatgaaattgtaacaaaaaaaaaaaatccaggtgaatggccaaaatggaaaacagacgag

SEQ ID NO: 511850 - DNA, 433 bp, Homo sapiens
  misc_feature (11)..(11): n is a, c, g, or t
  misc_feature (110)..(110): n is a, c, g, or t
  misc_feature (129)..(129): n is a, c, g, or t
  misc_feature (203)..(203): n is a, c, g, or t
  misc_feature (213)..(213): n is a, c, g, or t
  misc_feature (294)..(294): n is a, c, g, or t
  misc_feature (298)..(298): n is a, c, g, or t
  misc_feature (315)..(315): n is a, c, g, or t
  misc_feature (317)..(317): n is a, c, g, or t
  misc_feature (334)..(334): n is a, c, g, or t
aattcggcacnaggcaatggagcctgaagagttcggcgcagttcctggggtctccacagctgaggcaggttggtcagatcattagggttcctgctcggatggcggcgacntgaatcctggagcctgcgngccgctgctgctgggacgaaccggtgcgaatcgccgtgccggccttagccccggagcagcccgtcacgctgcgncgtccctgcnaccgagaagggcgcctttttccaggcccacgcgcgctaccgccggacactcttggcgagctggacctggagcgcgcgcccnttgngcgcggcaactttcgcngnggcttgagccaatgggnttgcctcctgggcctttggagcccgaagaaaccttttggttgcggctggtgaagcgcgacgttgcgaacgcccttggccgtggagctggaggtgctgga

SEQ ID NO: 511851 - DNA, 121 bp, Homo sapiens
  misc_feature (106)..(106): n is a, c, g, or t
agtcagctcccccaagatgagctgcagcccccagagagagctctgcatgtcaccaagtaaccaggcccagcctccaggcccccaactcctgccaagctctccccgnctctggatcctgcac

SEQ ID NO: 511852 - DNA, 358 bp, Homo sapiens
  misc_feature (1)..(1): n is a, c, g, or t
  misc_feature (16)..(16): n is a, c, g, or t
  misc_feature (21)..(21): n is a, c, g, or t
  misc_feature (93)..(93): n is a, c, g, or t
  misc_feature (137)..(137): n is a, c, g, or t
ngtctgggatatatanagcanagtaaacacaaggaactcagtactgtgtcattcctcgagtcacaagatcactggttggtctgcctcatcctntctcagaggctccctgtgttctccttatgtatagcacaggggtnttagttgtagttagaagaaagaattaaaaagctttttattatgaagaattccaaactaggctggacacagtggctcacacctgtaattccagcaatttgggaggccaaggcaggtggattacctgaggtcaggagttcgagaacagcctggacaacatggtgaaactccgtctctactaaaaatacaaaaattagacaggtgtgatggtagatctcgtgcc

SEQ ID NO: 511853 - DNA, 517 bp, Homo sapiens
cggtgtcgacgatgagcatgccgcggctttggaggcgagttacctggtcattgatggacaacaaggcttgaccggctggggcacccgataacggtatccacaaaagaaatccggcccacttccgagatgactctcggtgcgggccgaacgattgatctgagtgtagcagcggtggtcgcggtgtgccacgcgtctggacagcggcgccgctgcgcgatgtaggttgtggccgcgcaattcgccccgaaaacctacaccggtggtgcgatttgagacgcggcgcagaggggcgccgggtcggcgtcgggggggaacaccttgaacagttccagcctgccgtcactacgtttcaacagtgcttccccggtcctggtgagtgatgtgtccgccgcggcgtcgccacccagcagcgcccttaggtccgtccggtgattgaggcgctggatcaccagttgagggcatttggcggcggcagcttcggcccaaaagcccggttggctgaagatccaaaggtgca

SEQ ID NO: 511854 - DNA, 279 bp, Homo sapiens
  misc_feature (96)..(96): n is a, c, g, or t
ggttccccctggtcccaaatttttttcccagtacaccagttgttcctcccccacctcagccctttcctgcatcctcctgtacccgcaaagaagggntgggctttccccccctccctccttagcaggggccggggtgggaccccatacgggttggtttcccctcctcagtcccttgcctaccccagtgagagtttgattttgtttttattgttattgcttttattattattgcttttattatcattaaaactttagtttttgttttgtttttccgaatga

SEQ ID NO: 511855 - DNA, 1394 bp, Homo sapiens
ggttggggctgacagaagggactgtgagctaatgtcctggttcatagtagaagctcatttggcccagccttgtatttctccctccacgaacatccaacctgtcgtgctgcactccaagacacgtgaggggaaacggcagcagggacaagtggccacgggacgggcttcaggagcgatccagactaaggatggccagatctttcgtcctatgtgagcacgtgtgagagtccaacaagtagttgtgctaagagccaaggacgtggcatcgtgagcaaaacatcagggacttcgtgagatagcccatcctagtagtcccttgatccttacatgacggggttccccattccctgaccaatgatggtctagtacatggagtcacggtcaacaccatagaacctggacagggtaaggacgacctaggtgtccttgacacactcctaggggcagagctcgggcgtgcgagaacactgggtggccagcagcataagagttctagctgggccatttgtcctcggggtgatgcgcggcatctcacacattatcacctggactgtacaggatccaggacaaagccactcaaagctcatctgaggcctgagaacccattgtaggccattgagacactcgagacaagcataaatgcgcccaatatggcccatttcaaggcattcgaggcactgggtaacaaagatacaattacttctgctacacattacgcctggtgaccgtgggcccaacaggaagctagaaaccacctactggaactccatattaccatcctttggtagaattaaacgacagggaattaatggcccatcaacgggacgcccagtgtacatttaagacatgtagtggggttccaatcttaataaagctaccagcttgaacacagtgttggactgtccacacacggagcaagggtagccaccaaagaaaacatcgtgggaccaaccacaacgaggcaagactcagaaaagtgaaataaaatacctatggcccggtagaatacccatagtcgaccacccacacccaattaaatataacaaagcacaccaattacaccacacacaatagacccagaagaacaaaaacaaaaatacaaatacaaaaaatcaaaacacccactacaactctaaccacaaacacttaaccaacatccaataacacaccgcaagcacaataaaataactccagactacacacttccataaacaaaaacatcgtcatgactcttataacctatccccaaacaatacacaaaccttaccaccaatagtaacacacaataaaaacaaaaccaccagatcacccaatcaactaccctcaataccatacaactcacatcaaaccaaaaaacagttgaccaccacatcatcaaacataaactccgacat

SEQ ID NO: 511856 - DNA, 137 bp, Homo sapiens
tcaaactcgtacaaggattgcataacagggctggatgagcaggttatggggctggggggcctggagttggggtccccaggctgagggtcatggttgtgtgtcttcgaagggaaacagggtcctggtatcctaagggt

SEQ ID NO: 511857 - DNA, 206 bp, Homo sapiens
agaataagcattttggaaaatttaacacccttatatgactaaaaaaaacaacaaactagaataggagaaagtacctcaacataataatgtcatcatgtatgaaaatgaacggtgatcattatacttattggtcaagactgaaatagtttctttgagataagaacaaggcaaggatccttccttttggaacttgttttacacatact

SEQ ID NO: 511858 - DNA, 494 bp, Homo sapiens
  misc_feature (317)..(317): n is a, c, g, or t
agactcctgacctggttcaagtgatctgccttcctcagcctccgcaaacagcggggaccataggtgtgagccaccgcgcccagcctcacttaaaaaaaatttatccgggggcacatacttcaaaaagctgtgacaaacacacttcctggtccatgaattatataacctagaggggcagcaggctgctgtaaccggggacggggatatcaccttcctcccactctcctcatcaatctaacttggcttccggctttcctagaacctagagcagctcgggcactcccctttccttcatccgcaaatcacccaaggtcggnaagccccacagtgagtatctaaacttttttttttttttttacaagagggggtcgtggctcggccaccagggcgggagtaggggggtgccatcataggtcacggcagcctccattgcgggggcccaagcaaccctccaacctcagcctcccaagtagcggggaccacgggcaggcacc

SEQ ID NO: 511859 - DNA, 304 bp, Homo sapiens
aggaggagaagttaggaatatgtacttaccagcggactcataaggcagtgattggataggaagaggaataaatataaaaatcagagaacgctgaaattctgtgacccctttttagttaaaaaaaaaaaaaaaaaaaagaaattttactccatttaaaacccctttaaaaaccaaaatttttcccaccaactgtttggggaaaaaccaagagctataaatcaaaaaccggcttccagcaaaagagttagtcctcagagtagggccagctcagcggatacggggactcgggtccggctaatctccg

SEQ ID NO: 511860 - DNA, 198 bp, Homo sapiens
  misc_feature (36)..(36): n is a, c, g, or t
  misc_feature (39)..(39): n is a, c, g, or t
  misc_feature (74)..(74): n is a, c, g, or t
  misc_feature (76)..(76): n is a, c, g, or t
  misc_feature (95)..(96): n is a, c, g, or t
  misc_feature (99)..(99): n is a, c, g, or t
  misc_feature (109)..(109): n is a, c, g, or t
  misc_feature (115)..(115): n is a, c, g, or t
  misc_feature (119)..(119): n is a, c, g, or t
  misc_feature (181)..(183): n is a, c, g, or t
  misc_feature (192)..(192): n is a, c, g, or t
ctgctctggtccgcctcggcccggcggcggccatcnggnccctcggcctcggctcgaggggcggggagctgcgngngcccctcggtccgaccganncgnggggctgggngcccgngcgngcgccccgggcccgcgcccgcagtccgccccgcgcgctccttgccgaggagccgagcccgcnnncggcccgcncgcccg

SEQ ID NO: 511861 - DNA, 362 bp, Homo sapiens
ccagcagtgggatcaacggtagcggctggttgggctaacgtagcgctcactgcgattgctactggagcagcaagtaatgcaacgatcagctttatcaataacggcggcaaccttggagctgtactcaaggatgtgaccgcgaagggagcgctgcgtgactatgtcgtttcgggagtcactgcaggactgactgcaggcttgttcgacaaaatgacgggaacaactaccgcggtagaaggcgcgttgccgaacgctggaaaggtgttggccgaaggtgggttgtcgagcctggaggggattggtcgattcggggctaaccagttgctacagaacggaacatcaacattgctggaccgggcact

SEQ ID NO: 511862 - DNA, 1091 bp, Homo sapiens
caaacattttgctgctgcctcagtggaaagtcagtcccactagacgtccaggttaccagaacaccatatcctgtgccctgggtgacgggaatagcgaggaccctatggagagcacgcatgttgctgcagaggatacctgccaggaagtgtctcatgtgaacgctctaggagatcaagagatttcatgatggccagattaggacaggagagagcaactagagatacgagtccagcgcagacgatgtgcctcgaaccataccaagagcatctcaaggctccaaagtgtcgcccgggcctacctgcaaggaacattccttggccctgccgcgagctgagggaggctctggccattgggacgtagtcaaggccatacccaaacccatgagggcatggagccacatgagggccccaaccgtgcggcatagacagcctggccccccaaacatagaacctcccaccaaaagcaagaccgttatgcccggtgacccgccgcggaccattgtggcaatccactttcgtgggctccatggccccagcagtggctaccgggccttatcgctggccaccgaaagttggctttccagctctctacagcgcccatgcctggacacgtgggcgctaaacgcgggtactcccctgcgctgcgttacaccccttcactttgccagtagtaacagttgcgtcgtgccccttccgccagcctctggtcccacggctcccttaccattggggggctaactaccgttcttcgaacacccgccctttcaagctcgccccacgtggctctatcaatgtcgcggtcctttacagtgcgtcgcagtcccttgtagctccacgggcaagcagcgcgcaacacggcaatacaaaggacatcctcatccggataggcattggcccccaacgaccactggcatccacaggcattagggggataaaaccccccaggagaatgactagtgtaccccccaggaggtggagcccattcaagacacacagccaaacagcgcttcgtctaacacatcggcccacagcggcgactaaacatggtccacggagaagttcatcgcaccacacgagacatccccatccat

SEQ ID NO: 511863 - DNA, 108 bp, Homo sapiens
ggcgtttatgtgactctgtgtgtgtgtgtgtgtagtattctgatggcatggttatataaacactataccaggagaaaaggaggtgtttacctgcccacaattgctggt

SEQ ID NO: 511864 - DNA, 365 bp, Homo sapiens
ctttacttccattatctcacctccttgtcacacctcctccacctgcaatggcctgcaatgttccctgtacaacgtatcactctgggtgacacccctggttcaccctaatcctcaatgcgctatctgctgctgaggggaaagcagtttgggtaggtgttatcatactacttgatgtcgggattgacctacgacagtatctccccaattggttgctttttaatagttcaccagtgcgtatatatatcatttgcttctaaatctgcttcgtaatcacacacacacacacacatacagcacacacgcacacccacaccctctcgaacctggaacagtatcaagggtaacagtgctcttcaaccttaact

SEQ ID NO: 511865 - DNA, 183 bp, Homo sapiens
ttagcagcaatggcataactgggcagaacattggcattttccaatgatgacgagggctgagggggtgtgtaccccaatctatcagcacacaactgcctacttggtggaagtcagctccgtccttctatgtactatggcacagcgctcagcacagcccatccaaccccttgggtaggaagtctc

SEQ ID NO: 511866 - DNA, 500 bp, Homo sapiens
agagacagggtttccccatgttgggcaggctggtctcgaactcctgacctcaagtgatctgcccgccttggtcttccaaagtgctgagattacaggcatgagccactgtgcctggcccagagcagatattttaaacatgacgaattagatctgcatgattcagaatattgctaacctatcggctctaacataagaaacaaggtggcaaaagtaaaacaaccaccaaagatttttaataactttaagacataactttaagataccagttaaagaaatgcctcacggtagttgataattgctaaaagaagagccatgacaattaagttgtaaaaacagattgaaaacttatacttccaacctaacagaatagttggtataggatttaccctagcaactagaaaatggggcggcatgtatgaaactactcttttcagatattacacagcaggcaatgcaggactgcgatccctagaatatagctgtcagctaaatatacaaaa

SEQ ID NO: 511867 - DNA, 130 bp, Homo sapiens
tcgataaggcaatcagcttttcaaattatgtgtgtgtatacatatgtatgtatgtgtgcgtgcatgtatgttgtgtattattgtgtagtattttcctcctctctctccctcttttgctcgctctaaagag

SEQ ID NO: 511868 - DNA, 515 bp, Homo sapiens
gaggtggggcaggaaatcacttgagcctggaagacggaggttgcagtgagctgagattgcaccaccacaccccagcctggtgacagagtgagaccctgtcccaaaaaacaaaccgaaacaaaacaaaactagactaatattttgaagacttgatggacttgggtgtatactcacaccagacttttgggtaacacaaagtgttccaatgtaactttgctgcaaattaattcaatttgtcttaatttcggtgggtacatagtggtatatatttgtatgaggtacatgcgcacattttcatacaggcttgcaatgtgtaagaattcagatcatggaaaaagtggggtagccatgccctcagggattaactcctatgtgtaacaaaccatccaatgatactctttaagttgtttaaaagtgtagaattaaatcattgactataataagctctgtggcgctatcaaatactaggtcttattcatacttaactaactattattggtaccattaaccatcct

SEQ ID NO: 511869 - DNA, 119 bp, Homo sapiens
ctgatggcttgtgtctttgacaggcatcactttgaagacattttttttaaaccaatgttcaaaactgtgcacaccctgaaaccatatttgaacttatttgtatggctctgatcgggtac

SEQ ID NO: 511870 - DNA, 211 bp, Homo sapiens
tctgcaccttcttgtgcaaggaagtccttgcctaaagccttggttctcaaactgggttccttgggactccgggtggggggttccaggaggcacgtagggtacttgcaggtcctggaggaacccggattccggaggatcccggaactgtggcacccattttctgtgtctcccagcccatttccactcctagtttgtcatggataatttttgt

SEQ ID NO: 511871 - DNA, 82 bp, Homo sapiens
tggagtaatccagttgcctctccttctaggaggagatgggtcataaaatttgtattgatccataattttctcttctagtttc

SEQ ID NO: 511872 - DNA, 417 bp, Homo sapiens
catgtcctatccgtgtggtgcccagctcattgccgtggcacggtcaggaatagagggcgtgaccatcctttgtatggtcaaacctagcccttacgcccgtgctgataagggagagaagctgccccgttgtacacgtccaacaacctctgggtggtgctcatgagaccactaggcaagttaagcgaagagctacagggctagcgggggctccctagagggcagcttgacacagaacgatgaggggccatggggtcgccccaggggagcagaggaaggagaatgggcaggacaaatcgtccaggtcactggggatgcaacagttgccagagcggtgcctggtgccacaggaagcccaacatgactctggtccatgctgcccaggggactctccagacacagggcctcaccaggcctggc

SEQ ID NO: 511873 - DNA, 299 bp, Homo sapiens
agactcttacgaggatccccgcacgacacgggcgactccaggccagaggtaccctagcgctgctgtgctgtgttcactgcccacttcagatctgcgctagggaaatgggctttactccctacattttggcacgcaaatcctgctaaagatacagattagaaggaaatgggggcaggtgccagtggctcaccatgtctactacacatacaatacgtagcccgtgctgcactgtctcactcctggtatcccagctatacaggagactgacgcaggacaatccctttagcccaggaagctga

SEQ ID NO: 511874 - DNA, 316 bp, Homo sapiens
ggatcgggagatcctgaggggcggagatcctgaggaagacctggagtggagttaggggacggaatcagagaagaggtcggatcttataagaacttggcaattttcctctgactgaaataagaaaccagcagaagatttagagtccaggaatgacaggttctgacatacattttaaagattcctctgtttgaggcaacctatagaatgggagaaaatttttgcaatctgtccatctgacaaagggctaatacccagaatctataaagaacattaaaaaatttacaagaaaaaaaacaaccccatcaaaaagtgggtg

SEQ ID NO: 511875 - DNA, 157 bp, Homo sapiens
acccctttagtgctagatttgggccatccataaactggttcaaatttctttgctgttagatgaaacacatttcttccaaaaaaatttctaatgtcacttttgcacttttttaaacaaagtatgtttaacctgttgggctccccagaaaaaaaaagaa

SEQ ID NO: 511876 - DNA, 395 bp, Homo sapiens
tttttttttaaacagacaaagcccacatcattgagtctggacaacataactctgccttgtgttgatagaatatcgaattaacattggaatcgtcttacctaagtgatttaaattcaacaaaattgacaaagacaaagcctgagcaactcgtctcgaccaatgatttataatacactagatgactttcgggggtgttgttttgaagtcactgcgcctccatcttggtactccctcacattgtaaaaaagtatttggaagctataggaatgcatttactaatgtctacatttgtttttgccgtatatttattctattacagacaccttaatacataccttgaaattatattatgtcagctaaacatccaaatattagtcgacgcggccgcgaattta

SEQ ID NO: 511877 - DNA, 347 bp, Homo sapiens
  misc_feature (12)..(12): n is a, c, g, or t
  misc_feature (43)..(44): n is a, c, g, or t
  misc_feature (126)..(126): n is a, c, g, or t
  misc_feature (159)..(159): n is a, c, g, or t
  misc_feature (298)..(298): n is a, c, g, or t
  misc_feature (330)..(330): n is a, c, g, or t
tgcttgtttcgncaaggcgggtttttggccgccgagaacacannggtgtcgtggaaagaagcttagcccgcttaaaacaggcccaagaaaatggggggaaaaaaggggacaacaagaactcatatncaacattgtcgtcattggacacgtagattcggngcaagttcccaaccaaacttaacttggggccatctggaattcttaattaaaatggcggtggcatcgacaaaaggaaccatttgacaaacatttcgaagacaggaaaggctggctgaagaatggggaaccagggcttccntttcaagtttatgcctgggggttctttgggcnataaactggcaaagctg

SEQ ID NO: 511878 - DNA, 182 bp, Homo sapiens
ccttggggggaaggctcccttggtatgtgggagagggcttttaacaaccaaattaaccccaaattcccgtaaagttggggctccgtaggccgtcctccttgcccgttgggctccccaaggggcctcctcccctccttggaaccggccctccttgtctttggattaagtcttaattgggggga

SEQ ID NO: 511879 - DNA, 234 bp, Homo sapiens
cccggaggcgatcatcagactaacactttacacactgagttacatttcaaaagacagatctgtaccaggggggatgcctcacgcgtgtaggggcagcactttgtcagtcccaggagcgcggatcacgagctcaggagatcgataccatcctggctaacacagagaaactctgtctgtactaaaaatacaaaaaagtagctgggcgtgatgacggagcctgtcagcccagctact

SEQ ID NO: 511880 - DNA, 439 bp, Homo sapiens
cttgagagagagaacgaattcgttaaaatttgtttatttgccatcctatcataatatgactacctaggggaagaataattaagtggagtcattaactggtgtatttaccacatctttgagcgggaatcataattattggtcttacctggatgtataccaccctcagttgtcccgcagtaagcccacccagcttctctatgttaattttcaagaccatctaagtcttctagggtaatttagtccactacagtagctttacagatcacacacatgatagttatggcgcagacctgtatctccttccttaatattgcgtaatagcatctaccggatatatccagctgactctaagactcccactcctaaatgtcctgcagctccctctaccttaaaatttccaaaactatgtcaattctcttctcttctaatcttgtttttc

SEQ ID NO: 511881 - DNA, 919 bp, Homo sapiens
gcaaacgtgtgacgatgatttaaacagggggtgcacacattatttggtcccctgccttacttgcgcgaaaattcaccccggttagtgtagaccctttccactatggtaatacaccgcgccgttacttctctccagggtccccagccttagctattctaacaaaggggggttgtaataaacaaggataagtgcgtctgttccaaatggtgccgcagtacaccaccgctcgtgaaaaaatttggcgggtaaaccccacccccttgcttctgggtccgctgaccaacaaaatggttgcaacttcattttgttaagaccccaaacactatattgcaataggaactattccctccccccgtgcggggcttctgttcctcaaaaccccccaaaagggttttccaaccctcgcgtttctctccccagaaaaataggaaaccattattattatataataaacaacaccccccgagagtctctggagatatattgtcttataaacccacacataacttcgccattgtctattccccctacacatttcacactcttcttttcaaaagtcaacaagtcagataaaccagtcggttctaccaaattcccatggggaagacattaaaccacagatccctcagcgaccggttcactaaaataaaatccgtgcctcttgctaaatcccttctccccatgcgtataatatttcttcacaagatcttgttcttcagcaattaggtaccaccaccaaccgggtcaacatactcacccgttttcccacaaaagggaaatcttcttcttctaaacacaaagaacataaatagggtaaaatcttttggtggctataattttcgtgatgttcatgcaagcaccaacaccaattttttttaaaaaaacataggcctgttaaaaatggaaaaaaaacaaaaca

SEQ ID NO: 511882 - DNA, 573 bp, Homo sapiens
  misc_feature (31)..(31): n is a, c, g, or t
  misc_feature (70)..(70): n is a, c, g, or t
  misc_feature (74)..(74): n is a, c, g, or t
  misc_feature (80)..(80): n is a, c, g, or t
  misc_feature (90)..(90): n is a, c, g, or t
  misc_feature (106)..(106): n is a, c, g, or t
  misc_feature (127)..(127): n is a, c, g, or t
  misc_feature (186)..(186): n is a, c, g, or t
  misc_feature (225)..(225): n is a, c, g, or t
  misc_feature (251)..(252): n is a, c, g, or t
  misc_feature (254)..(254): n is a, c, g, or t
  misc_feature (261)..(261): n is a, c, g, or t
  misc_feature (264)..(266): n is a, c, g, or t
  misc_feature (268)..(269): n is a, c, g, or t
  misc_feature (271)..(271): n is a, c, g, or t
  misc_feature (280)..(280): n is a, c, g, or t
  misc_feature (282)..(284): n is a, c, g, or t
  misc_feature (307)..(308): n is a, c, g, or t
  misc_feature (372)..(372): n is a, c, g, or t
  misc_feature (503)..(503): n is a, c, g, or t
  misc_feature (539)..(539): n is a, c, g, or t
aggatggggtaaaagaacctaggcagcagangcagctgatgggggttcgggcccctcttcaagttcagcnagtncctgantgaggtcatnccccatcgtcctttcncctcgaaccccacctgaactnagctgaggatcttccggggcagttcaacagcagcacggatgaagaatgcatcatcccgnacatagtttcgctttcgaatgtcctggtgggagatgaanttggggtaacaaagaacagagatttnnanccagggnttnnngnnanggggggggngnnnggaaattcttccagtttgggtcnnggtggaaggtctcagtgacgtgctgtggtttagccagcccagggtcgctctgatccagcagggngaaggtgacacggcgggcaaagggccactcaaggagattgtcaaaggcaccaggcagcacacgaatgtacagtgagaggtgtgtgccctcaccactgccattgccattgaggaatgcagacacctgcagcntgtaaccatacttatgtgtgtagaaggctgggctgnagcactcaaggttgggcttggctttggctcctgt

SEQ ID NO: 511883 - DNA, 1124 bp, Homo sapiens
tggtggtggtgtacttgttatatttatttggaaaccagtttaaggggatacaaccagcatttaaaaaatgaaatagaatacagcatggaaaaaaaaaaaaaaaaaaaaaaaaaaaaaaaaaaaaaaaaaaaaaaaaaaaaaaaaaaaaaaaaaaaaaaaaaagaagaagaaaaaaaaaaaaggcaaaacaaaacagaagaaagggagagaagaaaaaaaatacgagaaaggagaggatgagaacgaaccgggaggagcgaactagcaaacaaggcagatcgaacagggaggaatggaaatgcactgattcagatcggaggcgagcgcgcaggacgagcagggcggggagaaggtctctgcacgatgcagcgaggaagctgcaggcgagggcgagggcaaccagaggagcgcgagcgatagagcgttgagaggtgcagagatggtagatcggcggaggccagcagagatgaagaactgaggcgggatccttgacggaaggtcatcgaacgagcgaaagagtcagtcgagacgaaagaatggaatgtgattagagaaaatcgcgcaagacgtagagcagagcgttcagggacagaagcacagtcgagaaagtaggcaagagaagataagactagaaagaaagagaagagaagggagtacgggggtgggagcggtgtgagccaaggagaagagacaggagcagtgaatgctcgacgacaggcagccgaaagaacgacgagaggagaaagaagaagagtaaggaagagtagtggagcgagggaggggcagaagggtggcgtagagggataagacgagaaaagcgagtgggacttgctgacgtgtaaaggagagggggggcggaaagaaagggagaggcagagggggatgagcggggttcgatggaggggggggagtatgggatgaaaaggagagggggaaggaaggggaggaaaggaaggagtgagagagagaggggcagagaggagaggagggcagagggaggtagaggaagggtgagaggcaaagaggacgagacggggagggagagagcggaagggtaagcgaggaggacggagaaagagagtatcaggtggaggtggggggaggaggaggatggagagttgcaa

SEQ ID NO: 511884 - DNA, 373 bp, Homo sapiens
  misc_feature (312)..(312): n is a, c, g, or t
  misc_feature (360)..(360): n is a, c, g, or t
ttccagtaaacattattttattttatgacactctgcattaatacaataaatatacaaaacttccaaaccactgaaaacatgcaacatgagagggccacatggagggcgtttacacagaaccgtgacataccacaggggcagcgcagtagtacacgcacctacacaatacacaaacatccctagagcaatgaaccgagccccaaatcacaaatcaccaagcaatccgtttccagtgatcagacccgagttttaaataaaacagtcaccatttaacatcgccaactaaagaccgtgacatggatgcctggtccntcgtgcaagctcggtctcatgggctggcagtaacattgggagttggantaggagacggtca

SEQ ID NO: 511885 - DNA, 167 bp, Homo sapiens
aatcaacctggggttcgaaatcagtgagacctggattcaaattttgccttgaaaaattgtgactttgggaatgacaacacctggtttgttttttgttgtatccccagccccaaagacaggtcctggccaaatatcaaggtttcaataaaaatttgctaaatgagtga

SEQ ID NO: 511886 - DNA, 288 bp, Homo sapiens
gaggcaacccagctgtgtgagaagcggctgactgtggtgcttgcgtggtgagtgagcgaggaggactgggcaccatgtgggcccagttcccacttcgggaatctctctcgcagaaccgaggtccccttcatgggggtagatgcccagggctagctgttgccactgtctgtgtggacctgagtcctgaacatgcccgagtgactcaaggagtggctgcttggggcgggcttctgtcaccctaggatgttatacattctgggacctggacaggagtggcttgccttgggc

SEQ ID NO: 511887 - DNA, 1169 bp, Homo sapiens
agttgttggtaaaaacaagtgtttggagacctgcacgcgtgtgcgcagcgatttgtcttcctccatatgggtcactactttctgatgtcctcatgacctccctgtggcaacaaaaagaagtccggtgtgcgtgccaggctctatctgatatgaaggcttgtttacagtgatcgggtcttctcccgcgcaggctaacagtcggtgccccttaattggcgttaacccttcattaggccgtgaatgaacggccccttcaattttttgggccctcctgaagaccctggtaggctgcactcagctgtagcgacgtagtctaatccggctgcagctgacccgatcgtcctggttcgcctggcggttgagtcgcccacgtatagcggttcctgcggatcccctctgctgccccaggccaggcccacctgccctttggctccccagccacgtgaccgtaagcagcacctccagatggcagggaagctggctcccgcggagtaaccccagggttccagccagaagccaggtctcaggctagaatccagctcacagtccctggcagctgcccacagaaactagggtagcagcagccatagaaaggacagaatgagctcatatcctttgcacaccgtggatggagctggaggccgtgatccgtaagtgaaccaacccagaaacagcaaatgaaatgccaataagagggaactacaggatggttcacgtgaacgcaagatggagaacagggacacgggctccagggcgtagagcttgaatgactacctacagggctacagtgttcgtcgctacttggtgtcaggcccactagaacaagggtccccaaccgccaggctgcggaccggtaccgtggcctattaggaaccgggccacgcagcaggaagtgagcggtgggcgggcattgcctgcacggagaactgcaccgtcaggtcagatggcagcacggcaactagatttctcccagcgcacgcacggcgctaagggataccaggctgcgcgctcctgcatgacaatcgttaatgcctgatgatcgggggtggacagttttatccctaaaccattcccgtcaccccagtactatggaaagacttgtcttccacagaaccagtacctggtgccaaaaaggactggggaccactgcctagaaggcaaatcgccta

SEQ ID NO: 511888 - DNA, 194 bp, Homo sapiens
ttgagatcccatcagcagtcagtcagatacaatctcaaaacataggagataggcaggtgcagtgacttatgctgtatccagcacttggaggcaggggcggtcactgaggtcgggagtcagacagctgacaatgggaacctgtctctataaaatacaatagtaggtatgagggcatgctgtatcccagctacttg

SEQ ID NO: 511889 - DNA, 258 bp, Homo sapiens
gccctgacagtttaaagacctctgaccagtgtacgacaaatgtgctgacttcatgcagaaagacgtaaataatggagaatgctttcgtgctgaccatctattaaaagctcatttacagaaattgatgtctgacaagaagagctctgtcgaaaagaaatcagaaatggaaagtgttgttgcccagcttgataactatggacagcaagaacttgcggatctttttgtgaactataatgtaaaatctcccattactggaaa

SEQ ID NO: 511890 - DNA, 158 bp, Homo sapiens
ccggcatgtaggcagatcatggtgactacataacttgtacaagctcaacggctagtaagtgacagagccataatttgaacacaagagaaagaatcaacaccaaggccgggcgcggtggctcacacctgtaatcccagcactttgggaggctgaagtgg

SEQ ID NO: 511891 - DNA, 214 bp, Homo sapiens
ctacacgccaaggtgatctgcgattgctgcaatgggcctgtggtagtgaacccgctacaagtgcagtgtatgcccagactacgacttgcgtagtgtctgcgagggaaagggcttgcacctgtggggcacaccaagctcgcataccccagccccttcgggcacctgtctgagtggtattctcgcacagcctgcttggatccggcaaggtgaaaca

SEQ ID NO: 511892 - DNA, 137 bp, Homo sapiens
  misc_feature (70)..(70): n is a, c, g, or t
ggctatacattatcaagaacagactgtgatactggagagcggctgaatgcaatggagtgtgcattacatntggaaaaaaatgtgaatcagtccactactggaactgcacaaacttggcactgacaaaaattgacccc

SEQ ID NO: 511893 - DNA, 251 bp, Homo sapiens
  misc_feature (123)..(123): n is a, c, g, or t
  misc_feature (181)..(181): n is a, c, g, or t
ctagttttagaagtttcaatagcataaagagacagagaaaaaaggtaagcctatctcaagctacagaatggagggcaactagaaccactgaaggggcttccataattccaaatttagaattgngaataaaaataacagaagggcctcagatttcgtcttaattgtgaccagctttctgggnttttgggtgtgtgggcctgcgttggatggtgacacagaggccccatgacgtggggctattggaaacttct

SEQ ID NO: 511894 - DNA, 475 bp, Homo sapiens
  misc_feature (423)..(423): n is a, c, g, or t
accagtctgaccccattgccacggtgacctttggcttatttcttagcaatgattgtgggcttcctatgggcaggtactcagctcctactggatgcttgtgtggaagccaacgtgccaacattcatctacagcagctcagtgcttgtggctggaccaaattcctacaaggagatcatcctgaatgcccatgaggaggagcatcatgaaagcacatggtctaacccatacccatacagcaaaaagatggctgagaaggcagtgctggcagccaatgggagcatcctgaaaaatggtggcactttgcatacttgtgccttaagactctctttcatctatggggaagaatgccaagtcacttcaaccactgtgaaaacagcactgaagaacaacagcataattaagaaaaatgccacattctccatngccaacccagtgtatgtgggcaatgcagcctgggctcacattctggcttgcc

SEQ ID NO: 511895 - DNA, 687 bp, Homo sapiens
  misc_feature (635)..(635): n is a, c, g, or t
caggagcaggagggtttcttggccagaggattgtccgaatgttggtgcaggaggaagagctgcaggagatcatagccctgttcaggaccttcggtcgaaaacaggaagaggaattgtccaagctgcagacaaagaccaaggtgacggtactgaagggagacattctggatgcccagtgcctgaagagagcctgccagggcatgtgtgctgtcatccacaccgctgctgctattgacccccttggtgccgcttccagacagaccatcctagatgtcaatctgaaaggtactcagctcctactggatgcttgtgtggaagccaacgtgccaacattcatctacagcagctcagtgcttgtggctggaccaaattcctacaaggagatcatcctgaatgcccatgaggaggagcatcatgaaagcacatggtctaacccatacccatacagcaaaaagatggctgagaaggcagtgctggcagccaatgggagcatcctgaaaaatggtggcactttgcatacttgtgccttaagactctctttcatctatggggaagaatgccaagtcacttcaaccactgtgaaaacagcactgaagaacaacagcataattaagaaaaatgccacattctccatngccaacccagtgtatgtgggcaatgcagcctgggctcacattctggcttgcc

SEQ ID NO: 511896 - DNA, 381 bp, Homo sapiens
actctagaggaccccgggcgcgtctgcaggctattggttcactgcagtcaggctgatggttcgcatcaatacactagtcatggggatacgggggtgtaggtgtgccttgtgataagaagtgggctagggcatttttacatcttagagcgaacgcctataatcactgcgcccgctcataaggggctggccatggctaggttaatagatagtggggtggttggtgtaaatgcagtcacaggcaggcagtccgcagaaggtatcagtagtggcactacagcaacatgcattaaggcatactagtatcaagagcatcaggtccgtccttacagtgttgtgtatggttatcattagtataggaggtaggtaagatcagtcatggtg

SEQ ID NO: 511897 - DNA, 743 bp, Homo sapiens
  misc_feature (1)..(1): n is a, c, g, or t
  misc_feature (4)..(4): n is a, c, g, or t
  misc_feature (11)..(11): n is a, c, g, or t
  misc_feature (59)..(59): n is a, c, g, or t
  misc_feature (79)..(79): n is a, c, g, or t
  misc_feature (89)..(89): n is a, c, g, or t
  misc_feature (111)..(111): n is a, c, g, or t
  misc_feature (115)..(116): n is a, c, g, or t
  misc_feature (124)..(124): n is a, c, g, or t
  misc_feature (142)..(142): n is a, c, g, or t
  misc_feature (144)..(144): n is a, c, g, or t
  misc_feature (158)..(158): n is a, c, g, or t
  misc_feature (163)..(163): n is a, c, g, or t
  misc_feature (224)..(224): n is a, c, g, or t
  misc_feature (235)..(235): n is a, c, g, or t
  misc_feature (247)..(247): n is a, c, g, or t
  misc_feature (254)..(254): n is a, c, g, or t
  misc_feature (273)..(273): n is a, c, g, or t
  misc_feature (282)..(282): n is a, c, g, or t
  misc_feature (388)..(388): n is a, c, g, or t
  misc_feature (401)..(401): n is a, c, g, or t
  misc_feature (427)..(427): n is a, c, g, or t
  misc_feature (467)..(467): n is a, c, g, or t
  misc_feature (502)..(502): n is a, c, g, or t
  misc_feature (504)..(504): n is a, c, g, or t
  misc_feature (547)..(547): n is a, c, g, or t
  misc_feature (551)..(551): n is a, c, g, or t
  misc_feature (581)..(581): n is a, c, g, or t
  misc_feature (595)..(595): n is a, c, g, or t
  misc_feature (608)..(608): n is a, c, g, or t
  misc_feature (632)..(632): n is a, c, g, or t
  misc_feature (642)..(642): n is a, c, g, or t
  misc_feature (742)..(742): n is a, c, g, or t
nctntcaaaanttttattgaaaaaagagaaccgaggaggggggcgggaacccttttcanaaaagcccgcgctcccaaangaaaggaggnaaaggacggccaccctccaccngggnngaggacgnccccttcccaaacaaaancnccccagagaacaanaaggnccggactgggggcaagcccctggcaccaaaggccgggcaagagtgtgggaggccagcaaanagggaaggganaaaattggggantgacccnttgtcctgcacagcaccanaaacccccngggccactttgattttgtcagcatcactgaaaaaactgttccggcggcggaggggcttgtccagggcatcgagagaacccaaaccgcgaaaattctttagccggancccaacggaaaanaagtattcaccaggggcctcagtggnggcagccaggagagagcccatcaagactgtggaggccccnagggccaaggctttcgcaatatgacccacattttngnttcctccatcagcaatgaccggaacaccaaagcgccgtgcatnctcngacaccttgtacactgctgtcgcttggggncgcccacaggccanctcttcctgcgtnatgcagaaggagccactccccatncccacccgcnggaatccacacctgcatcaatgaggttcttggcctgggcagcagttaccacattgcctccaatgacttggagattagggtatttgtcttttatgttcttna

SEQ ID NO: 511898 - DNA, 484 bp, Homo sapiens
  misc_feature (57)..(57): n is a, c, g, or t
ttcccctatgtcctatcaataggagcgggttttgccctcatagaggggttcattccntggtttcccctattttcagggtacaccctaggccaaacctacgccaaaatccatttcactatcatattcatgggggtaaatttaacttttttcccccaaccctttttgggcctatccggaatgccccgaggttattggggttaccccgatggataccccccatgaaacatcctatcattgggagggtcattcatttttttaacagcaggaaaattaataattttcatgatttgagaagccttcgcttcgaagggaaaagtcctaatagtagaagaaccccccataaacctgggggggttatagggaggcccccccccctcccccccatttgaagaacccggatacataaaatttagacaaaaaaggaaggaattgacccccccaaagggggtttcaagccacccccagggcctccatggttttttta

SEQ ID NO: 511899 - DNA, 2480 bp, Homo sapiens
gacgctctgtgccttcggaggtctttctgcctgcctgtcctcatgcctctcctcctcttgctgctcctgctgccaagccccttacacccccaccccatctgtgaggtctccaaagtggccagccacctagaagtgaactgtgacaagaggaatctgacagcgctgcctccagacctgccgaaagacacaaccatcctccacctgagtgagaacctcctgtacaccttctccctggcaaccctgatgccttacactcgcctcactcagctgaacctagataggtgcgagctcaccaagctccaggtcgatgggacgctgccagtgctggggaccctggatctatcccacaatcagctgcaaagcctgcccttgctagggcagacactgcctgctctcaccgtcctggacgtctccttcaaccggctgacctcgctgcctcttggtgccctgcgtggtcttggcgaactccaagagctctacctgaaaggcaatgagctgaagaccctgcccccagggctcctgacgcccacacccaagctggagaagctcagtctggctaacaacaacttgactgagctccccgctgggctcctgaatgggctggagaatctcgacacccttctcctccaagagaactcgctgtatacaataccaaagggcttttttgggtcccacctcctgccttttgcttttctccacgggaacccctggttatgcaactgtgagatcctctattttcgtcgctggctgcaggacaatgctgaaaatgtctacgtatggaagcaaggtgtggacgtcaaggccatgacctctaacgtggccagtgtgcagtgtgacaattcagacaagtttcccgtctacaaatacccaggaaaggggtgccccacccttggtgatgaaggtgacacagacctatatgattactacccagaagaggacactgagggcgataaggtgcgtgccacaaggactgtggtcaagttccccaccaaagcccatacaaccccctggggtctattctactcatggtccactgcttctctagacagccaaatgccctcctccttgcatccaacacaagaatccactaaggagcagaccacattcccacctagatggaccccaaatttcacacttcacatggaatccatcacattctccaaaactccaaaatccactactgaaccaaccccaagcccgaccacctcagagcccgtcccggagcccgccccaaacatgaccaccctggagcccactccaagcccgaccaccccagagcccacctcagagcccgcccccagcccgaccaccccggagcccaccccaatcccgaccatcgccacaagcccgaccatcctggtgtctgccacaagcctgatcactccaaaaagcacatttttaactaccacaaaacccgtatcactcttagaatccaccaaaaaaaccatccctgaacttgatcagccaccaaagctccgtggggtgctccaagggcatttggagagctccagaaatgacccttttctccaccccgacttttgctgcctcctccccctgggcttctatgtcttgggtctcttctggctgctctttgcctctgtggtcctcatcctgctgctgagctgggttgggcatgtgaaaccacaggccctggactctggccaaggtgctgctctgaccacagccacacaaaccacacacctggagctgcagaggggacggcaagtgacagtgccccgggcctggctgctcttccttcgaggttcgcttcccactttccgctccagcctcttcctgtgggtacggcctaatggccgtgtggggcctctagtggcaggaaggaggccctcagctctgagtcagggtcgtggtcaggacctgctgagcacagtgagcattaggtactctggccacagcctctgagggtgggaggtttggggaccttgagagaagagcctgtgggctctcctattggaatctagttgggggttggaggggtaaggaacacagggtgataggggaggggtcttagttcctttttctgtatcagaagccctgtcttcacaacacaggcacacaatttcagtcccagccaaagcagaaggggtaatgacatggacttggcggggggacaagacaaagctcccgatgctgcatggggcgctgccagatctcacggtgaaccattttggcagaatacagcatggttcccacatgcatttatgcacagaagaaaatctggaaagtgatttatcaggatgtgagcactcgttgtgtctggatgttacaaatatgggtggttttattttctttttccctgtttagcattttctagttttcttatcaggatgtgagcactcgttgtgtctggatgttacaaatatgggtggttttattttctttttccctgtttagcattttctagttttccactattattgtatattatctgtataataaaaaataattttagggttggg

SEQ ID NO: 511900 - DNA, 155 bp, Homo sapiens
tagtggcgcagatcagggcgtagtatgagttatgatgctcaccttgatcagaggattgagtaaacgggtaggctagagggtggctagaaataaatagggaggcctaggttggaggttgaccatgggggttggggaatagggagaggggggtccat

SEQ ID NO: 511901 - DNA, 217 bp, Homo sapiens
atatgacgattctgtatggtttttcgaccatgattatttggacaaacatgtatggacatgtttaatgaacgtcacctgccaggcgaaagaatagttggctgggtaccacacaggccctaaactacacaagaatgacattgacatctaacgatgctcaatgacaaagatacttgtcctacattccagtattaggtcatcacttgaatgtgaacgccga

SEQ ID NO: 511902 - DNA, 368 bp, Homo sapiens
  misc_feature (125)..(125): n is a, c, g, or t
  misc_feature (232)..(232): n is a, c, g, or t
  misc_feature (274)..(274): n is a, c, g, or t
  misc_feature (313)..(313): n is a, c, g, or t
  misc_feature (321)..(321): n is a, c, g, or t
  misc_feature (339)..(339): n is a, c, g, or t
  misc_feature (356)..(356): n is a, c, g, or t
tccctggagtcctgctcccaccatccagtggggtggtggcgtttccttcttacacgtggcctcttctcaccgccgagctgttgggcggccgcccactgggctggtcctcctcttcccagcatgtntcagcctctccagctcaaccccaggggcagcgtccaggaaggagcaaggaggcccctcctagtccctgacaccttcgctgatggggatggtggaagggaggtttctnggagcggacacctgtccctcaggagggctgggccgctgtcanctgccctgcttctgggctgcagacaggaagacatcattntcctggtnctggaatggagccacgtngagagcggcaagcgctncccttgctccca

SEQ ID NO: 511903 - DNA, 656 bp, Homo sapiens
gggagctgcacgtggtatgtactgtgcggtggcgacaatttgagcaaagaccccaacgggcccatcccattcctcgactctgttcgtgagggacgactggagctccatgtcttctacgtgcggccagcccggccaagcgtcggctgtcgacgctcatcctgcacggcggggcaccgatgtgccgagtgcaggagcccggggccgtgctgctggcccagcccggggaggcgcttggccgaggcctcgggtgatttcatctccaccgcagtacatcctggacttgcgtggagcgcaacgagcaggctggagcttgggagggcctatcgggcattgggtccccgtcgctcgagcggctggacaaccgggattcggaagcaaagcccgggggcccttggccgaggggcgccgcgaaagccaggaagccgacatcgggcaacggccggggcagaaattcgccttttaccccgggaatttgcggcgacccgaacggttaaggccgagttctttgacggatacggtttgcagggcgacacattgccccggcttctgaccccaggattccggtgtccaacccgggttacaccggcctttggcgtggacaaaggggagtgggaccgaccagacagcttcgcattcagcggccaggcaactccgga

SEQ ID NO: 511904 - DNA, 752 bp, Homo sapiens
  misc_feature (70)..(70): n is a, c, g, or t
gaccgtggccggcgatgaaatggcgaaaagtcttttgaagacagcctctcatgtctgggaaggacaaaantgctactatcgaaagaggattgtaagtttatagtacatgcccatggattttatgaggaaggaagtgaaacaaaagacttcagctagtttgcgctggtggatccattggaccattcgagaaggaacgagaatggcattgcacattcttacgtctgaatcaatctcgaagtgagaatgaagtgccgttttcatggtgttactgatggctacaatcttctggatagaaagtatattgaacttggaaatattggacctagaggggaaaaggcctacatatgtaccgtgtgggcagaaagagagtacttgtctcgttcaggatctggatcatgaatgctgtgaacatctaataggaactccacgaggatggaatgcgctcgtatgtcatgttcatgcagaaacacgcgttaacgagagcttgatgagagttgccttgtaactaagctgtggccgctgggttcgacagttgtgggacattcgggttggaggcagcagaaatttatgtacaggcatgtgagtttcaggtttaatgtactccaggagagtcaagatcgagattggtgcacaaagagatgggcataatagcaagctgggggttggacatcgcggcatagttgacaatattcggaaggtagacatagtctgcaaagtgtcgagtgagggccttaaactggattcaaaaaatg

SEQ ID NO: 511905 - DNA, 701 bp, Homo sapiens
ccgaaaaaaaaaaaaaaaaaaaaaaaagaaaaaaaaaaaaaaaaaacaaaaaaaaaaaaaaaaaaaaaaaaaaaaaaaaaaaaaaaaaaaaaaaaaaaaaaatttaaaaaaaaaaaagaacagcagagaaggcagagaagacccagcgaaacaacggaagaaatcaagagaagaaaagataagaagagaatagaaagagaagagaagaaaagaagagaggaaggaaggaaaggagaatagaaaaaagagaagagaacagaaaggacgagaaaagaagcgacagaaacggcacgaaggaccaagagacagagaagaactgaaaaagacgagatacgagacatacggacggcgtcacagaaaaggagagaaaaaagagcaacagaaggaaatgcagagaagagcagaagaacagaagcaagagagaaaaagagaagagaggaggagagagacacagaagcgaagaagacaagacagcacagaaagagacaaagagagagagaagaaagaaagaggaaagagagagaaacagaaaaagatagaagaaaaaacgaaaagaacagaaaaaaagggagaagaacaaggggcagaagacggacagcaagagaggggacagaagaagaggacagacagaaaaagaagagaagagaagaaaaggagacacaggacgaagaaggcgagcaagagaaggagcaagagaaaaa

SEQ ID NO: 511906 - DNA, 555 bp, Homo sapiens
ctgaactctcgtgtgctgccgtctctgccttccatcaggttcggtatgcctgaagtcgcattcttggtaattttaagatgctactcttagtgataaataatagtatccaggttatttactgcagaacagtacagtacgctgtttgttatcctaagttgcacaggtatttcttacagttatctatgttggttcaagtaagctgcccttatttgcagtagcaatcattttgcagtggtttgcatgaagttcatcagggaattgtttctgactcttcatttcaaggtcagacattcatttttgtcagccagttgactataaactgtcatcagtgatttacgtataggcttgggcctgttgacctctgtttttacagcatgctgtgggtactgacatttttactcttttatctggacagggtggaccaagtaagctagtgccaaaacacttagctggttagttaaacaagcatcacaatctttttaccatccttcaaatactgggcgctggctgaacaagttaatgaaactacttcagcggttgccaaacagtgttgtt

SEQ ID NO: 511907 - DNA, 382 bp, Homo sapiens
tgtgagtctttacaacaccgatcttatgtattccaaaacccactgaggaactggacgctgtggctcacgcctgcaaccccagcactttgggaggccaaggcaggaagattgggtgagcctaggaggagttcgagaccagcctgggcaacataatgagacccccgtctctaaaaacaaaaaataataaaaattaaaaattaaaaaattagccagtgcctatagtcccagctagttggtaggctgaggcgggaggattgcttgagctcaggaagtgaggctgcagtgagctgtgatcataccactgcactctagcctgggcaacagaatgagaccttgtctcagaaaaaaccaacaaaatggccgggcgcggtgggtcacgcct

SEQ ID NO: 511908 - DNA, 246 bp, Homo sapiens
actaagatccgctgatcgttaagctcgtattatgtggttttagtaaacaccagacagacgagagtacatcgtagttgcatcacgtgagctcatcatgtctgcatttttgcatggaccatttgtccgggtagatcatgctgcagtagtcagcagttttacctgaacatctcagtatcagctgaatttctaaatgcacttcatcatctgcaatcagcgagatcacttcaacacacgacctctggacat

SEQ ID NO: 511909 - DNA, 376 bp, Homo sapiens
cggtcgactctacagatcccgattccactggtgatacaaaccgcctgcagagttagaagaatttatcaatggaccatatatgctcatatccacaagttggtgaccgttgttactatgaacaaatgtactatgctgcttagttgttgtacaataatgtttccaattttggacgtttggcatctaccctggttcacctgggctaatatcaggcagctgttgatggggctaggaaagctaacagtactcgaacatggaaagaggtctgcttcgcctgtgtagataggacagaattccgtcttgctcagatgtgtggactacatattgttgtgcatgcagatcaattagaagaacttatcaactactatcaaccagtgca

SEQ ID NO: 511910 - DNA, 391 bp, Homo sapiens
gagtatctaagatcccatgtaagtatgtaaccaagctggagaggccttgagtttgtgctcataaaagatattcattctcgtcccaaattcaggtgaatggacatctgtgcagtcgagatcccaggtgtctgcttccgtactgttcgggtgagggtgcgagccccgctattgagctgtgtgcgaccgagtgacctccaccacaccgtgatcaacttccccgtgtccatcccatgtcattccatgaaacagtgggctgacgcataccttcagtaggcccattaggacctctcccagctgctgaaaggccacgtgatggtgatagctcttcacatcccattgtgactccatgctccttgagaggagaaatgccataactctgggaggggctcga

SEQ ID NO: 511911 - DNA, 115 bp, Homo sapiens
  misc_feature (39)..(39): n is a, c, g, or t
gcaccgcgcgtttcaagcacctcatggggagtaacactnggcctcccaaggcagggtagggtgcacgattgagtcccagaatgactgcgaaattgcggcccatcacagcaggcat

SEQ ID NO: 511912 - DNA, 156 bp, Homo sapiens
cccttcccctgcccaatgtggaaacaggggttaatggggctttttatggaaccatctgctttggggacctaaaccccaggtggtctcttggtgttaataatgctggaaaaaaaaaaattactggtttctacttttctaaaaaggcatttctctata

SEQ ID NO: 511913 - DNA, 114 bp, Homo sapiens
tgaagttctcaggaaaccgcttattcttagattcagccgcctaagccatacagagtgcgcccctgacgtttcagggcatatactacatccatggctgttacatttttgcgcttg

SEQ ID NO: 511914 - DNA, 1166 bp, Homo sapiens
gccctgcgggccgcctaagtctcggaggccacgtccgtcaaggatggagaacatggcagagcacagccgcaagctgtggtgctgtctccccgtgacgcccgagcagcaggaggcccttcaggaaggccaagaagtacgccatggagcagagcctcaaggagtgtgcatggtgaagcagaccatcgcgcaccagcacgcagcagctcaccaacctgcagatggcagcaagtgacaatgggctctggagatcctctctcacctttgcaactcgataggccggctccagcggccagcgggcgctggccatcatgtgccgagtctacgtgggctcatatctactatagagcaggagagagcgacaccaatccgccaggcctaagcacacccattaggcaccacaaacaacacgcactcgacactgtccatgggacctccgacacaccatgcaagacacaacgcgcttcgcccttcgcgcgcacgccatgaccgatccccccgacagcctgcaccaccctgcgccacataccggcagccacactgaacatccgcacaacgccacgcacgacgccaagcacacccacacgcagaccccacacacaccccgccccccgccaacgcccacaacacaccgcacagcaccacgaaggcatcccacgacaacgagcccccaccgccgcacaccacgacaaaccccctcagcaacccacaacgcacgacctcaaaacgacgcaacacaacccacgcgcacccacgacccacccaaaccgcaaccgacccccgccaaaaaagacccgacgccccacaagcgacccccacacccacgacaccccacaaccgaccaacgcccacacacacaacccacaacacgcaccccaccccagcaccaccgcacacacacacacacccccacgcaaccacccgccccgcacccacccaaacgccaacgaccacacgacccaaccatccccacccccgcccccccacccacccccaccgtccaaaccaaccccaacgcacgccacacccaccgcccgccacatcccgactcgccaacccaaaccacccccagccacccaacccacccccacccccgccccccccacacccaccaaccaacacacccccaagctacccgcactacccccgcgcccccgacccccccacaa

SEQ ID NO: 511915 - DNA, 404 bp, Homo sapiens
aggctggtcttgaacccctgaccttgtgatcctcccgccttggcctccccaagtgctgggataggcgtgagccaccgtgcccagccaataatagctaaaatttatataatgttcactgggccaggcacagcggctcgttcctgttatcccagcactttggaaagctgaggcaggcagatcgcttgagccaaggagttcgataccagcctgggcaacatggcaaaaccccatctctaccaaaaaaaatatacaaaaattagccaggcgtggtggcatgtacttgtagttccagctactcggaaggctgagttgagagtatctcttgagcccaagaagaggggactacagtgaacggagattgcgccactgcactccagcctagacgacagacagaagatctcaaa

SEQ ID NO: 511916 - DNA, 478 bp, Homo sapiens
actgattagataaatattgaatattgaatattgaacatctggctctcggaaggtcatggaccagggcagaccttggccactaagctctgaaagaagccacgaggctggagcacatgcaaccaggtggtgtccgaaagacaggggctagctcccagagggccacaggagagttttggattgtgttctagggatgggaatccattgaaaggttttaggaaaagagtgaggccaggtgcagtggctcacacctgtagtcccagcactttgggaggccaaggtgggtaaattgcttgaacccagcagttcgagacttgcctgggcaacatggtgagaccttgtctctactgaaaacaaactaaaaaaaaaattggccaaccatggtggtgcgtgcctgtagtcctagctgctcgggaggctggggcaggaggatggcctgagcccaggggagttggggctgaagcctgggtgacagaggaag

SEQ ID NO: 511917 - DNA, 174 bp, Homo sapiens
gaggggagtgtgtctggagttggtgagcaagggggagggagaggggggggagcagggattttagataagggtgaggagctggccttcctctgattgtagagggaagtcacggaaggtttctaagcaggggtggcatgatcagtttttgactgtagatagatcatccagggtgca

SEQ ID NO: 511918 - DNA, 232 bp, Homo sapiens
tctgatagtgagtacactatgggagatgattccgaagcctggtaggataagaatataaacgttcagggatgaccgagaaaatcagaataggtgtaggtatagaatggggtctccatctatcttaggggccatcaagtttcatcacgaacaattatcaatatataaacccccgtgccataaccacaataccacaacgcccgctcttcgtcatgatccagtccgtaatcacagg

SEQ ID NO: 511919 - DNA, 942 bp, Homo sapiens
gggaagatggcggcggtgcaggaggcggagcaggggcccgacaggcgcacgtggatggcgtgccaggtgcggagtgcagacgtccaggtcagagtgaaccatgccattggacagcatcagcggaaggagacgccgtggccgaaggggatcacccaagcctcaagaacccaccggcccatcgcggcacccaatcgcctggcagtgtcactcaataggttgcttgctgttgagcgatcttcatcatcctgggccatcacgcagatatgagtattcgccagagggcacaggcccctcaggcatcaggtgggccccggagggagccgccacgcgatcgaccagacgcgcaaggctggtatcctcgcgaaaggacatcgtttcatgatccgtgcatgtgtagcatcgtcagatgcacgagacacatttgacagagcgttcaagcgccacgtcggcactcttctgtgaacagcacgatcttgtgtattggctgatctggtagctatcggtcgagaacgtcagactggcgtgcgtacagagcactttgctgagctcgatatcccagagagcgtccagcagaacggctccatcgtacatccacgtttacttcaccaagagtggtttccacgcgcaagacccccggcagaaggccctgttaccgccggtttgccacagtccacgattgtcccgggatgatcagacaaatacaagcgcagacgatttcagaaaaccaagaaccttgctgacaggagagacagaagcggacccagaaatgatcaagagggctgaggactatggggctgtgggaagggttgaatctcccattgggaccccaagatcaccatcaaacatcgtggacgaccacacgccgtggggtgaaggggcagtgtgccccctcccctggatcactatgtgaagttcgacggccgtgaacggggactactatcc

SEQ ID NO: 511920 - DNA, 378 bp, Homo sapiens
ggggggtaggtgaaacttgtaaaacagcacctgcttgtctgaccatgaaaccaactctggtaagtaacatctgaaagtcacaaacacacgcaggctgtattaatacacctgcagtaagtttgcatgaccaagtatcagaccacacagactaccgctgtttaccatttccatataatagcacaaagggcaaacaggtcataggtcagcttagtagttatagagtaatgatcttagctacacatagaactccgcgtgctgaaaaatggttcaccggccgagtagtctcatgcatgtaatggcatcaatcaggtagcccaacgttcctgcgtactaacgtcactatatgtacacctgcatggctaacacggtggaatggtc

SEQ ID NO: 511921 - DNA, 319 bp, Homo sapiens
cagactcaaagggatcagagaaggctgaagaaggttggagaaactgaggcacaaaaagagggcagtgaagatgttggcaacctccctgaagcccaggagaagaatgaagaagaaggagagacagccacagaagagacggaagaaatagccatggaggttcggaaggggaagcgaggagtaggaagaactccagaaggagaagagcctcgagaagacgagattcctaggcttttcatgcttcatttcttccactttccagaaaatggagctattagcacattcaattcttcccaaccaactcacagatcttgcttaagcg

SEQ ID NO: 511922 - DNA, 525 bp, Homo sapiens
  misc_feature (187)..(187): n is a, c, g, or t
tacctagagatcccagtagtggacgaccaggtctacgctgctcccactgtctggaaatcgctgcctttctgactgatcctcactgtgagtggcatcaggtatgctgaggccggtgcggtggtcacgctgtatccagcactttgggaggccgaggtgggcagatcagctgaagtcaggagttcgagancagcctggccaacatggcaaaaccccgtctctactaaaaatgcactgggcatggtggtgcgcgcctgtaatcccagctactcggatgctgaggtgggagaatcacttgaacccgagaggcggaggctgcagtgagccgagatcactgagatagcaccactgcacttcagcctgggtgagagcaagacttcatctcagaaaataaaaacaaggctgggtgcggtggctcacacctgtaatcccagcactttgggagaccgaggcgggtggatcagctgaggtcaggagtttgagaccagcctgggcaacatagtgaaaccccgtctctactaaaaatac

SEQ ID NO: 511923 - DNA, 149 bp, Homo sapiens
aatttctcgtcccgctcttcatacagtgcacaagacatatcattgggcacaggaggcgcacaccttaaaaagattcgtgaagaaagcaacaccaaaatcgaccttccagcagagaatagcaattcagagaccattatcatcacaggcaa

SEQ ID NO: 511924 - DNA, 582 bp, Homo sapiens
gggtctgctgcctgattatgtctgtagtacacttcacttatttgagccaaacgctgtgccgctccctctcagacaaccatgtcatgggccccagccctttacactgctgagtacatcatttcatgtcatcctgggggctctgatgaagaacccttacagttcatggatactggaactgctaccagcgccactctgacaggcctcaccagaggtgccacctacaacatgataatggaggcactgaaagaccagcactaggcataaggttctggaagaggttgttaccgggggcaactctgtcaacgaaggcttgaaccaacctacggatgactcgtgctttgacccctacacagtttgccattatgccggtggagatgagtgctaacgaatgtctgaatcaggctttaaactgcagtgccattgctcaggctttggaagtggtcattgcagatgtgattcatctatatggtgccatgacaatggtgtgaactacaagattgtagagaagtgggaccgtcagggagaaaatgtccagatgatgagctgcacatgtcttgtgaacggcgagcggcacatgcgatg

SEQ ID NO: 511925 - DNA, 211 bp, Homo sapiens
ctcactgtctctctcacataagggccagcctgctttcaggtgaccaaatcccgtctcatgactttatttatttatttatttaactttggagatggagtctcgttctgttacccaggctagagtgcagtggcatgatcttggctcactgcaatctccgcctccaggtttcaagcgattctcttgcctcagcctttcaagaagcaggaactgg

SEQ ID NO: 511926 - DNA, 194 bp, Homo sapiens
  misc_feature (16)..(16): n is a, c, g, or t
  misc_feature (58)..(58): n is a, c, g, or t
  misc_feature (99)..(99): n is a, c, g, or t
  misc_feature (118)..(118): n is a, c, g, or t
  misc_feature (148)..(148): n is a, c, g, or t
gaattcggcacgaggnctcgcttggccttcttcttcttgtcgctgttgccattttctncagccccctcagtagagagcacctcctctagttttcgcttnccactctctggctggagcnctgctgtgttttcggggcttgaagcaaatnatgatgcaggtcatgttgtcacacctggtaccatccccagaagtgt

SEQ ID NO: 511927 - DNA, 396 bp, Homo sapiens
tctggcgcccgtgctgcatgatgccatgctgccaatgcccactcctgagcgccgacgccagcagcgtgtgtgaccatgtgaaaaagagcagcgcccagtgctgccctagactggcctgagcgcgccggggtccaggctggctggcgccgccgatcaagctgcacaccaccatgcggcaagatgatcatcctgcagcatgacgcatgcagcatgctcgcccgggaagacgaaggctgctcaatgcgctccgggcccaactgccatgcgcacccccgtgcccctgaacccccagtcccagctgccacgcccggcaccacgggcacactgtcagcagcacaagcaggttggctcgaagggcagcggcgcacctggtcccgggaaccgcagtagccgcct

SEQ ID NO: 511928 - DNA, 1011 bp, Homo sapiens
ggccccggctccctcctgagctgcgccgtgccaggccgccgccgcgatgcagtgggccgtgggccggcggtgtgggcgtgggccgctgctgctcctggctgtcgcaggcggtgctgaccccgaatggtcgtctggctctggctgggttatcgcagagcttctgtcttccagcgctgaagatgatagcgccgctggctgcggcagatacgctgggtcgtggaccacgagctgggccttctctcgtctgatcgtggagctgcggcggctgcacccaggccacgttgctgcccgacgaggagctgcagtgtggtgttcgtgaaatgcgcggtggctgtggatgggcgccactgtgccttctgcacgcctctgcctgtcctgaggtcgctactggtggctgccgaatctcggatatccatctaatctctggcacccgttccaccatgtggagagagggcaccatcaaaagtgaggtcttctacccagggggagactggtaagtacaacgtgaggcctggtgaggctaagtagactgtgcgagtgtggtggacaaacacatggatggtgcaacaacggacggggcatcaatcgcaataccatccaggtcttcgacgatgcaccgatgatggtcatcacgaaccaaaggaaaatccatctaaccctgcgttggaatactcgttagacaaccgtaatgacctcgggagtgcccctcacgcgctggtcgagaccgcaacacaagcctcaagcctcgattgttacgacaaaggaaactcatattagccatcgcaagagtgcgtggagggaaagcaacctggggcgatcgaaacaggggcaacggaagcatgtgcacgacaagtattggactttgatggtaagactcatgttatacaataacaggaagcactaacaccaaatgcgcaatcctgaagataccgtccggtctgaaccgggaaattaccctgcattatatatacaaaaaaacaaagccagtgaacagaagaacacatataaaac

SEQ ID NO: 511929 - DNA, 343 bp, Homo sapiens
aaaaacatttaaaattgtaataaaggctgggcgcagtggcttgcctctaatcccagcacttcaggaggccgaggcaggcagattgcttgagctcaggactttaagaccagactgggcaacacggagaaaccccgtctctacaaaaaaattcaaaaataagccaggcgtggtggtgcacgcctgtgttcccagctactctgaaggctgaggtgggaggattgcttgaacccagaaggtagaggttgcagtgagctgagaccataccatgcactccagcctgggtgatagagtgagactctgtctcaagaaagaataaaaagtaaaaataaaattgtaaaaaaaa

SEQ ID NO: 511930 - DNA, 609 bp, Homo sapiens
  misc_feature (314)..(316): n is a, c, g, or t
  misc_feature (324)..(324): n is a, c, g, or t
  misc_feature (328)..(328): n is a, c, g, or t
agaggggtctccggagaagcgcggccctgccaacatcctgatctcagacttccggcctccagaactgtacgggaatacatggtctttggcccatgcacctgttatggacatttttttctttctttctttctttctttttttttgagacagagtcttgctctgtcgcccaggctggagtgcagtggtgcaatcttggctcactgcaacctccgcctcccgggttcaagcgattcttctgcctcagcctcccgagtagctgggactacaggcgcctgtcaccacacccggctaatttttttttttttgattttagnnnaagaaacngggntacccacattgggccctagaggttacgttttacgaggcttatctatatggggccttctattgccaatttttagtttttaggggaccttataattaactaaaggggtttggggcacttaaaatgacaccccctttatacacacttgtcgggacaccttggcccaaccaaattttaacttcagcaaagttatgcatgcgcgccaaattaggtcttactttgccactttccccctttatagagggggagtgacaattcactgggccgaagttttcaacggtggt

SEQ ID NO: 511931 - DNA, 504 bp, Homo sapiens
ccgggcagtacggatgtgcaggtaaaacaatgcggggcttgcgatgatattggaagtgggggacagtcttgtgggactgagccctcaacctgggggatctgatgctatctccaggtagatagtgtcagagttgaattgaaggacacccagcccaagtctgctaaaggattgcttgcttactggaagactgattgcttgctggaagtgcagggaaaaccccacacatttggtcacagaagtcttctgtgttgactgttgtaaggggtgggggggtgcagagcagaggaaaaacagtttgcttttttttcattcagctttggagcatggagattaggagcatagtctccaggccagactgtctgactccaatcccagctgctctgtcacatcttagctgtgagactggacaagttacttctctgtgactccgattcctgttctgtaaaatggggatgataaaatatctacctcataggatcattgggaagatcacataaagtaata

SEQ ID NO: 511932 - DNA, 100 bp, Homo sapiens
cgtgaccacaggcaagtctcagctccctgctgtctggggccctgcggtgcccttgccaaaacagcggtagcccctggacctaaccaaaatcatcttcaag

SEQ ID NO: 511933 - DNA, 108 bp, Homo sapiens
gggtacatgcctgagcacagaaattcgagacaggctgggcaacatagccagaactcatctctactcaacattaaaaccactttccaaaatgaatttttattttataag

SEQ ID NO: 511934 - DNA, 893 bp, Homo sapiens
ggaggaggcaacaggagcgtaggggagaggtctcgaaagcgtggcaggcgtgtgtaaaaccgtcgtgtggccttttccatgggccatatggtgtggaaagttgtaacaacgcggcgttataaacaatgtagtggccaccgaggtcaaacgcggtccacagacgttcccagcgtccgggatccgagaacagcgagtccgtagcgtgactggcaaaattttggaccggggttgaaggggcccgtgggcgcgccgctcccgctcttgcatgggcgcccaaccaacacgccttttcgtcagggagagctttccccccccccgtcaagcgctgggagactcgcccataggcctcctttccgcgattagggctttcccgtctgggattagcacccggaggtacagcttcagccctttcttttcccaaacatatggtgcgggtttttcccctgtccgaacgatcactcctgggtaaggttgctccccacgcaggatttctcgggtaaaccacgtgcggtgcctcttttggtcgggagccaaagtcaaacaccagccccggatggggtcagtcaaacatcagagcgccgacgagccttaataaaagagttctcttccacaacctctataatgagagacatattttttctctacacgccatgtaacacacatccagaagacctacacaccttttaacaaaaaaatcccccttaattcacattcttataagataacaggctgtctgtagataataagaaggaagtctagccccttctttgacaaaatttgcttccccccaccaccctctaaacccctatagcaccacagtatttctatggcacccaaaaaagaggaaaaattttaataggctgaaaaaaacgaccccaacaccccacataaca

SEQ ID NO: 511935 - DNA, 749 bp, Homo sapiens
gccggccagtaccggtgcaacggaccagctccaagggctccgagcaggccatcatcacgctccggcgttgcgcatgtccagctggctcgccctctgaggccgttcgctggggcatcgatggttgatggttgctggttgcgtggatcgacccatcgatcgttcatcgtacgatgaagcggctcggtaagccacgaggacgtccgtggcatgattgacggacgaccggcgtcatgcaaccccatgtaagagcagcgggcaagcgaccagaatgacaaaggccaagaacagtccagcgctagaggaacgtcattccttgaggcaggtggccctgaggacggctcccgtgcgtccgcggtctggcggcgcggctcggcccaggaagtccaacgtctcctagtgctttgcaaaagcatttcaccaagattcctcggacacttcttttcaccaaggcaaattaacgccactactcccccggtttaaggcatttcccccaaatccatgaccagcgtgtcctttttccttaattttctaaagcaggacatacgttgggggcgccttttccttcaccattttccacggaatttcctggtatccgtttagggatgtttttgtcccgtgtgctggacatgtgttttccatgggaggaggccccgggggtaggctggcttgccacgtgctggtgcgccgctcgttgttgggcttttgtcccaggccttcgtggggggtctgggggttcaattgtggcccgg

SEQ ID NO: 511936 - DNA, 988 bp, Homo sapiens
  misc_feature (369)..(369): n is a, c, g, or t
  misc_feature (373)..(373): n is a, c, g, or t
  misc_feature (503)..(503): n is a, c, g, or t
  misc_feature (507)..(508): n is a, c, g, or t
  misc_feature (516)..(516): n is a, c, g, or t
  misc_feature (518)..(518): n is a, c, g, or t
  misc_feature (534)..(535): n is a, c, g, or t
  misc_feature (554)..(554): n is a, c, g, or t
  misc_feature (573)..(573): n is a, c, g, or t
  misc_feature (580)..(580): n is a, c, g, or t
  misc_feature (583)..(583): n is a, c, g, or t
  misc_feature (587)..(587): n is a, c, g, or t
  misc_feature (598)..(598): n is a, c, g, or t
  misc_feature (604)..(604): n is a, c, g, or t
  misc_feature (615)..(615): n is a, c, g, or t
  misc_feature (617)..(617): n is a, c, g, or t
  misc_feature (622)..(622): n is a, c, g, or t
  misc_feature (654)..(654): n is a, c, g, or t
  misc_feature (656)..(656): n is a, c, g, or t
  misc_feature (694)..(694): n is a, c, g, or t
  misc_feature (745)..(745): n is a, c, g, or t
  misc_feature (813)..(813): n is a, c, g, or t
  misc_feature (825)..(825): n is a, c, g, or t
  misc_feature (934)..(934): n is a, c, g, or t
gcacgagctcgtgccgattcttgtttggctatgccaccacagtcatcctcagggtctatacatactatgtttcaactgtattatttgccattgttggcattagaatgcttcgggaaggcttaaagatgagccctgatgagggtcaagaggaactggaagaagttcaagctgaattaaagaagaaagatgaagaatttcaacgaaccaaacttttaaatggaccgggagatgttgaaacgggtacaagcataacagtacctcagaaaaagtggttgcattttatttcacccatttttgttcaagctcttacattaacattcttagcagaatggcgtgatcgctctcaactaactacaattgtattggcanctanagaggacccctatggtgtagccgtgggtggaactgtggggcactgcctgtgcacgggattggcagtaattggaggaagaatgatagcacagaaaatctctgtcagaactgtgacaatcataggaggcatngttnntttggcgntngcattttctgcactanntataagccctgattctggntttaacgctgcttgtcatntatattnagntaanataggtagtantatctntctgtcatagngnacatnacaactaaaagtgatggaaaaatactggattntngtagcactgattttgtgagtttgaccccattattatgnctgagatataatcattgattctatttgtaacatggagtttaaaagaaaccntgactctagtgtgggtcttcttctctccacataatattgtaatatgggcctactcttctttggtgcanaaccgtgtgcantgggtctaccttgcactttctttaagactgacccctcttaaggatatcaaatttctcctcataactaagggtttaagaagtaacctaaagttttcttgggaagaatgantaatttctttttaaaaattttctgagcccgaaagtagttaatcatggcctgtaa

SEQ ID NO: 511937 - DNA, 187 bp, Homo sapiens
accacccccacgcaatcaaaaacttttttttataatcagtatccgctgggaagctatcacatcccacggcctggctctcaactgctctaccgacctcactgttgtttgagcacatcaagccctgtggactggttgggtcaggcgtcacttccttgagtaaggagctccagaggcacgtcaccgcgga

SEQ ID NO: 511938 - DNA, 155 bp, Homo sapiens
ggatccccaaaaaatttaagtgcttgcttggcccaccacagtggttcacgcctgtaatcccaacacttttggagaccaatgcactcagatcacttaaaggcaagagttcaagaacaacctggccaacatggtgaaaccttgtctttacttaaatt

SEQ ID NO: 511939 - DNA, 116 bp, Homo sapiens
accatactcttgcggcatgccagttcattgatcaggaaagccaggactgaagctttctgtgctgaaagctgtgacgcctgaaaagcttaggctctatcagacattcagtacgggga

SEQ ID NO: 511940 - DNA, 300 bp, Homo sapiens
tgtttgtcaacgactacttggacggcccctgtacgttcgcacagctaaaggagctccccgacgagcgcggccacaaaatgtttgtcatcaaccgctccaaaccgctttttcccaaggggtccggcggaggcgcccccttatttcggcccggcacagggggcggggccgggactccgcgtgccccccccggtcgcctacgagatcccctgctagggccgcgggcgcgcggattacgtgggcgccggagattggccggtgcggcctcgcgcatgctccgtcagtaaaggtggaagccgcgca

SEQ ID NO: 511941 - DNA, 120 bp, Homo sapiens
tctagaggatctcccgggagccttaccctgtagcacacatgagcgcaaactcaagagacaacacacaaactaagcctacatttggcttccagattggttctcctagtttaaaaaaaaaaa

SEQ ID NO: 511942 - DNA, 336 bp, Homo sapiens
gaggtcgtcgctctctttagagtatcttatactagtcacgcacggttatctatacatatactagtaagaaagttattcagaatatcttggagaggcagcgattcaaagactgtgttaaccctatacaacaacgtcaataacaaactaactacccacaaaatattattaaactttcctctatgatatcagatctattggaagaaaatattcttatgattcctaccccctatacctactaagatactccagtacatattacgttcttggtatggctactttcaaagtagtactgtagtataggtcgagtatcctacttgttactacactaggcccact

SEQ ID NO: 511943 - DNA, 771 bp, Homo sapiens
  misc_feature (228)..(228): n is a, c, g, or t
tcggcaaagccttgatggattctacagccatgggatgggagctgagggtcgagaaagtgagagtgagcctgctgacccaggctgacgtggaggaggaggagatggacagctatcactgaagtgcctgcaaactgctctgtcctaaggagctccatgcgctctcttgtctcccttccggaggcacatgctgggggcctgggaaaaatgcagccagctgatgcagtaaantgaatccaccggtagatttcagttctagaaggcttgacaggaggagctggtgtcggaaacaagccactcctcagtctctagaagtaagctctgcaaatgccgaagaggctcagacacccattcagctggtgacgcgaacgggcttgacctctttgcgtgtcacctttcagtaacgaggatctggaggtcagaccagagagaaacataggaatgattcgatcagcagatatgtcacagatctaagcagcagggatttaattactgtacatcagccagttgcctctccattgacaaaagttccactctcgattaagtgaccaatcagccatcctggattggacaattcacggccttcgcacaggtagcttccacaataccagtgctaatctgactgagagtataacagaagagaacattgtgtcctgccagataggcctccggaaagatctgatggggagggccaaagctgtgtgctcagtactcagattaggttgcgcaagagagaaaacaaagaggggcgtcgggggaaggggaaggagaagc

SEQ ID NO: 511944 - DNA, 385 bp, Homo sapiens
ttctgtgctatgtgaaagtctcaattggaaaagaagattaaatgaagatttcttttaaaaatttagagaatgatagtaagttctcctgaaccaagcttcatgtaggggttcatgcctgtggttaatcacagcttttctcagtaactccgtaatgtatatcagaaatgtgtggtagttttgaatgcacagctcaatcattcttttgaattcaccattaaatttttcatagtaatcagagagttggtctgaaaattctccgagtttatatctaactctgctggtggtatctcagaaattattttctttgtcacatatggtgtggcttttaaatatctcctgaacagtgacagagagctgcgctatcttcctcgtgccgtatcctaca

SEQ ID NO: 511945 - DNA, 975 bp, Homo sapiens
gggtggtcacggagcccctgcgccttttccttgctcgggtcctgcgtccgcgcctgcccgcatgaatgaggagtacgacgtgatcgtgctgggcaccggctgacggaatgtatcctgtcaggtataatgtcagtgaatggaagaaagttcttcatatggatcgaaaccttactacggaggagagagtgcatctataacacattggaagatttataccaaagatttaaaataccaggatcacacccgagtcaatggggagaggaagagactggaatgttgacttgattcccaagttccttatggctaatggtcactggttaagatgcttgctttatacagaggtaaactcgctatctggattttaaagttgactgaagggaagctttgttctataagggtgggacaaatctacaaggttcctttccaattgaaagcaagaaagcctgggatcttagcgctaagggattgtttgaaaacgtcgttcagggaaattcctagtgtatgtttgccaactttcggtggaaaaagatccagaacttttgaggcattgattcctagaagaaccccaatgggaagatgtgtttagaacattggtttgggtcacggcggtattacatttacttgggtcatgctctggcacttttacagaactgatgattacttagaatcaacgtgttatgaaaccattaatagaacttaaactttcacagtggaatctttggggcagaattgggaaaagggcaataacattattcatctattgtcttgcgagaacctgtgccccaaggagttggaaggttaggcaaatatgcgggcctaaatgtgagtaagctgaaaatcatggtccaatgatcactgggtacaacagtcgagaatgtctggtagagcattggatcgggtaagaatgagtaagcggtcagcttgttatcctataaagagatcgcaatgataacagtacgaactatcaatcaaaag

SEQ ID NO: 511946 - DNA, 169 bp, Homo sapiens
  misc_feature (48)..(48): n is a, c, g, or t
  misc_feature (55)..(55): n is a, c, g, or t
  misc_feature (77)..(77): n is a, c, g, or t
ctctgtcttaaaaaaaaaaaaaaaaaaaaaatcggttagatgagaaancatgtanattttctatatacaaaacccangaaaggcgttttgagcccctgtgctcaggccaactccacactgtggagtgtactttcattttcaataaatccccttattccttccttgcaaa

SEQ ID NO: 511947 - DNA, 257 bp, Homo sapiens
ggtgctccagatgctggccaggagtgagtgctgagcacggtgacttccatgcacagaaccagcagtctcccctttcctgagccagagttccaggaacactgtggacatctttgtttgcgaaggatcaggttgaggggcagcccccagtctgtcccatctcagtttgcaaaaagcactgacacgtatctcttctattgtaagctttccatttagtttgcttccaatgattaaatctaagtcatttgaaaaaaaaaaaa

SEQ ID NO: 511948 - DNA, 4045 bp, Homo sapiens
  misc_feature (471)..(471): n is a, c, g, or t
  misc_feature (475)..(476): n is a, c, g, or t
  misc_feature (500)..(501): n is a, c, g, or t
  misc_feature (509)..(509): n is a, c, g, or t
  misc_feature (563)..(563): n is a, c, g, or t
  misc_feature (623)..(623): n is a, c, g, or t
  misc_feature (630)..(630): n is a, c, g, or t
ccacccacgactagagagtgctcatgccagcagcttgagccacttagcgctagcacaccagcaacaacaacagttgttacagcaccagttacctcatcttcttggacaagcccatccttctgcttcatataatcagcttggactttatccaattatttggcagtatccaaatggaacacatgcatactcaggacttggtttgccttcttctaagtgggttcacccagaaaatgcagttaatgctgaagcttcattaaggaggaattctcccagtccttggctacatcagcccacccctgtgacctcagcagatggtattggattacttagtcacattcctgtcagaccttccagtgcagagcctcatcggcctcttaaaattacagcccattccagtccaccattgacaaaaactttagtagatcatcataaggaagaattagaaagaaaagcttttatggaaccattacngtcnnttgcatccacatcagccaaaaatnncctggatntaaataggtcacagactggaaaagattgtcacttacataggcattttgtggatncagtattaaatcagttacagaggccaccccaggagactggagagaggttaaacaaatacnaagaggnacacctcgattcttcaagaaagtattgatgttgctccctttacaactaaaatcaagggacttgagggtgagagagagaattattccagagtggcatcatcatcttccagtcctaaaagccatatcatcaaacaagatatggatgtagaacgctcagtatcagatctttataaaatgaagcactcagtgcctcagagtttaccccaaagtaactatttcactacattgtctaatagtgtggtcaatgaaccaccaagatcatacccatccaaagaagtttcaaatatttacggtgataaacagagtaatgcccttgcagcggcagcagctaatcctcaaactctgacttcatttataacatctctttcaaagcctccacctttgattaaacaccaaccagaaagtgaaggtttagtaggcaagataccagaacatcttccacatcagattgcatctcactcagtaacaaccttcagaaatgattgtaggagtcctacccatttgacagtttcttctacaaatacactccgcagtatgcctgcattacatagagcaccagtatttcacccaccaatccatcacagcctggaaagaaaggaaggcagctatagtagtctttcccctccaactttaactccggtgatgccagtaaatgctggtggtaaagttcaagaatcacagaagcctccaactctaatacccgaaccaaaagactcccaggcaaattttaagagttcttcagaacagagtttgacggagatgtggagacctaataataacctcagcaaagagaaaactgaatggcatgtggagaaaagcagcggaaagttacaggctgctatggcatctgtcattgtgcgtccatcttctagtacaaaaactgatagtatgccagcaatgcagttagcttctaaagatcgagttagtgaaagatcttcagctggggcacataaaacagattgcctcaaactagcagaagccggagaaactggaagaatcattttgccaaatgtgaattcagacagtgttcacacaaaatctgaaaaaaactttcaggctgtctcacagggcagtgttcccagttcagtcatgtctgctgtaaatacgatgtgtaataccaaaacggatgtaatcacatctgctgccgatactaccagtgtttccagctggggtggttcagaagtaatttcctctttatcaaataccattttggcctctacatcatcagaatgtgtatcttcaaaaagtgtcagtcagccagtggctcaaaaacaagaatgcaaggtcagcaccacagcaccagttacattagccagtagtaagacaggaagtgttgttcaacccagttctgggttctcaggcacaactgattttatccatttaaaaaagcacaaggcagcattggctgcagctcagtataaaagtagtaatgccagtgagactgaacctaatgctataaaaaatcagacactttcagcctcccttcctctggatagcactgtaatctgtagtacaattaacaaagcaaactctgtaggaaatgggcaagcttcccagacaagtcaaccaaactaccatactaaactgaaaaaggcctggctcaccagacactcagaagaagataaaaatactaataaaatggaaaattcagggaattctgtatcagaaattattaagccatgttctgtcaacttaatagcctctacatctagtgatatacaaaatagtgtagatagtaagatcatagttgataaatatgtaaaagatgataaagtcaacaggagaaaagccaaaagaacttatgaatctggctctgaaagtggagactcagatgaaagtgaaagcaagtcagagcaaaggactaaaagacaacctaagccaacttacaaaaagaagcaaaatgatttgcaaaagagaaaaggtgaaatagaagaagatttgaaacccaatggagttctcagcaggagtgccaaagaaagaagtaaactgaagttgcaaagcaacagtaatactggcattcctcgttcagtattgaaagattggcgtaaagtcaagaagctgaagcaaactggggaatcctttttacaggatgactcctgctgtgagatagggcctaatttacaaaagtgtcgagaatgtagacttattcgcagtaaaaaaggagaagaaccagctcactcaccagtattttgtagattttactactttagacggttgtcatttagtaaaaacggagtagttagaatagatggtttctcttctcctgaccaatatgatgatgaagctatgagtttgtggacacatgaaaattttgaagatgatgaactagatatagagacttctaaatatatcttggatataataggtgataagttctgtcaattagtaacatctgaaaaaacagctttgtcctgggtgaaaaaggatgccaaaattgcctggaaaagagcagtgagaggagtccgggagatgtgtgatgcatgtgaagcaacattgtttaacattcactgggtctgccaaaaatgtggatttgtggtctgcttagattgttacaaggcaaaggaaaggaagagttctagagataaagaactatatgcttggatgaagtgtgtgaagggacagcctcatgatcacaaacatttaatgccaacccaaattatacctggttctgttttgacagatcttctagatgccatgcacactcttagggaaaaatatggtattaaatcccattgtcattgtactaacaaacagaatttacaagttggaaattttcctacaatgaatggtgtatctcaagttttacagaatgttcttaatcacagtaataaaatttctctgtgcatgcctgagtctcagcagcaaaatactcctccgaagtctgagaaaaatggtggcagcagcccagagagtgatgtaggcacagataacaagttaactcctccagaatcccagtcaccactgcactggttagcagatcttgcagagcaaaaagccagagaggaaaaaaaagaaaacaaagaacttacccttgaaaaccaaattaaagaagaaagagaacaagacaactctgaatctccaaatggcagaacatcacctcttgtgtcccagaataatgaacaaggctcaaccttacgggatttgctgactacaacagctggaaagctacgtgtggggtctacagatgctggcattgcctttgccccagtatattcaatgggagccccagtgagtgatgccagatttttggttttaatgtgggccttaaatagagatgatttggagacttagtttttggctctgaactacccagtatgctgatgaaatcaagtgtaccaaattgctaggcatgtttctatttgcattataactctctttaccttgaaagctggcattttctgtctttttttccacgg

SEQ ID NO: 511949 - DNA, 94 bp, Homo sapiens
tgtccagaactcacacgggaggatgcccctcttctttcggaagcggaaagccagtgaggaggctcggaaacgcctggagtaccagatgtgtctg

SEQ ID NO: 511950 - DNA, 125 bp, Homo sapiens
gggatggcaccggactcctgaaggatggggtcttcaccacttcttctgacatgtggtcctttggcgtggtcctttggcgaactcaccagcttggcagaacagccttaccaaggcctgtctaatga

SEQ ID NO: 511951 - DNA, 261 bp, Homo sapiens
gatagaacaatattaccttgccttaaggagaaaaacgagccggaggggaaaaataagagtaaggtattaaagaaatgagaccagaaatcacagtacaagacagagaactctacttgactatacacatgtaaaagttacacatcacaagagatgggacagtagcttagcgtaacatagctatagtgaaaatcatttggataaaaaaataatctagatgcggtcatcagaatgtttggtctgcttaagttaatgtaagagata

SEQ ID NO: 511952 - DNA, 3819 bp, Homo sapiens
  misc_feature (471)..(471): n is a, c, g, or t
  misc_feature (475)..(476): n is a, c, g, or t
  misc_feature (500)..(501): n is a, c, g, or t
  misc_feature (509)..(509): n is a, c, g, or t
  misc_feature (563)..(563): n is a, c, g, or t
  misc_feature (623)..(623): n is a, c, g, or t
  misc_feature (630)..(630): n is a, c, g, or t
  misc_feature (3700)..(3700): n is a, c, g, or t
  misc_feature (3748)..(3748): n is a, c, g, or t
  misc_feature (3764)..(3764): n is a, c, g, or t
ccacccacgactagagagtgctcatgccagcagcttgagccacttagcgctagcacaccagcaacaacaacagttgttacagcaccagttacctcatcttcttggacaagcccatccttctgcttcatataatcagcttggactttatccaattatttggcagtatccaaatggaacacatgcatactcaggacttggtttgccttcttctaagtgggttcacccagaaaatgcagttaatgctgaagcttcattaaggaggaattctcccagtccttggctacatcagcccacccctgtgacctcagcagatggtattggattacttagtcacattcctgtcagaccttccagtgcagagcctcatcggcctcttaaaattacagcccattccagtccaccattgacaaaaactttagtagatcatcataaggaagaattagaaagaaaagcttttatggaaccattacngtcnnttgcatccacatcagccaaaaatnncctggatntaaataggtcacagactggaaaagattgtcacttacataggcattttgtggatncagtattaaatcagttacagaggccaccccaggagactggagagaggttaaacaaatacnaagaggnacacctcgattcttcaagaaagtattgatgttgctccctttacaactaaaatcaagggacttgagggtgagagagagaattattccagagtggcatcatcatcttccagtcctaaaagccatatcatcaaacaagatatggatgtagaacgctcagtatcagatctttataaaatgaagcactcagtgcctcagagtttaccccaaagtaactatttcactacattgtctaatagtgtggtcaatgaaccaccaagatcatacccatccaaagaagtttcaaatatttacggtgataaacagagtaatgcccttgcagcggcagcagctaatcctcaaactctgacttcatttataacatctctttcaaagcctccacctttgattaaacaccaaccagaaagtgaaggtttagtaggcaagataccagaacatcttccacatcagattgcatctcactcagtaacaaccttcagaaatgattgtaggagtcctacccatttgacagtttcttctacaaatacactccgcagtatgcctgcattacatagagcaccagtatttcacccaccaatccatcacagcctggaaagaaaggaaggcagctatagtagtctttcccctccaactttaactccggtgatgccagtaaatgctggtggtaaagttcaagaatcacagaagcctccaactctaatacccgaaccaaaagactcccaggcaaattttaagagttcttcagaacagagtttgacggagatgtggagacctaataataacctcagcaaagagaaaactgaatggcatgtggagaaaagcagcggaaagttacaggctgctatggcatctgtcattgtgcgtccatcttctagtacaaaaactgatagtatgccagcaatgcagttagcttctaaagatcgagttagtgaaagatcttcagctggggcacataaaacagattgcctcaaactagcagaagccggagaaactggaagaatcattttgccaaatgtgaattcagacagtgttcacacaaaatctgaaaaaaactttcaggctgtctcacagggcagtgttcccagttcagtcatgtctgctgtaaatacgatgtgtaataccaaaacggatgtaatcacatctgctgccgatactaccagtgtttccagctggggtggttcagaagtaatttcctctttatcaaataccattttggcctctacatcatcagaatgtgtatcttcaaaaagtgtcagtcagccagtggctcaaaaacaagaatgcaaggtcagcaccacagcaccagttacattagccagtagtaagacaggaagtgttgttcaacccagttctgggttctcaggcacaactgattttatccatttaaaaaagcacaaggcagcattggctgcagctcagtataaaagtagtaatgccagtgagactgaacctaatgctataaaaaatcagacactttcagcctcccttcctctggatagcactgtaatctgtagtacaattaacaaagcaaactctgtaggaaatgggcaagcttcccagacaagtcaaccaaactaccatactaaactgaaaaaggcctggctcaccagacactcagaagaagataaaaatactaataaaatggaaaattcagggaattctgtatcagaaattattaagccatgttctgtcaacttaatagcctctacatctagtgatatacaaaatagtgtagatagtaagatcatagttgataaatatgtaaaagatgataaagtcaacaggagaaaagccaaaagaacttatgaatctggctctgaaagtggagactcagatgaaagtgaaagcaagtcagagcaaaggactaaaagacaacctaagccaacttacaaaaagaagcaaaatgatttgcaaaagagaaaaggtgaaatagaagaagatttgaaacccaatggagttctcagcaggagtgccaaagaaagaagtaaactgaagttgcaaagcaacagtaatactggcattcctcgttcagtattgaaagattggcgtaaagtcaagaagctgaagcaaactggggaatcctttttacaggatgactcctgctgtgagatagggcctaatttacaaaagtgtcgagaatgtagacttattcgcagtaaaaaaggagaagaaccagctcactcaccagtattttgtagattttactactttagacggttgtcatttagtaaaaacggagtagttagaatagatggtttctcttctcctgaccaatatgatgatgaagctatgagtttgtggacacatgaaaattttgaagatgatgaactagatatagagacttctaaatatatcttggatataataggtgataagttctgtcaattagtaacatctgaaaaaacagctttgtcctgggtgaaaaaggatgccaaaattgcctggaaaagagcagtgagaggagtccgggagatgtgtgatgcatgtgaagcaacattgtttaacattcactgggtctgccaaaaatgtggatttgtggtctgcttagattgttacaaggcaaaggaaaggaagagttctagagataaagaactatatgcttggatgaagtgtgtgaagggacagcctcatgatcacaaacatttaatgccaacccaaattatacctggttctgttttgacagatcttctagatgccatgcacactcttagggaaaaatatggtattaaatcccattgtcattgtactaacaaacagaatttacaagttggaaattttcctacaatgaatggtgtatctcaagttttacagaatgttcttaatcacagtaataaaatttctctgtgcatgcctgagtctcagcagcaaaatactcctccgaagtctgagaaaaatggtggcagcagcccagagagtgatgtaggcacagataacaagttaactcctccagaatcccagtcaccactgcactggttagcagatcttgcagagcaaaaagccagagaggaaaaaaaaggtaaacataattgattatctaggcatgtgtgagaggagtatagtataactaaccaacnatgtactattgtacaataaagtactgttaatattgaggtaaacaattnactttggtctttttcntgaattatgggttaggttcaatgtaaaacatttggtcttcacttattaggaacta

SEQ ID NO: 511953 - DNA, 146 bp, Homo sapiens
gagcgttggcggttcaggctatagccacctgttgcctggtcctacacattgtttttaagtaccataccatacagccactaactacattgcttagacaaagcaatacagtaattatgggaacatattggtttagccttaccagaaaa

SEQ ID NO: 511954 - DNA, 227 bp, Homo sapiens
tgctgtagatgtggctcgctaccttgacctatctatcagacttgaacgcacctgctatatggccactgcgtgggtgatccccatgtgcatgtgactgtgcacagcctgtggcatctgtctattgataacatgcttgtaccacgctgtgcaatttttgcccctgtatttgaccccatgacacatgcctgcgacatgctgtcccacccctgacactgtgacctgcgaca

SEQ ID NO: 511955 - DNA, 1036 bp, Homo sapiens
gcagccagaattttatttttgggaatgttttttcgaaaatggggcagacaagaaaccagaaagaaaaattggggggggtcctgtggacacagaatcgtgtgaaccccagttctgaaatttggggagaccacccccttgtggggaatttgagacggcttttgggtgttacccccggccactgtccgccccttcttaattgcctccgcgcaaggagtgtgaaatgtggtctgctcgctccaaaaagagctcccttcttcacttgtgatcaaaaaggcacttccaccggaggtttttcttcacgagagagactttcttctcttttgggggtggcggcccctccacgagcgcaacttttagtggaggccgggggcttttctcaccacaaccaactgcttgtagaaggagagccggcttttggacgcggccagaggtatggcgagactttcctccctgtggaggaatgcacacacatgacgcctccagatgaatgtggaagactttggattgacactaagagtgggaaaatgcgagattgtgtagaagacacacccacacacgaagagggttctaagaccaccacattttctatttttttgtgggagacacactggatattttctccacaccacatggatagagggacaaatttcttcttactacatcttaagatgtgggatttacccagtggcgccgttttttacacccagaaagtttggatacacttgtagatgggctcagttggttaagaccacctgccaaccagatgtgacagttgttgcgatgttcctagggaagaccactgtgaaaagttcttatgagattggttgtagcccggggtgatatggaatcagtatttgttcgcacaactaaaaattttccagagaaaattgggtgttgaacaatcttttttttttatagtgtgggttgtaataatttttgtggggagttttttttaagtaaggggttttttttaagtgatccctttatttgtaaattaatgggtttttccattaaaaaaataaaaatttccgcccga

SEQ ID NO: 511956 - DNA, 746 bp, Homo sapiens
  misc_feature (73)..(73): n is a, c, g, or t
  misc_feature (81)..(81): n is a, c, g, or t
  misc_feature (172)..(172): n is a, c, g, or t
  misc_feature (203)..(203): n is a, c, g, or t
  misc_feature (205)..(205): n is a, c, g, or t
  misc_feature (248)..(248): n is a, c, g, or t
  misc_feature (265)..(265): n is a, c, g, or t
  misc_feature (267)..(267): n is a, c, g, or t
  misc_feature (275)..(275): n is a, c, g, or t
  misc_feature (293)..(293): n is a, c, g, or t
  misc_feature (306)..(307): n is a, c, g, or t
  misc_feature (335)..(335): n is a, c, g, or t
  misc_feature (339)..(339): n is a, c, g, or t
  misc_feature (346)..(346): n is a, c, g, or t
  misc_feature (351)..(351): n is a, c, g, or t
  misc_feature (358)..(358): n is a, c, g, or t
  misc_feature (567)..(567): n is a, c, g, or t
  misc_feature (570)..(570): n is a, c, g, or t
  misc_feature (575)..(576): n is a, c, g, or t
  misc_feature (578)..(578): n is a, c, g, or t
  misc_feature (583)..(584): n is a, c, g, or t
  misc_feature (587)..(587): n is a, c, g, or t
  misc_feature (601)..(601): n is a, c, g, or t
  misc_feature (604)..(604): n is a, c, g, or t
  misc_feature (630)..(630): n is a, c, g, or t
  misc_feature (651)..(651): n is a, c, g, or t
  misc_feature (654)..(654): n is a, c, g, or t
  misc_feature (658)..(659): n is a, c, g, or t
  misc_feature (674)..(674): n is a, c, g, or t
  misc_feature (683)..(683): n is a, c, g, or t
  misc_feature (686)..(686): n is a, c, g, or t
  misc_feature (692)..(692): n is a, c, g, or t
  misc_feature (697)..(697): n is a, c, g, or t
  misc_feature (700)..(700): n is a, c, g, or t
gggcgcccggaaggtcagcgtgtgaagtaggcgctggcaacgcgggttacccgctgttatgaggagtaacggnccagggancacccaggcttgaggcagcgggggaaccactcggtttgctgcgataccatggaaggaggcgggggaagcggcaacaaaaccacagggggantggccggctttttcggagccggggagcaggntnactcgcacgcggatttggctggcgtcccgctaactgtatgaanccctctgtctccttatntnaatgtggntccacgatacctcgtgcnggatacagatganntttattttacctaccggagctaataaanaccnggggcangattngagctgnccttctttacgactggaggatgtcgcatgacatggggctgctgttggtgcagttgaatggtcttcggctaggattgactggagatccagaacatgggctggtccaaaccaagaaatgtacagattcgaatatggtgacttaggcaagggggcaactttgtggtgctacttacgtctaggtttctcggggcttttgctctaatagtgcanttnggtgnncntcatnnggngaaaaccacgaggngcngaagatgagcttaacacagtagcagntgggaccatgacaggcctgtngtntcanntgtcccggtggtctncgagggatngcncgaggnggtcngcnggactacggttaccagccccttgcctattaataatggcgccttgaa

SEQ ID NO: 511957 - DNA, 435 bp, Homo sapiens
  misc_feature (315)..(315): n is a, c, g, or t
  misc_feature (333)..(333): n is a, c, g, or t
  misc_feature (423)..(423): n is a, c, g, or t
gtaaccccgtctctactaaaaatacaaaaattagctgggtgtggtggcgtgcgcctgtagtcccagctgctcgggaggctgagccaggagaattgcttgaacccgggaggcaaagattgcagtgagccaagatcgcacgactacactccagcctggcgacagagcgagactctgtctcaaaaaataaataaataaaaaaggacaggacagtgttaaagatgaagcttgcagtggcagactgcaaggaaatttgcaaggaaaaaattaaccttgtttgtgccttatttgaaggggacaaatgattaacagcaaaancaatagcgacatcacagncatctcaagtgattcagcttacacaattctggctgaaaaatttaaacttgggcaaactttcatctcattgggggccaaaccattgcaccnaatcagctatag

SEQ ID NO: 511958 - DNA, 1072 bp, Homo sapiens
  misc_feature (145)..(145): n is a, c, g, or t
  misc_feature (398)..(398): n is a, c, g, or t
tccaacccatggtgatctgactctgggctacgcgacggggcccccgtcaactgcctcttggtctcatgccacgtgctacccactgtggacctggctgctggtgttgcatccctagccagctagtgtgcgggagttccagatgctnggtcactaagagggagggcttccagcctagacttgtgtacggccaggtcgtagctgccccatgagtgttgcgtgagtagagatccagtggagtgagcatatcccatctcaaatgactggtgggcacttggtccccgtcgttctcagcacattcgtgtgtgagtgcatgctggctggtgtgcgctgtccatactggcggtgtgacgagcatggatccctacttggcacggtcgtccctggttgatgatgcatcngtctcttcttgctgctgggccgtgctgcgtcctccgttctaatttcttgccatcgtatgccggtcgcggagcacgcagtggacaacgtgctttccctggagatcacgagcgagtgagatgctgaccttgatgctgtcgatcccctaccggacactcgaccttggttgggtagcctagcgcgcaccttgtagtacactcggaccgactctaaacgcgacgtagcgaagctcccctagtcaccctcggctcgatcaacgatcgcgtatcttctcccgtggcggcgcccgtccccccgggggttctcccctgcatgtcttcaattggagtcagatgagatgagcgccgactcagggttccatcgccaagcattcgtggtgggtgttcccctagtgttgcccccggtgccccggtttgggacttggtgtcgggccatccgtgtacttgaagtgggtgtgagatgctgatgtccccgctcttgcttgtctggccttcagggcctgtgcctggctccgaaagggcaactggaacctcccctcgctcagctcttcgtggaacaagagccgtttgtgcccggcccttgggaagcttggggccagctggccctctgctctcccgtaggctagaagggtcttacacctataaaaccaaaagtcgtggcccgaggtcctgacaat

SEQ ID NO: 511959 - DNA, 532 bp, Homo sapiens
  misc_feature (58)..(58): n is a, c, g, or t
agttggacctgggtctgccagggttgcctgagacatcaggaatgagaggcgctacccncgcgggaggggctgaaggtggagtagggtagaattcagggcagggtgactggcctcaggcaagagccaagatgccacctgctcgtgtgtgcccagactgctggccacccagcctcgtgggtgagcctcatttgttcttctctgcgtcctgctttctccaggaaccacggggccctccagacctctcggaacgatcgggattccacagagccccggtgccgccgtcgggggcaattgtcccactgttgccagtggaggatgcacttggagtgccttttcccaccttgccagagtggacactgtccgtgggcgctctgcggggctggctgggacagccggctgagaagcgccaccccctcccgcctagggctgtacactttgggtttataatccacatggcagggtccagacgtccagacagcagccgaagcctctaccagccttttcctgaaacccagcagatcttccacttgtt

SEQ ID NO: 511960 - DNA, 260 bp, Homo sapiens
gtaattttgagagaggagagaatcggaggcggaagtttaagggagacaactggtaagcagcagcgggcaggtctcactttctggctcagtgctcgccccccagcgggtccacaaagccccaccctgtatgcgctgatgcttgacaccactgcgccacctcccatagaccacacacagcgtgctcaccaatgatgcgtgtccaccgagaatggcattgctagagctcagacaggtgtctgacgcaatgttcacgtgcctcc

SEQ ID NO: 511961 - DNA, 119 bp, Homo sapiens
actgtcacatgtaatgcctatgaaactgagcctttccctttcttcccagtgtgaaggagaatgaatcctatctcctgccactagctcagtgtggttatggctatgcacagtacccaata

SEQ ID NO: 511962 - DNA, 1590 bp, Homo sapiens
  misc_feature (177)..(177): n is a, c, g, or t
  misc_feature (289)..(289): n is a, c, g, or t
  misc_feature (399)..(399): n is a, c, g, or t
  misc_feature (508)..(508): n is a, c, g, or t
  misc_feature (1228)..(1228): n is a, c, g, or t
  misc_feature (1436)..(1436): n is a, c, g, or t
gggcgtgatgtctctcagacaagttctccgctcccagagatgggtcccgtcggctgtcctgaccctcgtgaaagcagctaactaagccaaggccgactctggtggcgaaacggtgtatacgagcttcaccctaaagcgactgtagctcgcgtacgcgaagactcggtcctatccttncaccaagccattacctgcgtgcactacaagagctagtgacactgattcagattcgtgccgtgtaatgtcaagacagaagctctcgagcgatccgagcacgcgatgatacaangagtagtgatgcctagtgctagagacgtgcgctagttgacgcgcaggagtagcagacacgcgacgcacatagagtgggtgttgtcgggtgcaagtttgttcggagctacnggtgggtacaaagcgcacgcattcgagatgtggcacctgctcagggaaatccttgccaaagcatcatggtgccttatggcttggaagcacctattttctaggctgcatntgagagtagccgatacgaaggtgccggtatcccctttacttagaaggtaaaatttggggcactataaacttcggtaagggagacggagaggcgtctcttttataacacgagacgcttacgtgggcgaaacggcaatagatttggggcaacgtgattggaagcgagttgaggctaacgtaagcggctatgactttggggacggaaaatggagactcttaggggcgagccagttgagcagaaaagttaactgggcccaaaggtgatcaacctcccgggggggatccacttttgctctccaagcgagacgtctcgacgggagattgcgagcccatggcgattttctcattcattggcgtggcccacagaaagagggacaacggggccgccgaaccctgttagacctggggaggcactcccaacgtgtggaaatcgggggaggggcaccctgtggtggtggccctggaatgacaaaggctttggtgaacctctggggaggccacgccgggcggaaacggaagcggccttttggcacgtccacagccaagggaaaacccctgtgggtggtaaaaccccccagtgtttggtgttggcggcgaccggcgcgagtgccgcaagagaataggcactcccgaaaccggttccataccggggggtgtttggaacaccaaaggtggggccaaaaggggctttaaccaaacaaccgcgaggttcaaccccaangagttcagggtatgtgcccaccactaccagagtgaaaaatgctttgggccccctggcagagtagaacccccaacccggaaggggcgcatttggctgcccaaagggggtgtgccccatggtattttgggggggaccatttgggcgaatccccatgcggtcacggatgataagcgccctttcctcactatggaggcgcacacggcacgtnttggggcatagaaaaggcgttaccatctacccggactttaggagaattacaccagcgacacgagtttattacgaaagttgggggccaggagggatacaccttaaataaacggagcgagggaagctgattcggtactcataaaaacaatggctcc

SEQ ID NO: 511963 - DNA, 308 bp, Homo sapiens
gatccgaaataccatcctgtgaatggacacaactgtgaagtagggaaaaccctgtccaagcacgagatggctggtgcttcatccagccaaagacggtcaaagtggttctggaaactttaatggtggttgtgcacgtggttctggtgggaatgacaacctttgatcatggaagaaacattacgtacgttgcagtgacttagatggtagccatagtggtggtggatatggtacgtagtgagtatggctgtaatggattcggtcatgatggactcaactttggaagttgtgtaaatccggcactgattttg

SEQ ID NO: 511964 - DNA, 261 bp, Homo sapiens
acagccggggggcccagagcctctgttgagccacacggacgagccaagggactgcatgcccttagcgtgacccaggctagtgaccaaaagcacacagccccatgggcgctatacaacgcctctgcatggaagacctccgaggacaggacacaccctctgcagctcccatgatacaggaagggcagctgaggcacgtgtgtgaagctcagcttgccgtgacaggctgctgtagaccatgcggattcacatgagtgacctatg

SEQ ID NO: 511965 - DNA, 473 bp, Homo sapiens
ctgcattcaataatataagaatggctcaagtctcttctaataaagcataataaatgaaacatttaaactctggattcagattattttttatttgaaatcctatcatgaaattaaaatattttcgactaacgacaaatttcttaaaaaatatagaaagataagcttcaatggaatgaacaaaagcacagtacaaattattgctaaataataataactggaagaaaaaagatctagttactatccaaacaaggctaatacacagtcagttatctccacttcaaaccttactgtggctctgcgaaggtatgaggataatgtaatgcggagaaagcagagacaagaaggaatctcccctcttatttccttccccatgaagttttggatgcagaagaacagaacagtcatgttgggtatttatcacaatgtacttacttgttcatgctaccactgacaccattaatagaggtaaatgc

SEQ ID NO: 511966 - DNA, 275 bp, Homo sapiens
  misc_feature (218)..(218): n is a, c, g, or t
  misc_feature (222)..(222): n is a, c, g, or t
ccccactccaccttactaccagacaacccttagccaaacccatttacccaaataaagtataggcgatagatattgaaaccttggcgcaattagatatagtaccgcaagggaaagatgaaaattataaccaagcatattatagcaaggctaacccctgtaccttctgcataatgaattaactagaataactttgcaaggagagccaaagctaagacccngaanccagagggctacctaggacagctaaagggcaaccgcttattggcaaatgttgg

SEQ ID NO: 511967 - DNA, 184 bp, Homo sapiens
gttttgtgtcaattggttcgtggcaggaagctattagaaggtcaaacgtccagatgcattactgctatcttagtttaagggggaaagaaaagggaggaggaaggaaagagaatccacctccttttcaatgttttgcttttgaccatgagggtttgtgtgtcagcatgccttttgctgggatgtt

SEQ ID NO: 511968 - DNA, 472 bp, Homo sapiens
  misc_feature (183)..(183): n is a, c, g, or t
ggcgactctacggatccttacttacgccccaaactcactaacccaacaatacaactatttcaccactgggcttactgcagtcacgattttcactttactgactacccatgaaaatgattttagacaggttggaggaagcatactttttaaaaagtatcccttcttatggacgaaggatttggnagtgcggtcatagagattccctacttcttgttgcaggcacagggggattagctcaaatggtagagcgctcgcttagcatgcgagaggtagcgggatcgatgcccgcatcctccaactatttagtttagttcaatcagcacacatagttgtagctctggatagtaaccaatcaatacaagtatatccaccactgggcttactgtaggcactacttggacctttactggattgatcagggaaaatagcttttagacagctgaagcaaggatactttctaaaaagtatcctt

SEQ ID NO: 511969 - DNA, 306 bp, Homo sapiens
agcgcatcttacctgtcgttatgcgggaagtgtctcaccactctgcacttccaggactcttgtatctgcctttaggcggaaattgctgttgtggatttgcaacccgaggtggaatagtctgaagcaatttgctggagacagggggctcgggcaacgccaccccgggatcccttgcaagcagtcgcctgtccacttagccgcaggaagcggccttgcttgctttcttctctggccagctgcaaacgggccgctgaccttcaaccagcaggtaactagggtaacctgtcgctgtgtatttccggggta

SEQ ID NO: 511970 - DNA, 347 bp, Homo sapiens
tccgacgtgttcatggagaaacctgtctctactaaaaatacaaaattagccgggcatggtggcgcatgcctgtgatcccagctacttggaaggctgaggcaggagaatcgcttgaacctgggaggcagaggttgcggtgagccgagatgatgccattgcacttcagcctgggcaacgagaggggaaatctgtctcaaaaaaaaaaaaaaaaaaaaaaaaaaaaaaaaccctcagtggttgctaaaaaactttccaggaccgggcaaccaccggtggttggttaacccattcagagactttgccggtctttccagcaacctcccaggtcacacgtgcctgtggggttg

SEQ ID NO: 511971 - DNA, 363 bp, Homo sapiens
  misc_feature (62)..(62): n is a, c, g, or t
  misc_feature (76)..(76): n is a, c, g, or t
  misc_feature (154)..(154): n is a, c, g, or t
  misc_feature (172)..(172): n is a, c, g, or t
  misc_feature (339)..(339): n is a, c, g, or t
agggtgaggaaaaaatttgtactctccctggcccctacatggggcaggcggggcagtgggtnccccagaagaaggnattcttaagaagtctaggcaggggcagtgctcatgcctgtaatccactttgggaggctaaagtggaggatcacttaanccaggagtttaagactancctggcaacacagcaagatgcccatctctacaaaaaaatttaaaaattagctgggcatgtgtcatgcacccgtagcccagctacttgggaggcttagctgggaggagttggagctcgagagttcaaggctgagtccaggagctggaggctgtagtgagctatgattngcggctgcactctagtctgggtga

SEQ ID NO: 511972 - DNA, 314 bp, Homo sapiens
  misc_feature (16)..(16): n is a, c, g, or t
  misc_feature (42)..(42): n is a, c, g, or t
tggaaaaagggagaanccctacaaaattgtagaggttaaatnctgatcaagtaactgaggctgggcgtggtggctcacacctgtaattgtagcactttgggaggctgaggtggatggattgcttgtgctcaagagtttgagaccagcctgggcaacatagtgagacctcatctctacaaaaagttaaataatcaggcatgatgtgggtcagtttgaggtctgaggtgggagaatcgcttgagcccaggaggtctaggcttcagtgagctatgattacatcactgcttgggtgagagaaagagagaccctgtttc

SEQ ID NO: 511973 - DNA, 175 bp, Homo sapiens
tgaaaaaggttattcgggaaaaaaaaaaaaaaaaagaatgggcaaaaaagtaatcatgtagttgaagtctgtggatccacctgttatgaaaatggttaaacttgaaaccaccaattttaaaaattatttggtctgaaaatgttttactttaaaaaaatgtctattgtaatggcca

SEQ ID NO: 511974 - DNA, 843 bp, Homo sapiens
gggcttgtttggctggagggaaaaaataataaacgtttatattatagtattttctctactgtttgaatttttagagggaatgtggtaattttataatttaaaaaggagttattggggagaggatggtgaataaatgtaaagtaactgatattgagactggttaaactgagaaaatacatatacaatactttatttgtgaagccagacctggacacagaaagatgcaggaagttaaaaaaaattacaaggatgatatgtagaacacatgagttcagagaggtagtacttaagaaaactgattacaaaactgatggtacattgaacaatcttactactaaaagtagagtacaatatgtcacctgatagcatatgcacacgcacacacaattttctcattctggacagatccagaaacaaagaaactgatttacattgcctggctaaggtagggtgaccaaccgtcttagtttgctgagatcaatgggtttcctaggatcaggaaagtactgggcaaatcaggacaagtcagtcatggtaatctagaaagtcccaaaggagttggtctaggccaaactggttcttcatcttacagaaaaacaaaatacactgtatgtcacagtttagagggctctctgaggaacttacagtttcacagttgtgatttatttcttcctttacgaaatgcatccgaacatcacacattgcttgtatttgaagtgtcagtgtaaatttgtcacccaaatttaattcaccatgtcggattatccttgtcctctcttgacctttaaaatgtacatccaaggtgacattaatctcatcattcctttttaaaaatacccataa

SEQ ID NO: 511975 - DNA, 151 bp, Homo sapiens
ctcggtacccgatatttgtggttctggcgcacttagtgtagcttcagggtagggctggtcactgaaaaaccaaggggaggattataacggttaggacttctctgtcccatctcccaacctccaatgagggcatagatgctgacatgatgtc

SEQ ID NO: 511976 - DNA, 203 bp, Homo sapiens
catagaggatcccctatcgattgtagggcacttaaggtcaatcttctacagagccctgctgcttctgtcttgcaccagaaagggacttgcggagcggtgagcacccgaattcttggttcccaccaacacagcctttcagcacgacaaagtaataggtcacttcaacatagtggacaaagccagccagaggctggatgctcttg

SEQ ID NO: 511977 - DNA, 791 bp, Homo sapiens
aaaattaggactagtaagagcccggtgattcaatctggcagaggcagaaagcaaagcatggtagtggctgatccgggcccgttggcggcgtcactgacgcttcgtctccggtcctcgagatcccgagcgcggggaggcagaccggtgagtgaggggcccgggacggacgctagagaggtctgcggggccaagtgtacgccggtacggactggatgaagggcgaggtcattggatggccgtacagccgacatccacagacttgaggcatgggagcattcgtcctggaccgatctggccttgacgcccatggcagaagactcctgccgccagccgaggggctcacgcggggcaagggacaggccgacgacgctggactcccctgggcgccggcactgtctggtctcctactggccaaaacctacgaatgcgcaccgggataactggtagtgcccaaggggttctggattgagagctcggcagatttatcaggagacagcgagcttagggacaaggctgccaccgcttttccctgacggccgtgacgactatcccgggttctgacaccgtgtggaccacatcaatccccgactgatgagctgcatatgtcccccatccctgcggcgcgatccatggggaaacacaggagccccatcacgtgagtgcctcggggttattggacttggaggccaggacctcacatactacatatgtgggatggtcatagacactaaagggtgatggggaaagcccacaaaaggagaatggtgagtcagagaataatacagaacatg

SEQ ID NO: 511978 - DNA, 331 bp, Homo sapiens
  misc_feature (10)..(10): n is a, c, g, or t
  misc_feature (75)..(75): n is a, c, g, or t
  misc_feature (321)..(321): n is a, c, g, or t
ttcccgaacntaaatccttgtttgagtcaaaatcatttttattcaagagggaacaattatattaatctagatttnccctggtaaatccataacatacagacctgaagttcaagcagaacctgaggtaatgtgagccctgggtaaggtatagtaaggatggagaggtaggtaaagaaaggcgagaatgattcatttattgagaaagatgagcaaggtggtcaaatagatttgcttctcaacaaagcgtgtagtttaagcacttagttttggtttcttttgaagctgccttccctttttcccatctctctattccaacataanagaaaaaaaa

SEQ ID NO: 511979 - DNA, 381 bp, Homo sapiens
cattccctgtacatataaacaaactcccctcatgatatctcaggcacatcaataataagaaccaatcatcttaggatcaagcacagtggctcacatctgtaatcctagcactttggtagtccgatgcaggtggactagctgagctcaggagtttgaccccagcctgggcaacatggcgaaactgtctctactaacatacaaaaatcagccgggcgtggtggtgcatgcctatagtcccagctattctgtaggctccggcatgagcattcctcatgggaacctggaaggcagaggttgcagtaagccaagattgtgccattgcactccagtctggataacagaggaaaactctgtctcccacacctccacacaaaaacaatc

SEQ ID NO: 511980 - DNA, 114 bp, Homo sapiens
cgactctaagaggatcccccactgcagcgggcacccccgggaacagtacttcatgtactcgtgcgacggccgtcacttctggtgcctaccggcagcactgacgcaggaccagta

SEQ ID NO: 511981 - DNA, 548 bp, Homo sapiens
acattgatgaagatgagatcacagctagttgtcgtcgctatggccctctgattgtggataggcctcataaagctgagagcaaatcctattttcctcctaaaggctatgcattcctgctggttcaagaagaaagctctgtgcaggctctcattgacgcatgcattgaagaagatggaaaactctacctttgtgtatcaagtcccactatcaaggataagccagtccagattcggccttggaatctcagtgacagcgactttgtgatggatggttcacagccacttgacccacgaaaaacctatatttgatggtggagatccccgaccattacgaagctgtggggcttggcgatgatcatggatcggctatatggaggtgtgtgctacgttggggacggatactgacccctaggcctaaaataaccccaaaaggagtctgggagaattgcgttctctaaatcaacagaagttacctaattagctattcagtgccccgccttaggatcaactcgcactccacgggaggagattatattacaacggggggcg

SEQ ID NO: 511982 - DNA, 464 bp, Homo sapiens
  misc_feature (166)..(166): n is a, c, g, or t
ggcttggggggtcgtgggaaagcaaagcgggtctttgaagaaaaaggtggggataaaagagccagagaagaatttggtgccaaagcccggggagtttttgaagggcaagaaggtttccgaggagccaaaggaggagggggtgcccccaagccccaaggaaaaaagncgaagtttgaaaagcttttgtcccttggctttcccttttccatttgaaaaaaaggcttttggggtttttacggttccctgaccaaggacagacccttttggggccattccaagccagaaaacagtcctggggttcccttggaaaccggttaagttaacatttaaagggcaatcccgggtgggttttgatgggaatttcaaataaactttttaaaaagttgagtgaaaaagctaccccttttcggtaagttttgaatttaaattgtttcatcccagggccaaacccattttttcctcca

SEQ ID NO: 511983 - DNA, 1619 bp, Homo sapiens
cacatcgtgtcagtgaaaattaaccactaatagcccataatggagctatatggatagtaagacctcatatcacacattgtgctgtcatatatacactggtacaattacggttacaacgatctcgtcaactatctgtgactcatcttgagtcctataaagtgcctggggcttgctgcctatacagaagcacatctagtagaacacattctcgatgatagtgaagtgcttgcttcgaaattggtgaagacgagcgcaacctatctcatgttcttggcctttgtggatacatttgggtattgatacttcgacattgcatagcaagctgtagaaactgtggagataatcaacacatatagcataatcctcgcgtctgttgcgaacatattgcacgcacccatgagagagtcacctatggttgacttagtcaatcttcgagtgactcccaatgtgatccaccaagaagggagcatttctcacttcataagcagagccattgcattatcaaagtggcagcattacttccaactcgcctgtgcaccgttgatagctttgtacccctgcattttcggttttggactttggcttagagaatagactcgtagcgattagcaacacttctggaacaaccgcttagatgggttatattcgttcgcgaaaaggcaaacatttgagtgtctacggagcgcgccggaaggacaagccaaattggcacctctttatccctcgaaaccttttaatcaccatacaccttggagaggcttgttttgaaaacagccaacaccctttacaacctgttggcatccgacgggtggcttcataaagcctagaccacacactgcgcggaacatttcacccaagcgttgcaatgtcccccaaacgccgcagttaaacaaggtcgcccatgttaacacggaagtacttaacctggcaagtgtcagcacacatcgcgcttgacacggcggtcgtacaagccttccaaggggcatgcgtatataaaccaactttgttaagcagcacaacccatcattttggtgccagttaaaccaaaagtagccacccgtaagccatgcgccatagagcatcaaacgcccagctttatataggcttgcgcccacaacgactaattccgcttgcggcttatagggccaacaattgcgccttgcgaaccaacatccgatttggccacttgcgtctaagccccactacaagatctgccaatacaacccaatttgacccctcgtgtcgattctcccataccggcagtgggaacttatggcgcaaaacacatgagtaccagacaacccacctggctgacaaacagtcggaccatttgtgcgaccaaactttggccactcaggacttggagcaaacaaccgccccagacagtgccttttgggcacttctttgcacaagggcgacgctttcatttgtgggacacatactgcgacgaagtatcccatgtaatgcacaaaccacaaagaaacgattactgggtacaccaacaaaccattcgagacaaaccagtgcactccacttcttggctggcgcccccatatgacacgtcatacttaccacgggcaacatatcggtctgctaaaccacagaacaagaatatgggg

SEQ ID NO: 511984 - DNA, 638 bp, Homo sapiens
aggatcacttgagttcaggagcttgaggcttcaaagagccataatcatgccactgcaatacagcctgggtgacagagtgagactccgtttccaaaaaaaaaaaagaaaaaaaagaaaaaagaaaatctcaaaatctcataaagagaatgggaaaaggctgcatttgtcttggaatttataaatgtattcaaaaatttttttcatctttgttgatgcatatttctgtaatagttttttcctgtcttaattttctctcataaaaggaaaagatttgatattcctgagtcatcactctcctgaaatctcagttttactcagacctgtgctatatagagtattatgttcatgcccatgtctgatgtggagggagagacacagacaggagagtgggtgactgactcagatgtaaatgatcttattatacttgagctgcaaccacacctagaaaccttgacaacaacagggcctgtgtttgatatatctcacttgttaaatcctgtctggattttagtatgtcatatgtgtgttcatcagcaaaattgaacaggtgctggaacaattgcaaagctttaatcagacttatgattacacttttctcgttatgattaaactgtttctcaattttggccaaggatatg

SEQ ID NO: 511985 - DNA, 561 bp, Homo sapiens
agcgggggtggtgacagttgatagttgtgaaagtcgttgtctctgagatacgtgaacacacgccgctattcacaatgcctctgcaacagaacaacagaatgtcactggcactcgactataatatgctaaaaatgtttctggttccaacagacacacaaaccagttatcagccattctaaagttcttggcaactgcaaactgctaagtccacaacggcattagactcgcagatatatacatgtgcaattccaacaggaaaaagtggatggaacatgttgttatgttacatacactataagagatcatgaccagtacctttgggctcagactagatagaaaaccctaaaaaacaaagctgcacacacaaagattcttacacaacttttctacattcaaaagaaaacccaggaagaatttatttatcggaacgttgaggaggacttcataaccagctccggaggtgctggataccagcaaaggagacagaatcaacataatatgggaacccatgtgcctgatgaaaatggacacattacctggttgggtaccatgtagagaaaa

SEQ ID NO: 511986 - DNA, 309 bp, Homo sapiens
cccttgaggatagcccctttgggcccagtgggggtggaggccctgcctccccctgaagtagcaggccgcatgcttggaggtaaagtccatggttccctggcccgggctggaaaagtgaaaggtcagactcctaagggggcccaccaggagaaaaaaaaaaaaaaaccaggtcgggttaaacgggggatgcagtccacccggggctttgtcaacgttgggcccccctttggcaaaaaaaagggccccaaagcccacttttaagttttttggaatttgggctttttttaaaaaaaaacccccttggttcca

SEQ ID NO: 511987 - DNA, 103 bp, Homo sapiens
ggtccaccttggcgatgggaaagccggtggccttggacgcagcgacgaacgcgacacgcgcgggttcatctcgatgacgatcatgcgtgcgttctcggggttg

SEQ ID NO: 511988 - DNA, 433 bp, Homo sapiens
  misc_feature (76)..(77): n is a, c, g, or t
cacctctaaaaaaaaaaaaaaaaaaaaaaaaaaaaaaaaaaaaaaaaaaaaaaaaaaaaaaaaaaaaaaaaaaaanncctggggttgggcccaaattgaaaaaaaagtttatgaaacccggcaacctaaggggggggccgggaaccaaattcccctaaaagggagggaaaaaaaaaaaaatgggccgggttttaaaaaggggggaatgggaaaaacctgggggtaaccaaattaaaaggctttgaaaaaaatccccttttgacaagtgggggaaaaaaaaaaaaggcccgaacgaatcgcctttccaaaaatttgccaaccctaaagggaaaagggaaaattgaaagcgtaaaaatttggtaaaaaatcgggtaaaattttggtaaaaaaagttaatttttaaacaaaaaggccaaaatcggaaaaatccttt

SEQ ID NO: 511989 - DNA, 493 bp, Homo sapiens
  misc_feature (31)..(31): n is a, c, g, or t
  misc_feature (45)..(45): n is a, c, g, or t
  misc_feature (62)..(62): n is a, c, g, or t
  misc_feature (224)..(224): n is a, c, g, or t
gttcatttctacacagaaatagtagatggcnagtttgtgggtttntttttttacacgaattngaggaaaaccaaatgaattggatagccaaatggagacaatttcagcaaatctgtaagcagttggtatgtttagtgggggtaatgaagtatttcagtttggtgaatagatgaccggtttttacttcctcaccctgaattcgtttggtaaatgtagagttgggntgtgtaactgaggcgggggggagtttccagtattttttttggggggggggggggcaaaatatgtttccagttctttttcccttaggtctgtctagaatcctaagggcaaatgactcagggtgtaacagaaaacaagaaaatccaatatcgggataatcagaccaccacgggtttacagtttatagaaactagagcagttctcacgcggaggtcggtggaagagatgtccatgggcgaaagggtgggtcgttactcttttttccccccac

SEQ ID NO: 511990 - DNA, 238 bp, Homo sapiens
acgggatacaagtgggtagccggtgggttggcagagacatctttaaataatctggggtttgggccatccagaaggtctctttctggctcagggtttctggcagggtctttggggtggactggtgtaagcgagccagtgggctgggaatggttatcatgggtgctcatggtcctttcaccaggaaggggcaatctggctcccagcagctggccggctcccctttcctggcactttggct

SEQ ID NO: 511991 - DNA, 491 bp, Homo sapiens
gtagatgaccatatgaggggacaacaacacatgggctatgcgaaaatgaaagctagtgtagaagatttcgaggaaaagttaaggaaaagccccgaagaagcggatcgggatgagcgtctacaaagggagaagcaagaaagagcagagagagaaaacgaaggggagaggaaaagggaagacagacaagggaacaggcgaggggacgacggccgaccgagaacgagaacgggctcgtgacagagaccgcagacagagaagtcgtccggaagtacacgtccggcgaacctcggcaaagacgcgcagtctcgggcccacaaggtccgaggtgagacgcggggaccgtaggatggcgagagcgaagccgatcgtcgaaggaaacgttcagtgggtcagaaataagacgatgagtcatgacggaaaagggccctgggggcgtgcaacaaggggaaccggggaggggccatgagagggggaatgacatagggatgtga

SEQ ID NO: 511992 - DNA, 252 bp, Homo sapiens
ggcttgaacctaagggagaaggggctgcagtgagcccttgatggaccacttgcatcaactgggagaaaaagtgagacccttcctcaaaaaaattaaaaaataaatataaataaatatatttaccacaaagaaatgataagtgttttgggggatggatatgtaaaatagcttgatttggtcatttcatgatgcatacatgtattaaaacatcatattgtacccatacatatatacaattattatttgtcaatt

SEQ ID NO: 511993 - DNA, 773 bp, Homo sapiens
  misc_feature (11)..(11): n is a, c, g, or t
  misc_feature (133)..(133): n is a, c, g, or t
  misc_feature (202)..(202): n is a, c, g, or t
  misc_feature (297)..(297): n is a, c, g, or t
  misc_feature (299)..(299): n is a, c, g, or t
  misc_feature (306)..(307): n is a, c, g, or t
  misc_feature (309)..(309): n is a, c, g, or t
  misc_feature (319)..(319): n is a, c, g, or t
  misc_feature (335)..(335): n is a, c, g, or t
  misc_feature (338)..(339): n is a, c, g, or t
  misc_feature (342)..(342): n is a, c, g, or t
  misc_feature (350)..(351): n is a, c, g, or t
  misc_feature (367)..(368): n is a, c, g, or t
  misc_feature (371)..(371): n is a, c, g, or t
  misc_feature (379)..(379): n is a, c, g, or t
  misc_feature (381)..(381): n is a, c, g, or t
  misc_feature (387)..(387): n is a, c, g, or t
  misc_feature (390)..(390): n is a, c, g, or t
  misc_feature (422)..(422): n is a, c, g, or t
  misc_feature (426)..(426): n is a, c, g, or t
  misc_feature (428)..(428): n is a, c, g, or t
  misc_feature (430)..(430): n is a, c, g, or t
  misc_feature (450)..(450): n is a, c, g, or t
  misc_feature (454)..(454): n is a, c, g, or t
  misc_feature (456)..(457): n is a, c, g, or t
  misc_feature (462)..(462): n is a, c, g, or t
  misc_feature (467)..(467): n is a, c, g, or t
  misc_feature (475)..(475): n is a, c, g, or t
  misc_feature (483)..(484): n is a, c, g, or t
  misc_feature (486)..(488): n is a, c, g, or t
  misc_feature (490)..(490): n is a, c, g, or t
  misc_feature (492)..(492): n is a, c, g, or t
  misc_feature (495)..(496): n is a, c, g, or t
  misc_feature (500)..(501): n is a, c, g, or t
  misc_feature (584)..(584): n is a, c, g, or t
  misc_feature (623)..(623): n is a, c, g, or t
  misc_feature (773)..(773): n is a, c, g, or t
gctctgctctnagccgctcactgcatggtagagtctggtgcccccgccgccgcctgcatcgccgccaccgccgctccgccacgaccaccgccgcctcctgccctgcagccaccgccaccgcctgtgtcgccgncgcctcgggaccggctgtatgattaggccacaatcttcaatgagtaaacatattcctcaattctgtggngttcttggtcacacatttatggagtttctgaagggcagtggagattactgccaggcacagcacgacctctatgcagacaagtgaactgtagaaantnattactnntncaccaagaancccccataagagtggntannctngacacagnngtgttgaattgaatcnncanagcatttnanaagagntcngacctggatggggtaaacctcagtgcacttcntttntntngcctcagattactgggatgnagantnnctgcntctgntaggaggntcatttanngnnncntnctnncaanntcatactcaagcactgagaatttcaagtggagtatattggagtagacttcaagttcttttgcatcattctcgattcaatattntaattaattcataacctattgaagggttttaactaaatnacattggttgaatgacccggcaagctctgtggaagcacataccagacatgaagattctattcccacatccatccatgcaacttaaccaattattgcgaacttagaagtttggatccccaattgtagaagttgtgaacactttgtccttcn

SEQ ID NO: 511994 - DNA, 747 bp, Homo sapiens
  misc_feature (11)..(11): n is a, c, g, or t
  misc_feature (133)..(133): n is a, c, g, or t
  misc_feature (202)..(202): n is a, c, g, or t
  misc_feature (297)..(297): n is a, c, g, or t
  misc_feature (299)..(299): n is a, c, g, or t
  misc_feature (306)..(307): n is a, c, g, or t
  misc_feature (309)..(309): n is a, c, g, or t
  misc_feature (319)..(319): n is a, c, g, or t
  misc_feature (335)..(335): n is a, c, g, or t
  misc_feature (338)..(339): n is a, c, g, or t
  misc_feature (342)..(342): n is a, c, g, or t
  misc_feature (350)..(351): n is a, c, g, or t
  misc_feature (367)..(368): n is a, c, g, or t
  misc_feature (371)..(371): n is a, c, g, or t
  misc_feature (379)..(379): n is a, c, g, or t
  misc_feature (381)..(381): n is a, c, g, or t
  misc_feature (387)..(387): n is a, c, g, or t
  misc_feature (390)..(390): n is a, c, g, or t
  misc_feature (422)..(422): n is a, c, g, or t
  misc_feature (426)..(426): n is a, c, g, or t
  misc_feature (428)..(428): n is a, c, g, or t
  misc_feature (430)..(430): n is a, c, g, or t
  misc_feature (450)..(450): n is a, c, g, or t
  misc_feature (454)..(454): n is a, c, g, or t
  misc_feature (456)..(457): n is a, c, g, or t
  misc_feature (462)..(462): n is a, c, g, or t
  misc_feature (467)..(467): n is a, c, g, or t
  misc_feature (475)..(475): n is a, c, g, or t
  misc_feature (483)..(484): n is a, c, g, or t
  misc_feature (486)..(488): n is a, c, g, or t
  misc_feature (490)..(490): n is a, c, g, or t
  misc_feature (492)..(492): n is a, c, g, or t
  misc_feature (495)..(496): n is a, c, g, or t
  misc_feature (500)..(501): n is a, c, g, or t
gctctgctctnagccgctcactgcatggtagagtctggtgcccccgccgccgcctgcatcgccgccaccgccgctccgccacgaccaccgccgcctcctgccctgcagccaccgccaccgcctgtgtcgccgncgcctcgggaccggctgtatgattaggccacaatcttcaatgagtaaacatattcctcaattctgtggngttcttggtcacacatttatggagtttctgaagggcagtggagattactgccaggcacagcacgacctctatgcagacaagtgaactgtagaaantnattactnntncaccaagaancccccataagagtggntannctngacacagnngtgttgaattgaatcnncanagcatttnanaagagntcngacctggatggggtaaacctcagtgcacttcntttntntngcctcagattactgggatgnagantnnctgcntctgntaggaggntcatttanngnnncntnctnncaanntcatactcaagcactgagaatttcaagtggagtatatcgaatatcgaagtagacttcaggttgttttttggttttgttttgttttttttttgttttggttttttttttttttttctgttttggtttaaatcatttctgtattcaattttttaattctttcataaccctattgggtgtttttttaaactaaattaacatggctcgaatgaaccgccctgctcctgtggaagtcacatacaagaacat

SEQ ID NO: 511995 - DNA, 725 bp, Homo sapiens
gattacatgaatctggtgaggtggcggtcgcagtgagctgataccacttgtatatgaactgtagcctaggagatactagtgagagtcaatttcttggatactacaacaagtaatctgatcctcgtggtttaacaagtctctgtttcaggagagagtactcctaaaagtacgtaagtcttgtgaatgatcctcttattcgtggtccttactttattcatgtcattgcatctgtgcacgatcaggtactcaattaaaaagcacgcctgtttcttaggcccgggcaccggttggcttcacgccttgtctaatcccagcactttggggaggctgagggcagtgcggaatcacgaaggtgaggaagttccaagaaccagccttggccaacatgtgtagaacccttgtctctactaaaaatacaaaaattacgctgggcgtggtagcaggcacctgtaatcccagctacttgggaggctgaggcaggagaatcatttgggcccaggaggcggaggttgcagtgaggcgagattaagccactgcactccagcctgggcgacagggcgagactccgtctcaaaaaagaacaacaacagaaagcaaagaccttttgttgccacaggcatcaaggatagtgtcgtgtaacaaggtgtctcatgacactcactgacccggtaatctgtgacaccgggcaagcactactgggattggactttcctagcattgtccaa

SEQ ID NO: 511996 - DNA, 274 bp, Homo sapiens
tttttttggggggggggttaattaaaggatattttcttccccccccccctttttttttggggccccccccccccccttttttgccagggaaatgggggatgggctatgagtttgcaaacagctgggcgggcagggggcttttttccaaagggtcccccttggcctccccttccccccctttcccctccttttccttccttccttcctttccttggggccctgggccccctttggaaggttgagagaaacccaaattaaagagggaaagggggga

SEQ ID NO: 511997 - DNA, 973 bp, Homo sapiens
gagatggatgacccctctctgttctcatctccaggtggcggtgggggaccacgaggccggggtaacagggacgcatggatgacccctctgtgggccccaagatcccccaggctttggacgaagatcctgcacgctgtaacggagagccgccacgggaaggagatgaacttctcagcaggaggaagaggagaatggtaacatagcagatggctcgctcgtccctgggccagtcagcgtcagagactgaggaggacacatgtgtccgtatctgatcaacggagaaagatacccggcaatgcgtaggaaccgaagagaagaagagaaacagccccagcggtgtgcgtaggtggttggtcctctgtagagtctctgggtgaccgggtagaatatgacttcaatgctcggtcccgtggctctgattccccagcagctgatgttgagattgagtatgtgactgaagaacctgaaatttacgagcccaactttatcttctttaagaggatctttgaggcttttaagctcactgatgatgtgaagaaggagacagagaaagagccagagaaacttgacaaactggagaactctgcagaccccaagaagaagggatctgaagaggagcacaaggacacgtgatgatgacagcagtgatgacgagcaggaaaagaagccagagagccccaagctgtccaagaagaagttgcgccgaatgaaccgttcactgtggctgcaactcaagcagctggtggctcggccgatgtcgtggagatgcacgatgtgacagcgcaggaccctaagctcttggttcaactcaagggcactcggaactcctgtgccctgtgcacgccactggtgtttaagcgcaatacctgcaggcaacggggcattgagaagccccccttcgagcctggcagacttcatcaaagcacaggatccaagagaatcacaaggcctgcgagcaacgagaacagagacg

SEQ ID NO: 511998 - DNA, 659 bp, Homo sapiens
cattgttgaagacgcccctgttgttaaaagaaagttttagtcgcgccagatggggcgcctttggaagagcccccctttggtgagtctccccttcttcggattgtggagagagtccccccccatggtttccccacattattttagagggtctgtatatgccgcctcgctaatacacacccttgtacatgagaggctttaaattagtggccacccccccctttttggggcgcccgcgcgcgattgtgtggcgctcaccccgcgcgcccatgcgccgggcccccctggggggcggccaatagtgccggctgcagatctcccccccgtgggggcccctgggcggttttcacaacaccccactcttctgctccgcacatacctggcgcctcaactctgacactcttctttgttgtgtttacaaatacagccggccgcaatccttatcccaccgcgcgcgtggggtggagtggcgcatatccgccgtaaatgccaccagaccccgggagcggcgccgcgcgcgcagagagcatcccctgtgtctcccactcgcggcgcccgcgtggtgcactccgcgcccgcgggcagccactccccctacgctcgcctcgccgcctctcggaggaccgacgcaaccaacttctacagctaaacaaagcaagaca

SEQ ID NO: 511999 - DNA, 843 bp, Homo sapiens
  misc_feature (72)..(72): n is a, c, g, or t
  misc_feature (144)..(144): n is a, c, g, or t
  misc_feature (203)..(203): n is a, c, g, or t
  misc_feature (216)..(216): n is a, c, g, or t
  misc_feature (232)..(232): n is a, c, g, or t
  misc_feature (234)..(234): n is a, c, g, or t
  misc_feature (259)..(259): n is a, c, g, or t
  misc_feature (280)..(280): n is a, c, g, or t
  misc_feature (282)..(282): n is a, c, g, or t
  misc_feature (284)..(284): n is a, c, g, or t
  misc_feature (335)..(335): n is a, c, g, or t
  misc_feature (348)..(348): n is a, c, g, or t
  misc_feature (397)..(397): n is a, c, g, or t
  misc_feature (412)..(412): n is a, c, g, or t
  misc_feature (448)..(448): n is a, c, g, or t
  misc_feature (471)..(471): n is a, c, g, or t
  misc_feature (481)..(481): n is a, c, g, or t
  misc_feature (485)..(485): n is a, c, g, or t
  misc_feature (500)..(500): n is a, c, g, or t
  misc_feature (502)..(502): n is a, c, g, or t
  misc_feature (525)..(525): n is a, c, g, or t
  misc_feature (528)..(528): n is a, c, g, or t
  misc_feature (536)..(536): n is a, c, g, or t
  misc_feature (545)..(545): n is a, c, g, or t
  misc_feature (547)..(547): n is a, c, g, or t
  misc_feature (555)..(555): n is a, c, g, or t
  misc_feature (558)..(558): n is a, c, g, or t
  misc_feature (561)..(561): n is a, c, g, or t
  misc_feature (568)..(568): n is a, c, g, or t
  misc_feature (570)..(570): n is a, c, g, or t
  misc_feature (578)..(578): n is a, c, g, or t
  misc_feature (637)..(637): n is a, c, g, or t
  misc_feature (720)..(720): n is a, c, g, or t
  misc_feature (759)..(759): n is a, c, g, or t
ggcggcggcggcggcgacacgtgcgagccatggtcgcgctggagaaccccgagtgcggcccggagcggcggngggcaccccgggcgggcggcggctgctgccccttcccagctgcctgcctgccctagccagctcccaggtgangagactctcggcttccaggcggaaacagcacttcatcaaccaggcagtgcggaactcanacctcgtgcccanggccaaggggcggaanancctccagcgccttgagaatacccantacctcctgaccctgctgganananacgggggcctgcctggcctggaggatggggacttggcaccccctgcatcancaggcatctttgncgaggcctgcaacaacgccacctatgtggaggtctggaacgatttcatnaaccgctccggggangagcaggagcgggttcttcgctacctggaggatganggcaggagcaaggagcggaggangggccctggncgtngggaggaccggagananaggaccccgcctatacaccccgngantgcttccngcgcatcancnggcgtctncangcngtcctcnancgcaccgnatccccatggaaacgctggagacctgggaggagcggctgcttcggttcttctccgtgtncccccaggccgtgtacacagcaatgctagacaacagcttcgagaggcttctgctgcacgctgtctgccagtacatggacctcntctcggcagtgctgacctggaggggaagcggcagatganggtcagtaatcggcacctggatttcctgtccgcggggctgctcctgtccgcctactggagcaagcacagctgattgcggccccg

SEQ ID NO: 512000 - DNA, 416 bp, Homo sapiens
  misc_feature (412)..(412): n is a, c, g, or t
agttggtcgcttccctgcgccgtgagcagtaaccaacatgtcagggtgggagtcatattacataaccgagggcgatgaagaagcagacgaagaacacgaagagaaccttgaagcaagtggagactatgaatattcatgaagagatagattgattttttaggttgatgccttcaatgctatactggaatctcatagtgaacatgagttgacaccttttgacatgagcatccagtgtatacagagtgtgtacatcagtgagatcatacgcagtgatcgagatctcttggctgctgtgatatatggtaccgagatagacatatagtctgtgagtcgtaataatatttacgtcttacatgagctggataatccaggtgcacacgaattctatagctcgaccagattcgtgccacanggct

SEQ ID NO: 512001 - DNA, 344 bp, Homo sapiens
aactctagagtttacggctatacattatcacgctggcataacctgtagtcccagctatttggaaggctgaggcaggagaatcgcttgaacctaggaggcagaggttacagtgagctgagatcgcgcactgcactgcagcctgggcaacagtgaggccctgtcttaaaaaaaaaaaaaagagttaaggaatgagctataaacattgacacagagccctgagaagattcttccaacactgatttaaagaactgggttacagttgtttatcagtgaccaaacgagactttaagggtcttgggaaaggtatcccggctggtggggggggtgacgataatgtgatagcg

SEQ ID NO: 512002 - DNA, 312 bp, Homo sapiens
  misc_feature (208)..(208): n is a, c, g, or t
  misc_feature (256)..(256): n is a, c, g, or t
  misc_feature (273)..(273): n is a, c, g, or t
tttttagagatgatagggtctcactctgttccctagcctggagtgcagtggcaccatcatagctcactgcagccttgaacttctgagcagtcaatcctcttgcttcagcctcctgagtagctgggactacaggcacgtgccaacatgcccagctgatttttttaaaaatttgtagagatgggttcttgctatgttgttcaggcttgtntcaaactcctggcctaaagcgaatttcccacctgggtctaccaaagtnttaggattacaggagtnagcatgcacccagccaatactgactaattttaaaacctg

SEQ ID NO: 512003 - DNA, 173 bp, Homo sapiens
aatcccccctttctttagtaactccacagtttaacaagtctgagccttgactaattgggtaaataatacaaaacaaaaaaggaggttaccctcaataaaattggcccattaaatggtaaaataattgcctaagtcctgccattctggaccaaccattaaaaatccctttacga

SEQ ID NO: 512004 - DNA, 874 bp, Homo sapiens
gaggcggaggtgcagtgagccgagatcgcaccatggcactccagtctggcaacagagtgagattccgtctcaaaaaaaaaaagaaagggaaaaaaaatagctttatacctcttcctggtctcaaccgccatgaaatttctgaacactccaaattcagtggaataatccaagaacaagaatttatacgtctacagaatacattgtccttcttatagtaatagtatactttaaaaagcctcagggtatattatcttctaaacagctacaattcagggcagctacattaaccaactatgttctctagctggagaacaactaggcctatttcacggctgtgtagcctcagggcctaacatgggtgccaaagtaaattattcgtagaattacactgaatgtgtaaaaaaccattcgtttttgtttacaatttgccaaaaattctcaaagggctctgtattgatgtaatccttgaaataataatttaatttgattctcagttatggactgctgggtgtgacttagtacatatgtactcaattattataaaaaactcaaatatttggtttggattttacacaaattcctttccctcttctacaagttacattttttacaaatcatggggttatctcctacataggttatatttaatggttctagaaacatgttcagatatttgtgctaataggatattggcttaatttccccacatttcttatttaagatattctggagagattggagggaggacttaacttggattaaatggtggggggcaagttttatggggccaagggaggagatttgacaggggaagggtccacaagaagagggttaaaaaaagggggcgaaaaaaatgcaagacggcgagattata

SEQ ID NO: 512005 - DNA, 154 bp, Homo sapiens
acaggccagcccagctccacgatgacggaacaaggttctgtcacacagccaccaggccggaagttgagagaaaacccaagatcactgcctcccgcaaactcaagctgaagagcctgatgctggccaaggcaaggaatgcagggagcaggagcac

SEQ ID NO: 512006 - DNA, 860 bp, Homo sapiens
ttctagatgctgtgagagacagtaaggaacatatatcgctcagttgcagtaccatttgagaagagctccaccagcagaccgtgatgcctatggaacacacacagcatgaaactttttaggtctcgaaagaaatctttgacattcttcttggagttttccctagtttacttggggtagatgttgagtacgtctggttacgcttattactcaactggcaaaagaactgtcgaaacaaaggtgtacttaaaactcaagcagaaagatactaactgaggctgtcaaacaaagtttctggaagaaaacgaaaaactagaaaggattttagaaagagccatggtgaacagatgaagaagtgtgttttggaagcagaaaataaagaagtagtagaagattccaggagaaagtgaaaactgaattaaggaagacttcagatgccctttctattggcacagaaatgatgtgatggaaatgaaagatgcggcagagagacttgcgaaagagtatgatcaatcgtgaaagaacattctgaacgtcaggatcgtgtagaaatgaggcagcacgaagagactgtgaatttattatagaaacttgcagtatactgctgtccaaaatgatcagtgtgtcatgttaggctctagaaatttacgttcagaaaaaatggcgctatgaccggtcgtacttattgtgaatgcgcgcctaggtggtattggatgggttatcaacatattcgctggtggtgccggtattttgaaggctggatcaagtggtaaaaaaatagggtgttagccaattgccttggagggagggcaacggggggcaccacacgggtttaaacaaacaaaaaaggttggggtccaaaa

SEQ ID NO: 512007 - DNA, 195 bp, Homo sapiens
ctgatggtttcagcctaaacagaagtctctgtcagatgtttctttcatagggccattgtgggcaggaatttaccacccactgacaacagtaactggtttggttgattgtacaaagggaggtcctgtgatacttttgcaacatctttatatgttgtgaccactccctcacccagccatggctgctactgctgatgg

SEQ ID NO: 512008 - DNA, 395 bp, Homo sapiens
ctccgctgctcgggccctcctggggagcccccgctccagggctcgctccaggaccttcttcacaagatgacttgctcgctgttacctgcttccccagtcttttctgaaaaactacaaattagggtgggaaaagctctgtatccccccccctcctaccagctctcaggaggtttgttgttttgcctgttagttctgaggcccaggaagctcttgggggcttgggccccccctctcaaatgtagtctttattctgagattttgaagctggaacctctttaaattttcagaattcttttttttaataggtcctcccgccccaaatgtcagctgttcttagcaaatatgatgatttgggtttgctgttggatttaattctgcaggtgttcaagtcttaa

SEQ ID NO: 512009 - DNA, 140 bp, Homo sapiens
ctctgacggccccccacagaggaggcagtgggaggcagaggaggaggaagaggaggatgaagaggcctgaggaggagcgcctggctctggaatgggccctgtggcgcggacgaggacttcctgctggagcacatccgcat

SEQ ID NO: 512010 - DNA, 125 bp, Homo sapiens
cggacccgacttgcttccatcaggatttctatacattgacctcttgttgggtataagacagcagttcaatgagtgtacacaaatgacgctggtttgatgtgagagctgatgggagcacagactgg

SEQ ID NO: 512011 - DNA, 147 bp, Homo sapiens
  misc_feature (54)..(54): n is a, c, g, or t
  misc_feature (70)..(70): n is a, c, g, or t
gcacgattcacccagacagctctgtggaggcagggtctgagcctcgccatgggncccgcactgcctaggntgtttgtgatgtgatctcggctcaccgcaacccccgtcatcctgggttcgagcgattctcctgcctcagccttcccc

SEQ ID NO: 512012 - DNA, 144 bp, Homo sapiens
tgacaggtagatagagtgatgcagcttctccttggtggaaggtgtgaagtgaccttccctggattaccagcactgttaaaacccacacattctgcttctgcttacctggccactcctcttttcctcttctctcagcttctccac

SEQ ID NO: 512013 - DNA, 545 bp, Homo sapiens
cactgtaatggaaagaacatggaattttggaaccaagtagacctggatttgaattctagctccttgcctgtagtgtatggccctgaacaagtcacttagtatttctgagtgttgatatctttattttttttggtatcttttttataaagtggagataacactttataccttgagaatattgagtaagatgatctcaataaactgtaaaaaaattcaaagtcatagggatggacccaggttgaggggaaagatgagagtttacaagtctaattttttatttcaaaaatatgttcccccactggtactcagaggcctcagatctaggcacccttcccatccgacactccacaccccagaatgcttctgaatgagcagccaccctggaacacctaggactttaacttttggatcagacacagctaggttggaattctaccattgcctctcttgtattgacttgggaaagttattagatttatctgagctttggtttcttcaactggaaaataccctaacaaagagttgtgttaggattcaacaataag

SEQ ID NO: 512014 - DNA, 117 bp, Homo sapiens
  misc_feature (7)..(8): n is a, c, g, or t
ctctgannttgagttgcagcaagattaggatttgagtaaatgtataatacacgcatatgacatgaaatgcacaatagcatgagcttttatcttataatataaattattaatatacta

SEQ ID NO: 512015 - DNA, 134 bp, Homo sapiens
ttcaagcggagatgctggggaggatgaagatgaggctggtggctgagtgtggacccgatcactctaaagatatcccggaatggttggcacacagattacaaggacattgaccaaaacaagcaggatcagagcta

SEQ ID NO: 512016 - DNA, 217 bp, Homo sapiens
actagtgctggcctccagccttagtttttgaaaaaataggaaatgcattggtgccaaatttagattttgatcactctctccatgcaatagcccttttatgggccctgggcgacagctttattgagtgtctctctgttaatctgcaatatcccatctggtacggtttctacaagacttacccaactccttcccactcagagaaccaaatagcctgagc

SEQ ID NO: 512017 - DNA, 173 bp, Homo sapiens
ctcactgtgtccctgtcgccccgcacccccaacccctacacatcattctcgcagtatgattttctaaagtaagtaagtaccatcatgacaggcaggcctgccgggttatgttttttccgcatcttaaggccatcgtatctccttgctcgaccagaaccatggttgcgttgtgc

SEQ ID NO: 512018 - DNA, 466 bp, Homo sapiens
atcgccgcccagcttatagcgcacgcgtctatttacatagggataatgtctgtgtgtaactgacgcgatcctcagttgagtaggctgtttcagcgctacgagggtgttcatttttaactcggcgcatatcacgtatgctcactctgtgtgcaatgagctgttgctctttgcagctaacagtcaactttacgacgggattaacacggttcggtgggcgaatttaaagttgaactaccattctatcttggacaaccagctatacatccaggactcgcgtacgtttcgtcgcctctacctattaatcttcccactattttgctacatagacgggtgtgctctttaagctgttctaacgtagctcgtctggtttcgcgggtcttagctctgtctcgcattgcaacgtaatttctagttcattcattatgcagaaggtatagggggtagtccttgctatatcatgcttggt

SEQ ID NO: 512019 - DNA, 426 bp, Homo sapiens
acatcctgaaatagtgtattctctcaagggcagatctgagctacactgatctcctgaaacatttttaaaatgcagagatgtgggccgggcgcggtggctcacgcctgtaatcccagcactttggatcaaaaactagaaatgattaggcttagtgaggaaggcatgtcaaaagctgagataggctgaaagctgagacagtcctctagcaccagtttagccaagctgtgaatacaaagaaaaagctcttgaaagacattacaagtgttactgcagtgaacacacaactgataagaaactggaacaaccatatcactgatatggagacagttctacctggttcggatagaaaatcaacttgtacacaacatacccttaagccaaagcctaatctagagcaaggccctaactctctgcaatactatgaag

SEQ ID NO: 512020 - DNA, 127 bp, Homo sapiens
gttgtaggacatcttctggtgggcctgtgcggaaactcgaggataaatcagtgagctgcatcactttaaaggcatggcctgtctcctcacttgagtgctatgtccactcgaccaaagccctgttctg

SEQ ID NO: 512021 - DNA, 175 bp, Homo sapiens
acaggtatcatgacaaagtaaacggtgaatggttgtatttagaagatatctatttgctattttctcaaatgatcgtcattttatgatgggcaagttcatgctaatcaaagagttaagtgggaatgcaagtcgatgcatcagccatccaagaatacacgccagacaagaaccacag

SEQ ID NO: 512022 - DNA, 739 bp, Homo sapiens
  misc_feature (637)..(637): n is a, c, g, or t
  misc_feature (640)..(640): n is a, c, g, or t
  misc_feature (715)..(715): n is a, c, g, or t
cttcaagtgagacaccttccttgccaagggaaccagcaagcagactgagtatctcagccacacaggtagttcagtgcttcagggatgaatccagaggttaactactgaatcagtatagaaagtggacgtggcttggcttgttagatcgtttctgtatccgggaaaggcgatgtgggcagagctggagctgcccccccagaggggccagttgttggagacagcagtgatgtggtatgatgacaggtatgctggcgagtcctccttggagccccgttctgcccttatttccaaagcacttggcttggagcgaggggcctggagtctacactgcaggcctctctagcccttgcccaagctaaggtcccattgaaaccgggagcatctgggcgaacggggactccaagggacgggtgatagggttctttgttgagaagcagccgagcctgatgtttaagagtgaatcagcctctgtctctggtgagctgtgtgactcacggcagtgccctcgcctctctgctgagtgtctttacctcgctcgcgggttgtgggagggcttggaccagcacctggtgtgctcttacgctgtttgctgcttccctggggaggatggcacttccctgcccatcaacacgctcangangattctgtcatgctttttcatttggtccaaatgtctaaaggggaaggagagaagtcccccccagctgcttgcaanctggggtgctgcaccgggcgtcca

SEQ ID NO: 512023 - DNA, 133 bp, Homo sapiens
gactctagagcgatccctccttctggccacgctccttctggccacgctccttctggccacgttccttctggccacgctccttctggccacgcggatgatggagggaatagaagagtgtaagaggagtgtaaca

SEQ ID NO: 512024 - DNA, 82 bp, Homo sapiens
tgggctgtacgctccggattacgggatcagccgcgcccaggcagcgtgagccggcgaggccctgtgccaacagcgcgtcatg

SEQ ID NO: 512025 - DNA, 1339 bp, Homo sapiens
ccttcctgggcgtcgcatggtgtcggggtgcgtcgctcttctgctttttgtggctcacgtgcttttttgctctcttctctgtgttgcttcatcatttcttgcctcctcatgggtggcgtgttgtggtgtcgcggtgtggcgggtatgttagatttcgtcctgtgctgctcgctcctttgttcgtggcttagtgttgtgatgtttttgtttctctctttcttcttcttttttgatctgtttttctcgcacgggggtccctcggctggtgttctctcattttctttgctttatatttgtgttctgtcctctcccgttagatgatgttcccctacgatgtcttggtggtgagttacctcctcattactcccctcgtgtgatggtgtgttggggtttgtttgatatacatcaacgttattgtttctctctccctccgatcgtggggagctagatagtgacttcatttttgtgtgggggacgaaatttgttcaccccgcttgtgtgtggtgggagacatttttttttgtctgggcccccgctctttttggggtggcccccccctgtgtttttttggggtattcacccccgctgtgttgtgcccttctacaggggatattctttgtgtttgccaactcctgttgcccatccccccacgggtttttgttgtcacacaactcgcgatcgcgggggtgtcatcttcttggtgccacactgtggtggtaccccacacatgggggtgtcgccctcgtgtgtagagtgttgccccccccgcgttgagattcttcttgtagcccccccctctcgctttctctgcgcgcgctttgggggcacacagggtcacacgcacatctctctcgtttctctgggcgctatctctgtggtgcgccggtcggtgtgtgtccccaaccttctcctcgcacactcaccgctggggttttgtggggggttcccacaacaagagggacacaatatttggccacaccgcgctctctccagaatatagtgataacttcccgggttctcgaagaaatgggcgccacacacacacggagaaaaaggttgggacacctcgggtgcctctttgtccacccctctggcttaccctgctgggccccttctgggagactcgtgcgcctcggaactctggagacccctctggaatattggctttttacaccacgcgggttttaaaccacctcttgaactcggaaaaaccaccctcccccctcgccctttttcacactcccaattaggggacccccaggtcccacaggagaaaaacccccttccaaagtccccaatttgggaggggactttagaccctttcatgcccaaaggggaa

SEQ ID NO: 512026 - DNA, 886 bp, Homo sapiens
caagtaccccacttcccagccatgccggaggtttcctggatgggaccactcctgtccagaggctgctcccagcccagcccagcattcctgggctctggccgggctatggcttcttgtttgcaacagggctgttcccagagctcccagttggtagccggaaggcccttgccccagcctgtgacaacatcctcccgggctgcctgagggtcgtcctcctccactgctttctggcctccatgtttctgattagaaatctggtgggaacgttatggaggatcctttgttcaggatatgttgctttatttttttttttctttagacagggtctcactctgttgcccaggccggagtgcagtggcaggatcatggctcactgcagtctcgacatcaagtggaccccctgcctcccaagtagctgggactacaggcaccagccaacgctaagttcttgtactatgtattatatattattatatggggagaaaagcggaaatttcccctcatgtgttggcccagggcgaggagggccaccaccactcaatggggcaaagagagtgcacaaccggggaatcacaaacaaccgttaacgatctagaggctataagaccacaaacacccccggagcgaccaaggcgccaaccagtgaaaaaaacggggagaaaaaacaaggggcaccccccgaacaaacaaaacccacagcacaaaaaatgaaggggcaaattgaaaaaagaaacaaaagagcggggatcaaccccaaatggtaggcccaagaacgagaatcaccaaaaaaagtggagaaccctcgaggggaaacccaccccacatggagagccccaaaagaggcgggagaacaaaagagagataagaccaaacacaggccaagcaa

SEQ ID NO: 512027 - DNA, 272 bp, Homo sapiens
ttctatctaactgtatgttagtacctattacctgacctctcttaatctaccctccctcaccacaatacaccctctccaggagggtacctatccttctcctctttacctctattaaataaactatttttggcttgacatatgatgtgagaacatgcaatatgtttctttctgtacttggcttgttacacttaacctaatgatctctagttccacccattttgctgctaaatgacataatttcattcttattttttaatgtctaaatgcaatca

SEQ ID NO: 512028 - DNA, 221 bp, Homo sapiens
cccgggaaccccctggggccagggcgggggggggaaatttttggggggggttcaatgcccccctgggggttgcccccccccccgggccaaaaaccccccctttgggggggggggggggggctgggggggttccccccccagggggtttttttgggcccccccccctggtttttttttaccccccctttgttttttaaatggaaaagtttttggggggggta

SEQ ID NO: 512029 - DNA, 165 bp, Homo sapiens
  misc_feature (57)..(57): n is a, c, g, or t
  misc_feature (106)..(106): n is a, c, g, or t
cagccttgacaattataaagcaccaggacctcagtaacatccagtttttaacaaacncggaatacatgcctaattcaatgctactccttcttcaggaccaggctgnaagtgatactattaataatattgctttgatgatatgatgatacatatggaagaagtctc

SEQ ID NO: 512030 - DNA, 739 bp, Homo sapiens
taggtgtctcaggcccctgggccccgcagatggccatttccggtgcctgcccagtggccactcttctggaaggggcttggaaaagaggaaggaggcccagctgtgggggttgagggtagagggtggaccagaggctgaggactgagccacccaaggaggtggggactgctcggctccaccgctgttccgcatgcagccccagccactgccccaaccacaccacagatagccgttggctagacagaccacattagcaaagtcgcagctatcatcgagagagtcactatcagatgtttccacatgctcgccttggttatgggagcagggagggggaagtcctagcccagatggaccaaggacgggcctgaaaggcacatgggggaaagggagcacacggggaggacgtaggggacccatgggtggggcctccaggtgcagcttgtggatggaagacagggatggcctgtgcttcagccgacacaggatggcacaggccagagctgcagcatggaggctcttttcctggtcattgggtggaggctgagtgccacatgtacccacattaaaaaggggggtccagggctgtgtgagtgtagtctatcatgagtctagggctcggggtagtagggtcaggactgtcccttcagcagtcgcttctcacacctgagccaacagtcattggccttcctgattcaactccatcctagattgagctaagaccacctaagacggacggggg

SEQ ID NO: 512031 - DNA, 180 bp, Homo sapiens
cctgcatcatcttccatgacatcatcttccccttctgtgttactgtatcattctcatctctgagattagacatccttcagacccagagaattcggtcaggcataccttgtgttatttgttgccggttgataaacaatacctctcctctctccgtggacatgaatgtagaaagtcccagga

SEQ ID NO: 512032 - DNA, 307 bp, Homo sapiens
ctgagatcgcccaacacattttctggtgatacccaagaaacatatatcttttatttctgcggcagaagatgatggggaaagttttcttggacacttaatgattctcgccaagaaatgtgctgctgaactgggcctgaatatggggtatcgaatggtggttaatgaaggttcagatagtgagcagtctatctatcacgatcatctccatgcccttggaggccggcaaatgcagtggcctcctggctaagcacgtgttgtatacaacatcatgagttatccacaacaccacattgacagaaatgacaac

SEQ ID NO: 512033 - DNA, 348 bp, Homo sapiens
tcgctgccttaataagtgaaaaattggcaactctccgaaatcaaggcaagaggaataaggtatggactaagcctagagttgactttggcaaaagttggcaaaagttagcaaaatctatttttcctatacattacatgcatccagagacaacaaaatgaggcatcaaaaaatagtaagatagctgaaaattctactttgggaaataggacaaatcaaaatgtagaatagacactgaaatgattttaaaaatatggacaagtaaacccaaataaaaaaacatagtaactgtaaaacataaaaaaaccagtataaaataaaaatagctgatatcaaaaataaaacaaaaaa

SEQ ID NO: 512034 - DNA, 402 bp, Homo sapiens
caatgtatttgtatgcttgcactgctggttgtgtatcatcaatatgtactttttatccaatgtctcaactctaatttcatcttagttagacttgctcacgttcagtttgttcagttgtgtgttgacttactatgttttgaaagtggtgacttctaccgaatgagtggaagttcccattgtcaaaaaaaatgggggcctgcttgcagtattcatgttgaccacagagtaaaagtgtattctgtaaagactccccgcccatatttcctgtttatgttaaaagacgttgtttgtagtttttatttagggttaattgtatatttatatcatgtgctttatcgttttcccctcatgtatccaagtaatttttatttacatccccctaaataaatgttgtcctctttg

SEQ ID NO: 512035 - DNA, 893 bp, Homo sapiens
  misc_feature (251)..(251): n is a, c, g, or t
  misc_feature (265)..(265): n is a, c, g, or t
  misc_feature (296)..(296): n is a, c, g, or t
  misc_feature (318)..(318): n is a, c, g, or t
  misc_feature (335)..(335): n is a, c, g, or t
  misc_feature (430)..(430): n is a, c, g, or t
  misc_feature (497)..(497): n is a, c, g, or t
  misc_feature (500)..(500): n is a, c, g, or t
  misc_feature (646)..(646): n is a, c, g, or t
  misc_feature (770)..(770): n is a, c, g, or t
  misc_feature (782)..(782): n is a, c, g, or t
  misc_feature (785)..(787): n is a, c, g, or t
  misc_feature (791)..(791): n is a, c, g, or t
  misc_feature (799)..(799): n is a, c, g, or t
  misc_feature (805)..(805): n is a, c, g, or t
  misc_feature (810)..(810): n is a, c, g, or t
  misc_feature (818)..(819): n is a, c, g, or t
  misc_feature (822)..(823): n is a, c, g, or t
  misc_feature (829)..(829): n is a, c, g, or t
  misc_feature (831)..(832): n is a, c, g, or t
  misc_feature (837)..(837): n is a, c, g, or t
  misc_feature (839)..(839): n is a, c, g, or t
cagctgactgctccaaatggagacctgggcatggccaacgaacaccatttcgaatggaatcaaagaatcacttggcctttcctcatgacaagagatggagacaaacggtctttcattagtttattgtgtgggttctttttttttttaaatgaaaagtatagtatgtggcactttttaaagaacaaaggaaatagtttggtatgagtactttaatggtgactcttaggatctttcaggtaaatgatgctctngcactagtgaaatngtctaaagaaactaaagggcagtcatgcccngttggcagtaatttttcttttnatcatttggttggtccnggctaaactgggagttggagtatagtaaattatgatccttaaatattggagagtcaggatgaagcagatctgctgtagacttttcagatgaaatngttcattctcgtaacctccatatttcaggattttggaagctgtggaccttttcatgtggattatttnaantggtgtgaacatagtataacaaatcatgggtgtccattattggcttggctgagctcagatcaaaatgtttgaagaagggaactttattttgcaagttacgtacagttttatgcttgagatatttcaccatgttctgtttttgggancttctacaggttgatgcctcctggttttatagcaggttagtgggggagcacttgaaagagcgtgtgtacatgtatttttctcctagggcaacatttggatgcaacggtgttttttaaatataantatttactggcnttnnnccangtggcggnaggaantcaantggggggnnccnnaaaagngnncggangntttccctctgagtataaaaaattggggggggaagaggcaggtaactctaaagag

SEQ ID NO: 512036 - DNA, 124 bp, Homo sapiens
  misc_feature (21)..(21): n is a, c, g, or t
  misc_feature (86)..(86): n is a, c, g, or t
  misc_feature (107)..(107): n is a, c, g, or t
  misc_feature (117)..(117): n is a, c, g, or t
tgacaggatgcccagggattnaaggatgtcctcctgacagcatttgcctaccgccaaggtctccaggagctgatcacagggaaccnagacaaggcactaagcagccntcatgaagcnggctcag

SEQ ID NO: 512037 - DNA, 187 bp, Homo sapiens
tagcgctagcccaagacaatgtcactagacctgctaggttcctatcagagaggttattctcatatatattcaagttccttactagccactacacttttaggtaacagatagattacagtttaatgaagggatgctgaagacaacaggtttttgtttattgaagctcctctgaagatctcacggagag

SEQ ID NO: 512038 - DNA, 173 bp, Homo sapiens
tctcaaaagttacaaggaagttcagttaaagattaacagttaaagatcaaggctgaataacactggggacaggggccaaacagaatatctgtggtcagtcaaacacctgggccccggctccagggccaagaacagatggttctcagataaagccggacccaggcacagacaca

SEQ ID NO: 512039 - DNA, 566 bp, Homo sapiens
cgacctccgagggtaaaccgacgcccaggataataagcccggcggagataaccctaagcttgagcatgctccacacagcagctatactaagtaccctagtgtgagccctggcagggttgctacacagcccatctactggatttagtaccatagtcccagcacttggcccagggtcctagactgctgggtaggtcctcagaggtatctgaagtcatgtctacattgatacaaagaaacgtatggctcatctgtaacaatacgtagagaaacacaattaagaacaataaggatcacagaactcgaatggatcattataacttcaagactcagtttaagttaccaagaaatgcactgtagcccttttctcacttttatattcagatcagggctaaccctaacatgttcttaaatgaccacttatggtcatttaagtggtcaatggaaatattgcagcagagaactgctgttttgtttaaacgtactagccattagcattaaaagagtctaatgaactcatctaacacctggacacatttttaaaggtcattatttaccatatgtaaatt

SEQ ID NO: 512040 - DNA, 283 bp, Homo sapiens
atgacctgtcagtcaggtctgagattctttcttcggcttgatctactctaataggtagcagctattcaaatgtattttgtatttcattcaataaatctttcagctccagaatctctgttcagttcctttttttttaaagagagagagtctcactctgttacccaggcgggagtggtaggtggcatgatcatagcgtcacggcagcctcaaaggtccgtgggcgtcaggcagtcttccggtttcagccttccaagtagctgggataacaggaactgaaagtgag

SEQ ID NO: 512041 - DNA, 204 bp, Homo sapiens
ctgtcttagaggatccgaggagatagcaggagacaactcggggctgctgcagactgcaggcatgggaggaggagcctcctagaggatttgcaaagcaaacccatccctgccagaccaggaaacagccctcctaccgtctcagagaaacagacctcagccctaatgatcactcaaatccgagtcaatccctctatttaaaaaaag

SEQ ID NO: 512042 - DNA, 331 bp, Homo sapiens
  misc_feature (100)..(100): n is a, c, g, or t
  misc_feature (153)..(153): n is a, c, g, or t
  misc_feature (184)..(184): n is a, c, g, or t
  misc_feature (229)..(229): n is a, c, g, or t
  misc_feature (237)..(237): n is a, c, g, or t
  misc_feature (239)..(239): n is a, c, g, or t
aaggaaggttttcttctggcggtgacccagggcagagagatccaggctcagaattttttttccggcttcaccctgatgaagttgaggcactcctccgctntgggtggggccagcctaggggccaggcacatcgggcacctcctccccatggantaaagggccaatgccattgccttctattccnacaccttttcctagggggctggtcccggctccacccccaaaaagntcagtggncnctgggtttgaaaggaaggagtcttttgcttcctttctcctttttacaaaaacaaacagagaagaaaataaaggccctttatccaaaaaaaaa

SEQ ID NO: 512043 - DNA, 816 bp, Homo sapiens
cctcggggggtctatcttccggcatacttgcgcacccttgggggttcttcgttgggccattccccccgcctgtgtttattccgggggcgcgtccccctccaagaacatccggcccgaacgttgatgtcgcgttgtccatgtcgcagttctctccccgccgctcccatgacacgtccttgtttgtagtaccaaaccagttgctttgcgcggtcttttaccccagtgtgaccaaataggactcgggtgatgttccccttaatgttctttaaaagtccccccccgtataattctttacatcccccacggaagaatagatttttgtcctttttgaatacaaactcctacctatcctaagtctactaattgtgtaataaatattacccccctcttcactttgctgtgtcaatacacctacaaaagaactcccgcacccgtcgttttttgtaacctcttctcacccccctgccaaggtaacccccctctgttaattccatttctttgggtctttcgccaagaagggcgaacccaccaggtcgtcctgaaaccaggtgggaggcctaatcttttagaataatataaatagtgggaaacaatacaagatcttgcgtgtgcctttcttaacattctggtggcataaatggtctctcgcccctctcctcgctgtcggtggctgtaataagagggatcaccacgagcaccctattgacccagcgcccccccttctgggtcaaaataccttgggtttacccacaaccccccacacagcgtgcccctcggtttgccccaataaaccccacaaacccccccaacataacg

SEQ ID NO: 512044 - DNA, 686 bp, Homo sapiens
tcggcgcggccgctgcatccgtggaggaacgcgccgacgagaccaacatcatgcctgggcacttacagagaaggcttcgagctgcgtggtcaccaaccgattcgaccagttatttgacgacgaatcggaccccattcagaggtgcatgaaggcagacagagaacaagaaaaaagaagccggctggtgaggcggcgttgggggccctgagggccaaagagcgcagactcatggccgcggaccagaccaacatccaacagcggacaggcaaacagcatgcgcaaggagtcccagaaagaccgcaagaacccgcatgccccccagcgttggctgtggttgacaagaaagaggagacagcagccgcccgtggacgcttaagaaagaaggaatcagacgagttggaagaagacctgatcaaacaaactatcagggatgaagggaaaatacattgatagaagaccagaaaggcgacacctcgatgaacgaagattcgaaaaagccacttgaagaacagggtgaaggaggcgaataaaacagttagataagacgattattgaccgacctattcaaggtcgatggtgggtcttggaagaggtacgagggggccgtggacgtggaatgagacagaggagatggataagatcaacgaggcaaaagtgatatgataggcatagatgaagtgatagac

SEQ ID NO: 512045 - DNA, 162 bp, Homo sapiens
tctagcacacagctgcgctcacaaaaactgcgcgacttgttagaactaattgagtggagcctgcaggtgaggggagggaggggctgcaggtcaggtaagatctggaagacaacgcacacttgaagggcaggggactctaagcagggatttacattgaaagga

SEQ ID NO: 512046 - DNA, 1009 bp, Homo sapiens
  misc_feature (11)..(11): n is a, c, g, or t
  misc_feature (13)..(13): n is a, c, g, or t
  misc_feature (168)..(168): n is a, c, g, or t
  misc_feature (183)..(183): n is a, c, g, or t
  misc_feature (214)..(214): n is a, c, g, or t
  misc_feature (219)..(219): n is a, c, g, or t
  misc_feature (230)..(230): n is a, c, g, or t
  misc_feature (233)..(233): n is a, c, g, or t
  misc_feature (235)..(235): n is a, c, g, or t
  misc_feature (237)..(237): n is a, c, g, or t
  misc_feature (239)..(239): n is a, c, g, or t
  misc_feature (250)..(250): n is a, c, g, or t
  misc_feature (252)..(252): n is a, c, g, or t
  misc_feature (262)..(262): n is a, c, g, or t
  misc_feature (280)..(280): n is a, c, g, or t
  misc_feature (314)..(314): n is a, c, g, or t
  misc_feature (351)..(351): n is a, c, g, or t
  misc_feature (380)..(380): n is a, c, g, or t
  misc_feature (402)..(402): n is a, c, g, or t
  misc_feature (455)..(455): n is a, c, g, or t
  misc_feature (465)..(465): n is a, c, g, or t
  misc_feature (504)..(504): n is a, c, g, or t
  misc_feature (513)..(513): n is a, c, g, or t
  misc_feature (525)..(525): n is a, c, g, or t
  misc_feature (546)..(546): n is a, c, g, or t
  misc_feature (572)..(572): n is a, c, g, or t
  misc_feature (577)..(577): n is a, c, g, or t
  misc_feature (588)..(588): n is a, c, g, or t
  misc_feature (676)..(676): n is a, c, g, or t
  misc_feature (767)..(767): n is a, c, g, or t
  misc_feature (808)..(808): n is a, c, g, or t
  misc_feature (817)..(817): n is a, c, g, or t
  misc_feature (821)..(821): n is a, c, g, or t
  misc_feature (832)..(832): n is a, c, g, or t
  misc_feature (856)..(856): n is a, c, g, or t
  misc_feature (906)..(906): n is a, c, g, or t
  misc_feature (941)..(941): n is a, c, g, or t
  misc_feature (946)..(946): n is a, c, g, or t
  misc_feature (949)..(949): n is a, c, g, or t
  misc_feature (1008)..(1008): n is a, c, g, or t
ctgcattgttntnagttcggaagctggtgagagctcggcatggcggtccccgctgcagccatcgcgggccctcggcgttggagccacgaccggccaccgcgctcagatggccccgtcggtgctcaatcaacagcggcctcgtcagcgctactgtagcttgggatgcangaactggttccgggngccacagcaagacgcgctgagttcctgcgcncacancgcaagagatncantngntngcctggatttncnaagggcgttnctagcacatacgagggtncttcgacaagacggccaatcgtcttcttactagnagataggcactctgcattaatctaaagtaaaacaatntatctgggggacatgggggaatatatgtnggaccagctgttgtttgcatcncaagataatccctagacctatattagttacgggcgtctgggagataaaaccantccgcatctngggattgtgagggactacaaaaatagcattgccactgtngaacactanaagggggagaanatttaatatctgcatggagtnctgatggggcagaccatttgctgtangcaanaaggatgatgnggtgacctttattgatgccaagacacaccgttccaaagcagaagagcagttcaagttcgaggtcaacgaaatctcctggaacaatganaataatatgttcttcctgacaaatggcaatggttgtatcaacatcctcagctacccagaactgaagcctgtgcagtccatcaacgcccatncttccaactgcatctgtatcaagtttgaccccatggggaantactttgcnacangaagtgcagangctttggtcaacctctgggatgtngatgagtcagtgtgtgttcggtgcttttccaggctggattggcctgtaanaacctcagtttcagccatgatggggaaatgctggngtcanatncggaagatcattttattgacattgctgaagtggagacaggggacaactatggggagtana

SEQ ID NO: 512047 - DNA, 981 bp, Homo sapiens
  misc_feature (165)..(165): n is a, c, g, or t
cccacgcgtccggtttcaataccaaagtgtgtcttcttctttttttttttcttaaaaaggccggtttcataggaccttctgaaaggatttccagaatattttatcgggctccaaaattaaagcacattagcaacttcacgcttcaaccccgtcatcatctccagngaaagtttcgtgccaaagcgggtggcattagccaacgtttggacttggggttctgcgccaattgggttttagtgtcccttaaaccttcattgggactccttgggggtatacgtttaattctttcgtggcttcaggtgcatttacgtggtaactttttcaacatatggggtctctttcgtggtaccaattagagtattagtgtgatatagtggtggagggcaaaaaagagggtttcacgcagtgggtgggtgacgggaaaagaggaggcttagaaaatcccagttgtggcacagcccgtgggcaaggcgccagcttccccctcgagggctaagcggccacgggttcacacgaagggatccctcagaaatcaggcggccaccgtgccttccacctttcgtgcccgtggagggcaatgggcgctgtgtggtagaaacctatgggtacgcaaagtgttttagtgtttgacgttggaatacgtgtaggtgttgggtttagcaccagaagaagagaccgtggtgtcctagagagtaggccaagggtgatctgcctcttctatggggagaaattctaatgtctttcccactttctacaacaagcccaatattccctccaagttctactgggggctgagggctgtaggaattattgaaagcttctggctcacttagtaatcgtcgggggcccaggacccaggcaataactctaaatacacgggcctaaaggtaatagcctccgaacatctcagtgtgacaatccacaattggaaacctggacgggagcctcaaagttggatggctagttgggcatggagaagcg

SEQ ID NO: 512048 - DNA, 150 bp, Homo sapiens
ctagtctgagaagtttcaatagcaggtggagctcattgctttctccaagctgggaactgtttcgcaagataacacagagggaaagggagagccaccgggtacttgtccacccgtgcctcgctcgtgttcgtgaaattccatcccgcctcg

SEQ ID NO: 512049 - DNA, 1011 bp, Homo sapiens
gatgatatgccgagaaagtcgtacgctctttgcttcaagcatacagggcacctgtcccaaagaaagataggcgtctgttgtcgagccgggatattctcccctctctaccctgttactatgttgttctgattttcatgagactactggctgggcatgtgctggtggtctgtctctcctgggattgagccactggatttgcacgtaggatcgtatggagatagaaagcgagcaggttcttggtcgagaagcctccctctgcttttcattgtcgtttagataactggttactggcgtccttctctcaagggtatcaaggtcaaggtgatggttgctctgttctcaggagagccatcagattcccttcctgttggagaagggtctgacatggaagtcagtgttaaacgggctgatcggtggcgcatcgtggtgggcgtctgggttcagcttaatggttggaattcggttactctgcatgggtgcgacgcatacgcctggctgtggtgggtagaagcagggatagacagctggaagctcagaaacaagcgaacttgaaaaacagactctaagtaagttagaagcatattttgcgtaagataggtattttactctggaagaccaacaacttttggagatttcccttgcccctgtgggacgggccaggtccttgtattaccttccttaggtcctgcaaggtactatgtcctgtcccctgaattgcaagcggggactcagggtgacttgcacccccgcgtcagcaagggacacaagtgctccacggttgactgaggttgctggtcttgagtcccgcgctctttggcctcccttatttcaccgggccgtggagccatgactggggggcgattcttcggtccaggtttacagtggtagccaccgttcggaagacggctttgttttggaacgcccttttgtgaggggtccaggcacccggagttgggccgtttgttccgtgggggggcccggttgggccggcccgtgggcagtgattttcca

SEQ ID NO: 512050 - DNA, 105 bp, Homo sapiens
gcgggcccatttgaggcctctcggcctatggcagcagcgttggcccggacccggagcgaagagcaaaggtagccggacacgtaggaaggatctaagagcgcacct

SEQ ID NO: 512051 - DNA, 170 bp, Homo sapiens
ctgcggtcctcgacggtacctctgctctctccagccccagctgctaccggtccgtcttctccgcggatctccgcggtggtagtcgccccgttcctttttccctcacctagtgttggaaacccagttgtttctcggcctccggttacttgtggtgtgagccattacatagg

SEQ ID NO: 512052 - DNA, 429 bp, Homo sapiens
tacaatttctacacttaggaaggcctgcattacaaggcttacatctgggatccatgactagctaaacagttccctacagtgatataaactatccctaaataactagagtggctcactgtgcctaaactgtttatacaaacaatgtggtttatgctgaacacctgtgttttgtccttgcatataaagtctgtgtgtggcaaagggttaacacagcaggccgtgagactgactggtatgtgagccagcaagcagcgagaatttagggaagcaaatgaatgaaagaagaaagattcataggcctagagaggaatagaagaggtaggagaaagcagtggtcatttggacacgttcaggtgatattattaacaaagtatatgccaggaataagcaaagaaaacaatagttcttctcaaatgtgtagaaattgaa

SEQ ID NO: 512053 - DNA, 254 bp, Homo sapiens
taggcagccatggccccaattaaggcagctgctctgctcctctgaaaaaaaaaaaagagaaaaaaaaaaaaaaaaaaaaaaaaaaagaaaaaaaaaaaaaaagaaaaaaaaaaaaaaaaaagaagggggggggtaaataataaatgagggggggataatttgtaattctgatgtttttgagataaaaaataaaggtgggggggatatttattgaggaggaggggtgtgggagtaatacagaggagggggtgggg

SEQ ID NO: 512054 - DNA, 687 bp, Homo sapiens
  misc_feature (241)..(241): n is a, c, g, or t
  misc_feature (282)..(282): n is a, c, g, or t
ttcaccaaaagtaatcacccagttccttaccaaccctaagctggggccaaaaaggttacctggaaccctaccattggaatttaccagtccagtttccacagcatgcctcaaatttcgctttgagggtgtcagagttatcttgtcatgccctgactcctcaaaagtctctccgtgctcttctatgactcctggcttcagatagcttcgtgtgcaaacactggcgcatggcaatctgtggctntctctttatagaactggagtttctcgaacgagttcatgtgngtgtctgccagaggacacttcagtggggctactgctcgagactgcttaccataggagcgttgagctgctgctctaggctgcgaggtctcccgtggcttcgcagcttcagcagtcacacgctctcactgcagaacgatctggtcagcccagccctctgtcttgcagttactatgatcaaattccttcaaagggatgtccttgagccctgtcccagagatatctaagcagtttagtttcctaaaagaaaacaggtatgcaatgcctgcatctgtgatctcagggttacatgataagtctaataatgttagattctcaaggcctcttttcatcactcgaactggtgctgtcatcttccgcacttcagcatcagataaccaattatccgtcaggtgtagctgagttaca

SEQ ID NO: 512055 - DNA, 83 bp, Homo sapiens
  misc_feature (79)..(79): n is a, c, g, or t
gatttgctggagcagtacaactaggcttaatagggacatgtccctattaagctctaacgttagaagcttgaattcgagnctgg

SEQ ID NO: 512056 - DNA, 223 bp, Homo sapiens
agtgtacttcaagaggggtaatagtataaaatagctattgcagtctttatattcaatatgatgtgcctgtaaaccacggagttttccctgcttagtacaaagacattgtagataattgaatgtttgattagagaaaggtcattagtattcttgtgacacaatatggttagtctggattttagtagccttagtcgggattaactatgtgttcttgaaagaacac

SEQ ID NO: 512057 - DNA, 830 bp, Homo sapiens
  misc_feature (18)..(18): n is a, c, g, or t
  misc_feature (161)..(161): n is a, c, g, or t
  misc_feature (332)..(332): n is a, c, g, or t
tataagagactaagtccngattatagtctagtatagtaatataatagatgatgaggctccgccgttactgtgtgacagtccgagtggaactataacatgatggagtatctctgcaaggcagtgtactggacaatctctggagagtctcttgcatcgcatcnagggcctgtgtgataacatgaagcctgagagctgtgctgatcacgagttgcgtgtatctcctgaaaggtcagcagggcaaccagttcatcctgcgtgctcgccgctcgctcctcgacacgtccgtcccctggcacctgcgctatctgggtcagcccgaggtgggcgacaanagccgtcatgccctggtgcggaactgagtgtacgtggcagcctcgcacagcttgcccgacttcctcaatgagatgggcttccgcatggaccatgagttcgtggccaagggtcaggtgttccggaagggtgtgatgaaggtggtgagtgagcaaactgtcgcgtgtgctggttcctgcaaacacggataacacggagccgctctatctgtcgtatcttgttgagctgagcgttctggctcttgcgggacaggacactgtgtctgagtacatgaggagcttcgcagaacagctcaaacctctcgttcacctggagaagattgatcccaaaagactcatgtagagaacatgacctacagactgagatttttgcttcggtgaataggtgttaagactgcatttatttggaatatttttgatgattgttttctttttttgtaattgatgaaatggtaattaaaatctttaaataaaaatattcattcattcattcaaaaaaaa

SEQ ID NO: 512058 - DNA, 852 bp, Homo sapiens
cgctcggtggcggatgagcagcagagggagagccgcggcaaccccggcaagccaggtctcggcgtcgctgccacctatgacgggaagcaatatgtcggatcgccttggcaagcgccgtgtgccagcgctgccaggtccgcgttcttccccgtcgagcgcattgtcaacagcaatggggagctgtaccatgagcacgtgcttcgtgtgtgcccagtgcttccgtggccttccccgaggggcgtcttctatgagtttgaaggccggaagtactgcgtaacacgacttcctaagatgctgtttgctccgtgctgtggatcctgcggtgagtccatcattggcctgtggtcatcaaggccagtgaacgaacaagtggcacccgggctgcttcctgctgcgagcgtgtgtgatgtggagcttggctgacctgggcttcgtgaacgaatgccgtgcaggtaatctctgaccggaccttgccacaaccgtgacgaatgtgccagaggcctgcgccaaagtacatcatgccatgctggtcgccaccgtggtcatcggacgagtcagcccctcagtgtcagggagccaacgcttaccgaccttgacccagttcaactggcacccacctgtcggaaggaagcttgacacgcggatgcccggtagagcttgaacgggtgcagctctactgcctgcccgtggccaattgaccaagaactggggcagtcccccattcgtgcggggccattgccgggcgggccaattcgacgggcccgactctggtcaaatgcggctggagctaagcacactggcacagttggacgccttttggtctgtgcaaagttgtgacaacgccatacttgg

SEQ ID NO: 512059 - DNA, 243 bp, Homo sapiens
gatagaatcgagctcggtaccgcgtagatattagaagttcaagtagcagtgctgcggtgagatctcggctcactactagctccagctcccgggtgcacaccattttcctgcctcagcctcccaggtagctgggactgcaggcgcctgccatcacgcctggctaattttcgtatttttagtagagacagggcttcaccatgttggccaggatggtctcgatctcctgacctcatgatccacccg

SEQ ID NO: 512060 - DNA, 813 bp, Homo sapiens
cctgcagaataccattggagactcttgagagctcgccaagtgtgcctaacatctcgcttagaaagagtccatgttagccatcttaatgattgctctccaatagattatacacacagattctgtttgtgactcatatgttcgatgcctgtcaagttcatgtctagctgtcaatttgtgaatacggcatcgaggataaaacatctatcacctcttcaaggacccattgcctactgcggccgcttctgagtgaagtgcattcttgtgacaaacaactgagaactgtggatggactaagacttccggtgcgtggcccccttcgtgttccaaatatgcccgttcttaaccaccgtatgctcataaaacgagatgatgctatacatggactgactggtcctacaccccatcccactcctttgacataatagaggtggaggatatcgcaaactttccaatgcctctaaacaacttgctagccgccactctactgcaagaaagaccttccattaaccaagtgggaactgtacgaccaacacacccaacatttaaccacctagatgctccacatgttcttctaagccacggccctttttcggtctgtccacacatgttccaagaacgtcccgccgaggctgcaaatatgctaaactaaggccccgcgaccgacgaggccaaggcaatctgcatgaacacattgtataaatccagacctttcttcttcatcggccattttaactttgatacaggcttaaaattgttgggggcaacaacttggtagtctccaggatttccaattatgctgggggcggcccctcc

SEQ ID NO: 512061 - DNA, 301 bp, Homo sapiens
tgagaaaacagattcaggaaaccaaagttttcgcttgaaggttcccctcagggggtgggtttgcccgtccccaaaagttttcacaggggggagggtttaagggggaagggcccccccctgtttctcagtttcagcctgcccccccccatcctttgggctttgacccttttttcccagggggcccccccctattgggggcccccaggttattttttccccccccccccccccccccccttgggttttattttggtaatgttgggggggaaagaaaaaaaaaaggggatttttggccccggta

SEQ ID NO: 512062 - DNA, 119 bp, Homo sapiens
aggcacaggaccaggttgtcgtggacggtttcttcctcacgcctgcgctgcttaaaaccgagctcgacactgacgaaaactcgatggttacagccgagatcccaggtggccgactcgca

SEQ ID NO: 512063 - DNA, 152 bp, Homo sapiens
ataccactgcaacagcactctatatacaagcacattgacgctcctgactatcctcaactaggggaccctttactatacccccttgcctatgcggacctctatctatcaaatactttacagagtactaggatctccttggccaggaaatccgc

SEQ ID NO: 512064 - DNA, 126 bp, Homo sapiens
tgcattcacctacattcccttactctgaactagtctgggacggatatcaaatggtcccacttcttggagttatgttataaccacagtggcgcgagcgctctccagatccacggtttcggcctccgt

SEQ ID NO: 512065 - DNA, 166 bp, Homo sapiens
  misc_feature (6)..(6): n is a, c, g, or t
  misc_feature (66)..(66): n is a, c, g, or t
  misc_feature (87)..(87): n is a, c, g, or t
  misc_feature (90)..(90): n is a, c, g, or t
  misc_feature (101)..(102): n is a, c, g, or t
  misc_feature (106)..(106): n is a, c, g, or t
  misc_feature (111)..(111): n is a, c, g, or t
  misc_feature (113)..(113): n is a, c, g, or t
  misc_feature (118)..(118): n is a, c, g, or t
  misc_feature (137)..(137): n is a, c, g, or t
  misc_feature (143)..(143): n is a, c, g, or t
gatganaaggctccctaggatccctacagaaaaatccagtgttggggcctctccagctggaaaggnagctggtacctctaccagatnttnatatattttgnnactnagttntncggtnacctttgacagtgtgcctntttatncacggggggatcatcaatcattg

SEQ ID NO: 512066 - DNA, 250 bp, Homo sapiens
gaattctggatcctcgtcacccagtttgaaagctgttgtattggaaaatggttaaggcccttctagtcttaaatgccttgacgtccccatgacctatgtcccccccccaccaccatgtcaacccttcaaaagggtgccgatggtaaaaaaccaaccttgctatttctggtgattgaggtttacaataaacaaaaccagctgtttctcattacctatactttttctcaggcaatgggtccattccctgaac

SEQ ID NO: 512067 - DNA, 514 bp, Homo sapiens
tccattgggacggccagtccaattgcaggttttctgcagaaaaccaaggctggaggaatgcttcccatttgcctcgaggtggataatattaacgccgctgtgatgggtttgaaaaaaaaaaagatcccccgtttaagtgaaggggtcaaaataggggcccatggaaacccagtgttttttctccctcctaaagactgggggggggcccttgtggaactggagcaagcttgatttatttttgcaagcaactaaattaattgccctgaaaaagcctttcaaatcctatcaaaagggactatgccattgagtccttcccggcttccatcatgtaaaagttcccagttaaaggctgaattccagaaagattaaaatatatccatatataaaaccataaataggtatattttttagattacccaacatatttgttaatttgaatttgaaaaaaattttgattcctaattccttagggaccctttttaaaatcaaatagaaataaatttttccttttcca

SEQ ID NO: 512068 - DNA, 473 bp, Homo sapiens
gcgacggggggggggggggcgaaacagaggcgctcgcggggacccaggagggagggcaggggggcaaggggagcgcaaagagcgcggcaaccgggaaggccggggcgccagggaggcgaagggggcagccgcccaaggaaacgggggcgacagacaaacaccaccaggcccaacgaagggggaaaagggggggggagacaggggcgggcgagggggcccaggcgaggggggaacgccgggccgcaagggagccgggagccgcaagccccacagcgcgcaccgcccgggggcacggggagcacaggcagaagcgaccgcacccagcggacaagacgcaaagggggggaggcagagggggcgaagcgaaaagaagggcaggaaaggcagaaaggggaagggaaagcgaagccgccgacggggagggggaagaaaaaaaaggggggaagcgaagacgccgacgagagaagggcgac

SEQ ID NO: 512069 - DNA, 935 bp, Homo sapiens
tggcaccctcgggctcgagacagcggcgaccgttgtaaagctgagcgatccagtgtcactggagacggtcagcttctccactcaggctcctccagcccgagccagaagaccccctcccccagaattctgggggccgatggaagggagccgagtcagatcgcgaggtacccagagccgacagaccggagcgacagggagttgccagaagccccgctccctaggagtgatcggaaagcctcacccatccgggtgaggaacccggagggaccgcctccgggcggagcccgccgaccatggctacgcccctgtgtggcagggtcccgcagctctacgcattcgcacgacgcaggcatagctgcgcaggatagtgcgcggacagctgcgtggaacagttttccgcgagtacatggagattaactgcagatctctgacgacgctggtagccccgtggctaggatacgcctaccggacaaacacgaacgcctataggtatggggcctaaaggccaacaggtatcggcagcaaagataggacctggaacaggggaaccagacaacgacacggggcagggcatgccggagccaccctgcacccaaggggggcccccaccacgcatatgggcgacgcatcgcacgcaccttacgtagcggcgaaacagtggttcaaggccttctgcccccagaacaagcataggcaggaacttacatgcaacattacgaagactagcccggcacacaagagacgggcaatgagactggggacagacctaggacagccaccgtggccaagcgcggacaccgagacaccatgtgggacggacaccacaaacgaactaccaagaaaaaacggcgccggtggaaaactcaaccgcacaattagaccaccaagcaaacacactgcggaaaccgaagtaacgacgaccgaggagcaatcac

SEQ ID NO: 512070 - DNA, 426 bp, Homo sapiens
  misc_feature (350)..(350): n is a, c, g, or t
  misc_feature (359)..(360): n is a, c, g, or t
tatcacaccacacgtatcactccagacagcccaagcgaggcacgggcttggggaaaaggggagaagctgagcccagagatgcccaggacaggctcatggtcaccagctagtcagggctggcgccgggacaagtgtgcgaggcaggcacgccgcacgcctgctgcttactgacagcacaaaatgcggggaacgctcatggacggctctgtgaggcaggtggtcctggtcaaggactgcgtggtccccaggtgcactgttctatttcaggtgtcagctccaaaaccaagtggctcccagagactgcccggcacagcctcgcctggcatccatcaatgcccacgcagtgctgnggaaggctnngctaaatatttacaaattgcgaaaggacttttaaaaggcctggaaaatcgagaaggtccaggtatg

SEQ ID NO: 512071 - DNA, 604 bp, Homo sapiens
  misc_feature (213)..(213): n is a, c, g, or t
aaaactttttgattacatttttgaacatttaaaccttccataaatttaaacaaggtttaaataaaaaatcattttttacagggatccaaaaagctttgtaaaccgtcaaaataagccagcccgtaatcactttaaaaaactttgtcctggttttgatttggggaaaaaaacttctggaatgtttccatttgaatttacaaaaatctctggggnttttcctcttttaattccctttttccaccccctaggggaaacccattttttttaaggggggggattaaaagtttttgcctaaagagttgcccaaattagctgttagtggtttatgactggaaccaaaagagcaaaacatgtttttttttttttattgttcaaaacacagtttgtttgtttaaaaaacgccagtcacagtggggggtttttgttatttgggcctaacccgtatcactgggtttttttgttggaaggaaagaaaaattttttggttaaaatgctaacaaaagggttttgttatcattcccccacatccggggttttgagtcctttttttcccctaaactcaacccaatagggggccttaaaccccgaatgaattggcttttct

SEQ ID NO: 512072 - DNA, 398 bp, Homo sapiens
gggcgctcctacctttccttctgacccatacctcctgggtcctgaccatgactttcttgaaagtgtagtcccaaaattctccttacctctgaatctacttcctctgatccctgcctcctaggtactaatggttcagactttcctttcctctagcaagttgtaactccaaagggatctaaggaagctctacactgtgtccttaggcatctaggctataaacccagggagtcttatccctggtgtccctcccaatttaggtatacagctctcaacatgggctgtatacctgccccaagtttgtaatggctaagagagagagacagagaggagagagagagacagagaagagagacagagagaaaaagagggagtcaaagagagagaaatatagaaatagt

SEQ ID NO: 512073 - DNA, 740 bp, Homo sapiens
cgcggtgggcgctggcgtgcggtacgctgcagggtgatgcggcggctggcggtggggactgacgtagcccggggctcggatggatctcctggtgctcgggtctggtgcagctgtaccttctttctggccagttgagtggtctgtattgccctctagtgatgagtgtgatcgaattaactccatcgaatttcgaaccagagaagttattcagagtgatagtttgtggcttgtagaattctatgcgtccatggtgtggtcagtgtcaaagattagacaccagaatggagagaaagcagcaacgtgcgattaaaagatgttgtcaaagttggtgcagtagatgcagataatgcatcattccctaggaggtcagtatggtgttcaggggatttcctaccattaagatttgggatccgaacaaaaagacagaccagaagattaccaaggtggcagaactggttgaagccattgtaggatgctgcgctgagtgctctggccagtcgttgaaggatcgcctcgggggacggagcggaggatacagttctggacacaacagggcacgaagtgactggttcaagtacagaaggctgtgattgagctgcacagacgacagcgtttgactaagaactgttctggaccgttgacagcactgcttggactgggtgagtactatgcctcctttgtgtggaccactgccaaaaacctaaatgcagattgggctgcccgcagttcagaagtcacag

SEQ ID NO: 512074 - DNA, 170 bp, Homo sapiens
caacaggcatgggtcccgtatattatatggcgatgatttagtgcgctaaagagaacttgagtgtaacgcagcggaaatcccattgatacgccaagaatactgcggggctgggttagaggccgagtggcaggataggttgcggttcgctcccgacaggtacgacgcgcaca

SEQ ID NO: 512075 - DNA, 159 bp, Homo sapiens
ttgtggacacaaggcgttgatggcctggtgcgtgggtaatcagttactcgtggaggctgagctgcgagagtcgcttgaacctgggagacggtggttgcggtgagccgagatcgtgcctctgcactccagcctgagcggctgagcaagactccatctcac

SEQ ID NO: 512076 - DNA, 629 bp, Homo sapiens
catcaatcctgaaatgcagatgccacaacacgctacccctgtccagcagccacctgaatgtgtacagcagcgacccccaggtcacagcctccctggatgggcgtcaccagcagctcctgccctgcggacctgacccagaagcgagagctcacagatgctgagagcagggccctggcacaatcgagcggcagaagaaagacaatcacaacttaattgactttgagacgaaggttcaacatcaatgaccgcatcaaggagatgggaatgcatgatccccaaggaccaatgacctggacgtgcgctggaacaagggcaccatcctcaaggcctctgtggattacatccggaggatgcagaaggaccatgcaaaagtccagggagactggagaaccactctcgccgcctggagatgaccaaacaagacagactctggactccgatatccaggagctggagatgcaggctcgagtgcacggactccctaccaacatccccgatacggcatgaacaatggctgagcatggaccagcaaggtggtgaagcaggagcatgctagacgaagagggccagaggaggccatgatgcaggcggctgaggtccaagaccatgagcactgcaaacagccagac

SEQ ID NO: 512077 - DNA, 1043 bp, Homo sapiens
  misc_feature (1)..(1): n is a, c, g, or t
ncgcagcgacgcagaagcacgagagagacagagaaataagaaaagagaggggggatgtgagtgaacgaggccggattaaggcggcgatacaaagtgggagcacgcgtcaggaggtccgaaaagcggctctttcgcgagataacgatcctggccggagaccagtggaaggacgcggcacggtgagtggggcgcccgcgtaaacgcgaaaggtcgccgccacactgaagagggtggaggcggacagcagatagctgcggggcaggccaccgcagtgttcccagaccgcaacgccgcgcaaaagcaggtgtggccaggccggcccatgataacgcgagttcatggtgagtgccgttatagccaacccctcagttggggggtggatagctggacaaaaagaccaccgtctggtgcgaggcggctggtgccgaagcgcccacgggagggcaccaccacaaatttggggccagggacaaaaacccgggtgccaacacaatattcgagccccacgcggaagggtgtggcccgccccgccctcctggggaccatagcgcaagagcgcgccctgtgttcgtcccgcgaacaacacacgcaccaaataggctgggcggagcctgggcgagacaaccaccgtgagatgcccacaacactcttggagggcgagcaatgggtcgacggagcgccaccataggccaaggggcggcgtaagcgacgccccccaattgggccaaagaaggcggccttgccccttccaatgggggaataaaacgccgcggcttatgtcccccacgcgtcggcgaaatgcgtgcagttatgtttggagagtacacctgagaacggcgcactctttttctttacaacatgcgacacgcggcccactacagtgagcactcgcagacctcatatgtggtgcaccacgagatgtgtgcatggagaaacaccgggtatgacacttggcggaagcatacatggggattctcagatggacagtgaaaaaagcaaaaaccacagggggcaaacaggggcgagaaacggcccacaaaaca

SEQ ID NO: 512078 - DNA, 293 bp, Homo sapiens
taaaaaccctcatcaatagagggagacttacagaaatagtcaaaccacattctacaaaagtgccagtttatcagggcgggggcttcgaaagcccaagaggtgagtgtttgggtgtgttaagaggtgaaatattaggtggggcggatgaagcagacataggtggaggaaagtggagccaataagtgcacgtgtgaaagctccggtggaaacccgtggtggctcacaaacaaagtgtttgacccgctagaatcccgatgggaaaaagtggggaagggaagaactcgaaagtccct

SEQ ID NO: 512079 - DNA, 287 bp, Homo sapiens
gctcacataaatttcttcaccgacccttttccttccagcttccttactataaaaaaccccacaattaatatgttcatcatcatccatactaaccaaccccgtcaccatctcaatcagcagcaagtcctactctctgtgggtgaaaccttgttaccacctctaggggcagaccccttttcagatatattcaagagtttaatatcctcccactatagcgcttcgactttgtatcttcctctatggctaccaaattctgtccgttgataagtactggctctaaaccatgc

SEQ ID NO: 512080 - DNA, 203 bp, Homo sapiens
cggcagctattattattaaccccattttacagatgagggaacggaggcagagagaggttaagtatgttgcccaaggtcacacagtggaggagccaagcctgtactcaatccaggtcatctgaaaccagagcttatgaaggtgaccacaccatacagtgtctcaggacagggaggaagtttcaataaagcagcaacaagcttca

SEQ ID NO: 512081 - DNA, 230 bp, Homo sapiens
tgaatccgacagtgaggattcgcgattgtctctacaggagtggtgccatctcttaataagggtggtcgttctaagtaagatttttttcgaagtttcatctctgtacataagtacattaatatggctgcgtatctttgacatagatgtaactcatctggtgtagcttctttcaaagtaaccgcagtgttacggatgatatcgaatgtttcgtccaaccaatgggtaccgag

SEQ ID NO: 512082 - DNA, 171 bp, Homo sapiens
tcgcccacagaactgatttctcacggcgtgtcacccaccaggcgcatgcctcactattacttgaactttccaaaacctaaagaggaaaagtgcaatgcgtgttgtacctacagaggtcactatcaatataaccgtttgttgctgtcaagattttttggtaacttcaaatat

SEQ ID NO: 512083 - DNA, 144 bp, Homo sapiens
gaaacccccttcttaatttgtttcccccattttttttttggggggggttttttttggcccccattttttgcggtttaaatcccaaaatctgagggaccagtcaggccctgtaaaaaaccaaataaattttgttttgggggccca

SEQ ID NO: 512084 - DNA, 314 bp, Homo sapiens
ctcaggttaattcgcagacactaacctcctgcagaagccacaaaaggttattacacataacccatggtttccacaggcaggcactcttgatgtggaaaattgggatacagcaggagaaggattaaaacaggctcatcaaaaaggtcttaaagtcgattcttctgttttctccacttggagtttagttcgtactgtacttctgccattatctcattattattctgcaggacagcaagctgaatctaaaaatctgaaagaatttgttgacccacgcacagctccagttaaaaataaaaaacaggagagggaggtta

SEQ ID NO: 512085 - DNA, 920 bp, Homo sapiens
  misc_feature (6)..(6): n is a, c, g, or t
  misc_feature (77)..(78): n is a, c, g, or t
  misc_feature (81)..(81): n is a, c, g, or t
  misc_feature (97)..(98): n is a, c, g, or t
  misc_feature (174)..(174): n is a, c, g, or t
  misc_feature (176)..(176): n is a, c, g, or t
  misc_feature (211)..(211): n is a, c, g, or t
  misc_feature (342)..(342): n is a, c, g, or t
  misc_feature (377)..(377): n is a, c, g, or t
  misc_feature (386)..(386): n is a, c, g, or t
  misc_feature (516)..(516): n is a, c, g, or t
  misc_feature (566)..(566): n is a, c, g, or t
  misc_feature (629)..(629): n is a, c, g, or t
  misc_feature (649)..(649): n is a, c, g, or t
  misc_feature (657)..(657): n is a, c, g, or t
  misc_feature (668)..(668): n is a, c, g, or t
  misc_feature (682)..(682): n is a, c, g, or t
  misc_feature (695)..(695): n is a, c, g, or t
  misc_feature (697)..(697): n is a, c, g, or t
  misc_feature (720)..(720): n is a, c, g, or t
  misc_feature (731)..(731): n is a, c, g, or t
  misc_feature (738)..(738): n is a, c, g, or t
  misc_feature (742)..(742): n is a, c, g, or t
  misc_feature (761)..(761): n is a, c, g, or t
  misc_feature (790)..(790): n is a, c, g, or t
  misc_feature (801)..(801): n is a, c, g, or t
  misc_feature (827)..(827): n is a, c, g, or t
  misc_feature (830)..(830): n is a, c, g, or t
  misc_feature (842)..(842): n is a, c, g, or t
  misc_feature (848)..(848): n is a, c, g, or t
  misc_feature (855)..(855): n is a, c, g, or t
  misc_feature (858)..(858): n is a, c, g, or t
  misc_feature (901)..(901): n is a, c, g, or t
ctacangcctggcctcacatgacccctgctccagcaacttgaacaggacaagcagcagctacatccttaaggtcggnnaantaagatgaggatttgnntcctgcattgccctgcctcccaccctatctctccccaaattataaacagccatccttgggaagcagcagagttaanangtctccccactgccctagtgacatacacaccaacnggagagcatgttcagatggcacagaatccagggactgcatttcatgaggagaaactggtaccaaaatatggggggggagggggggggtgtgagaaggcaagcgcaaagagaaccttcctccgtttctactnatcggatcctgacgctgagtcctctgagcgggggngtgtttttnctagttcttcttcttcagagtcctcgctcctcttcctcttctttttgctcttgttctctcccgaagtgctcttctacacaatacactaactttttgctctttaagctctctctttgctgctttgaggacnacttggatgatgatcccttagagtgcttggatttcttttccatctttacntttactttcttcttcttctttgacttgtccctcttataagactcgcttcggtccccttcatantctttcatggctttttcatnttcccttnttgcatccttngccttgcttttccnctcctctttcttntntttggtcatacccttccagtacncgcttgccttnttggaantatncgtgattctgatgccattntgttttttcttgttcttctctcggttggntttgagccacngcatgtatgcagatattggtttcttntgnggcatatgggtntttgcncttcttnatntccacaggtttcttgcggctcttgcgggtcctttgtttttttntcctttttgagcggtgtcc

SEQ ID NO: 512086 - DNA, 433 bp, Homo sapiens
aatgaatctctggcttgtctcacttggaactcctaacacattcaggtgcatctgccatacagggtcattctcagagtatgcttaagttattgctgtcaggtgcagctaccatacacaggtgtgtctgccatatagccacagaaagcaggagtcctacagctgctcctcatgggtctccatagactagtcttagagcaaggatgggcagccagcctccaggtttaacctggcactctcccccagcacttggtccccagagcaggggtgcatctctcccacttctggtcaacccttcagtaacaagtagagcccccagggtcttcatgaatatctagttgaactggctaaagaagagggccctgtaacaggacagaacaccaggagcctgaaccccgcatcttctacccttatcctgcatttatcctgcctgcat

SEQ ID NO: 512087 - DNA, 482 bp, Homo sapiens
  misc_feature (302)..(302): n is a, c, g, or t
  misc_feature (309)..(309): n is a, c, g, or t
  misc_feature (399)..(399): n is a, c, g, or t
  misc_feature (480)..(480): n is a, c, g, or t
ctacaaaacaccagtcggaggttctctggggacccttcccttacagtctccctaaagctggctaactcctttcactatgtcccagtatccctggttcctcggactggcactttctgagtcatagcaccgctcattcgtccgagcagaattgatctcggtggcagcacctctggtgggtcaagcctgcagcttctcctgagcagtttcgttatttttgggtcctagaaccgctatggtaccatagcggctcttcagggttgcaggacgtttgccaactccaacccacgctgcctgcctagttnggctaangggcagaacagatcctgcaaagaagaacccgaggttggatattaaggacgtcctttgcagtgccagtcgcggagctgcaattggctttcnctccctctggggaagaatgatgttactctcccaatctcgggccgcatatccaggattcgggatagatctgagatttaggtnct

SEQ ID NO: 512088 - DNA, 221 bp, Homo sapiens
gttctctgcacgatcccgggttcgagtgaaggcgtgtgggatctcccttatcgagaaaaacaccttaacctagtgcatcatcttcctctcgtccacaattatgtatgtcacgagcacttctgtgagctagttatcgtgcttcaaatcgagaatatttccttatttgttcctttaatccttgataccatcatatttatggttttctcctcttcttcctcttg

SEQ ID NO: 512089 - DNA, 815 bp, Homo sapiens
gcgtctcgtggaatgtgacatcgtctttaagccctgcgtgggaatccctgacgcagcgtcgtgatgcccagagaagacaggggcgatctggaagtccaactatttccttaagatcatccaactatgggatgattatccgaaagtgtgccattgtgggaaggcgagacaaatgtgggactctaagcagatgcaagacaggatccaggcaatgtcccattcggcgaggaatggcgtgatggtgctgaatgtggcaatgagacacacatggatgcgcgaaggccggatccggagggcagcctggaaaacagaccagctctggagaaattgactgcctcatatccgggggaatgtgggctgggtgttcagcaaggaggacctcaactgacgatcaagggaccatgttagttagggcaactaacggtcgttcagactgctgcccgatgctggtgtccatatgcccacaatgtgaagtcagttgtgccagtctcacgagacactcggtcgtcgggagccacgatgaacgatcctcgcttttttatccatggcttgagagtatcagcacgtaagaaactcgtcccatggcgtggcgaccctagctgacacactccgtgacgctcgaatgttgcaagcgtcggagtcaaagaacgtggtagcacgaaaaggtggggagccccaggcggaacgccccaccgctgggtgactcagtgctccaaattatcgtcccggttctccttaggggcgggtccatcccagccggtgttcgaccgatgggagtatctaaagacctgaaggtgttgatatcacggagaactctg

SEQ ID NO: 512090 - DNA, 353 bp, Homo sapiens
  misc_feature (14)..(14): n is a, c, g, or t
  misc_feature (113)..(113): n is a, c, g, or t
  misc_feature (153)..(153): n is a, c, g, or t
  misc_feature (158)..(158): n is a, c, g, or t
  misc_feature (167)..(167): n is a, c, g, or t
  misc_feature (295)..(295): n is a, c, g, or t
  misc_feature (325)..(325): n is a, c, g, or t
aaggcctatgtggnccctatgtaagtttatgtccaaaaccgactgtaagtggtcctctgtcagcactttaaaagaatgatggaggccctggcatggcggctcacacctgtaanaccagcactttgggagcccaagcgggcagatcccttgagnccagnagtttgagnccagcctcgccaacatgatgaagccctgtctctctgaaaatacaaaagattggctggatgtggtggtgtgtgcctgtatcccagttgttcggtaggctgaggcatgagaattgcttggacccagggangcggagattgcggtgagtggagatggtgcnattccactcccagcttgggcaacagagc

SEQ ID NO: 512091 - DNA, 1274 bp, Homo sapiens
atagccatgaacgagagtatgtgcagggcgaactccttactttacctctaatcactcacggatttcgttgagactccattgctacatgctcattgaagaacacaagaaacatggaataagcacctagttcactgctatgaattccagttgtaccgtcactcaaccagtgttcatcttctacagctaatctcgcctgggacaattcaaatgaattggagtgatgcggtgatgaggcgaacacagtacataatccattgatcaaatgcacagctagatgcatataatcctgatcccatagccaaggcttcttcgccatgaaaggtcctttcctgaagctgaaacgcttaaaatgtgctcgaaatcagtccatatactatggcacgggatgaagcagttggcttacagtttaatctaattgagctacgcgaattcgaatcatgtatggtttactcccatcatttgctgcattgactccttgaatacattctaacacacactccaagtcactttaagattacttaggtttcccatctccaaaaaaatcaattctcaaattcattgctatcgagtaaagttttagcacaataatttcgagtctgcgttgtcttcttatggcagctaaacaagttgtcgtacatctctctggaattggatagcagtacaagcgaaatggtagcggtccgtgcaagttaggggaaaaatctcagtatactttatcatagggcatttttactacatgctataggaggtgcattggctgccaaaggtggaagcaaagccattagaagcaaacagaagggggcaaggcactacttccaattggctgacaatgttcttgattaagaaggaatctgatattccaggttgcagggatttgatgttttggcggtacactttctgacaccatttggtagagtttcgatcaactttttaagagtatacgatcatatcggacacttataataggattaaggccaccattttaggagattcccactagggactcctatacttagtggacgtccataattttctctaaagttacatctatgccctgaacattacagtagtagcacaatcccactctctgtgaagtgggtgccctgccattggtcgacagatccatagcaacaaacaaacaacgagtgtgtttcccaaaaaccaaactagtaagctatagttgcgtcatgacgatcaataggaaagcggaagcgtgtggacccgccacgggcatataagggcattagctttcaggtaaacatcacagtgaaacg

SEQ ID NO: 512092 - DNA, 1350 bp, Homo sapiens
ccccccctcaccatcgcggtctgggacgcaagagagacaggggagaggggcggacgcgggcagctgagtgtagctaccagcgtagtccagagtgagtgacgtcatgttggttgattggctagccgaccacagtttttgcgtccgtcgatagacagcgttgtttccgatgtgttgttatgtccaccgcccatgtgtcttgtgtatctacttttaggtggggccgccatgctaagttggtttgtacttgcaccccctgtgagcggtgatttgttcatgtgtgttggaacacctgtgggaggctcgacaattgttgtttgctgggaaagaagggggatttttggccacctccaaagtgtgtggtgccccccggggctaccccccggggtgttgaaaagctcatgtaaaaccctgggttctcccgttaagcccacccgggtcacaaattgtctgcgaaatgtttttataaccccccccgctatctgtgacaccccccgctattcgtgaaatataaatctctggttcctccctagatattgtgtttcttgtgaaaaatatttataccggtctcccccaatttattttgcccagcaattgcacggttaagaggtggaatggtacctgtattaagggaccccacaagggacaccggttgtgaaattggaacaacagccgcgtcgatgagacttatgtgtccccccgccccccctcgtcttttgtgatccacgaaatggcacagcccctctgtggaaggccttggagtttaaaaattggggagccccaaatttggccgcgccatgcccttgcctcaccgtgatatttccgtatagaatagggtttgtgaaagtatagtgtaaaagtgctcttctctttccccgcaatattgctcttggtcggggtccctaaaacactttccccaccttaagaaatatgaattgttaaaagggaaaagtggtgaactcgttgcccaccccggaaatgtctcgttattaaattatggtgtaattaagtgtttcccacgaggcctcggtggtttctcctggtcgctgaggccacatcgtggtttgctaaactggaatggggttttcttaattaaataagagtggctcgcttcacgcttcttcttttaaaaggaaatgtggagtacactaagtgaatttttccctttaaatttattgctcacgaaatgaggcactattccttaaaatcctcggagaagctgtatttaaagcactttttgcacctaaattggtccctagtttaatttctattcgtatctgtttaatttaaccccaacaaattcactcataccccaaagtgtaagtggaaaccccccttttaaaccccaaccca

SEQ ID NO: 512093 - DNA, 1000 bp, Homo sapiens
tactcgtggtgccgctgcaagccggaagagatggttgagctcatgtgcccgctgtgctcctccttctgcccttccttctgtatatggtgcgccccaaaatcaggaaaatgctgtccagtgtggtgtgtccatcaaatgtcagcttccttgagaaaagtacgttgtggtcacaggagctaaatacaggtatcgggacacggagacagccaaagagctggctcagcagaggagctcgagatatattatagctgcgcggggatgttggacacacaggggggacattggtggccaaacgagattccagaccactgacagggaaaccaagcagggtgtaggggcgggaaactgacctgtctgatactaagtctattcgagctgggctaaagggctcctacaagcatggagggaaaaagacaccttcacacgtttggctccaacaaatgcaggcgtgatgatgttgtccggtaatcagaaggacatggcagaggggtttggagatggcacaataagggagtcacacccccatttaggtcacattccttcattaaaccattgcttgtgtcagaggaaatctacagtattcaggccatccaggatacgtacaatgtggtctacccctcggcaaattcaccgtggaggatccacttcctttaacttgcaggcggaagaaattctacacaatgcaggcctggcctaatgcgacaggacaaggtatgcaaagatcccttctacccaaggtattggcccggagaataaaaaggctggggttcggaccgattctggagcaccttggcgagagccaatctgcacttggtcggacacaatacatgcatggtaggggggtcacctataacacgacctacaaaggccaaacaacgagggctaaagaagagagccacggacgacagatcaggcagcatccaagagacaagggggacaagtcactgccacacaacagcggcacacacacactcaggcctcacacagccgtgacatctcg

SEQ ID NO: 512094 - DNA, 120 bp, Homo sapiens
  misc_feature (107)..(107): n is a, c, g, or t
cggttttcattaaggaggtgcgtttatcctgtttacttaggaggtggagagcctgccttgctcagccctgttactacattgaagtcactgtagtgccacacaattgnttgcaacttacaa

SEQ ID NO: 512095 - DNA, 178 bp, Homo sapiens
gtacatccttgctcaatcagctcatctgtaaagcgtgtgtcatggcacaccagctctggcactgagttctcagggtccaatgtctttccccgtctcagactgtatcaaggcttccaaggaattcgcaatgcctcgctttccatccccagtccagaagacacagggtcacgagatcgaa

SEQ ID NO: 512096 - DNA, 469 bp, Homo sapiens
tctagaggatcctgtagaggtgtggcaggctgtaaagctgggggacatggaatatccagaagctcgtggagtggtgtgctgcgaagaacctaccccagcctgaggtctagggttctgggggttctaggggcctgctgggtgataaccggatctgagcaggagtcagaaaggcaggcaggccatgaaagtcactcttcaattgtcgcaagggaaggaaatccaagcctgctatggattagtcctgccaccttccaaggaaggcctcactacatcataagactgaacactgctggtagaagcgctggtagtagtaggaagttgtgatctcatgcaaaggggaacaatgaccactattctccctctgacccctccttggctccattgcactgccagaggggccttcttgatggcagttgatccaagtaacctgaagctgagactcccagaagccccacctcactcctgtggt

SEQ ID NO: 512097 - DNA, 118 bp, Homo sapiens
tgatctcaggcaggaacacctaacagcacacttgtaacaatagcacaatagctgccgtttatggtttctgttgtgatctactgttcttagattctctttgacctcaatggtatacatt

SEQ ID NO: 512098 - DNA, 202 bp, Homo sapiens
ttgcgtggacacttacgcacggaaccaactttaaatgatctgctgcagcagacaagcaacctaaactgatcccctctaggggccgtaagaggccacgcaggctcccatgttcgcggggtcacttacgttgacttagcaggcatatatcacacttagcctgtagctttgaccaatcgtatgtgaccacacatacgcggctatg

SEQ ID NO: 512099 - DNA, 218 bp, Homo sapiens
  misc_feature (17)..(17): n is a, c, g, or t
  misc_feature (29)..(29): n is a, c, g, or t
  misc_feature (37)..(37): n is a, c, g, or t
  misc_feature (180)..(180): n is a, c, g, or t
gctggcaggcgcccgcnaccatgcccggntgattttngtacttttggtagagacgaggtttcgccatgttggccaggctggtctcgaactcctgacctctggtgatccgcccacctgttgagtgctgggatacaggcatgagccaccacggccggcccaccttgctcatttctaattttnttttatcttctgattatattttttaagaaatttgtctg

SEQ ID NO: 512100 - DNA, 120 bp, Homo sapiens
  misc_feature (77)..(77): n is a, c, g, or t
taatctttaaacagaacacaggggctggggagaagagaagcaacaataagcttgaaagcatccagtgaactaagcanctgcctttttcaactttgagttagtccttttttttcttgcgtg

SEQ ID NO: 512101 - DNA, 247 bp, Homo sapiens
  misc_feature (10)..(10): n is a, c, g, or t
  misc_feature (95)..(95): n is a, c, g, or t
gatggatgtngaacaaacacacatttattatttaaaaaaatcactttccaccctttattagtgaaaactcttttaaaaaacacgaataaagtgtncccattgtggctcagcagttagtgaacctgactagcatccatgaggacgagggcttgatccctggccttgctcagtgggtcaaggatccggcattgccatgagctctggtataggttgcagacgcggctcggatcccacactgctgtggttg

SEQ ID NO: 512102 - DNA, 353 bp, Homo sapiens
aaagggtttttttggggttcccggaaaaattttggtaaccccccccacacccccccccggggaaattttttgggttaaaaaacccccatcccccaaaaagggggttttttacttcctttaaaaaacctctcctttcccaaaaaaaaatttttggggttttgggggccctttggttggggccttttttcccccccccccccccccactttgggttgggcccaaatgggtttttttgttttccgggccccccccgggggggcccccattgttttaaaaatgttttttttttcccccaccccggggcccctttttccaaagggggggggggcccaaatttttccccgtttttttta

SEQ ID NO: 512103 - DNA, 210 bp, Homo sapiens
tccttttttttaaacccccccaggttttttttttaagccccccccccggggaaaaccggtttttttccccggtcccccggggtggggccccgttccccccggaaatagggttcccccccccccccgggggggtggttttttgttgggcttttgggggggggtgggcccgggcccgggctttcccaaaaaaaaccccttttttggttttta

SEQ ID NO: 512104 - DNA, 262 bp, Homo sapiens
agaggatcccgcagcaggtgctcctgatgtctcgccacggctaggtcttgtcacactcactcaccttctccagcagcttagggtcgggcgtgatatccttctccatggggctgctgaaggccagtgtgcttggacagcatgctggccctcttggcctcggcccggctgcccgtgcgccggtgggacttggtgctctgggttctgtgcaccacccggacactctggtggctaccgatgctgccgcgctgggacacccctgtgc

SEQ ID NO: 512105 - DNA, 381 bp, Homo sapiens
gcacgtctccactgaagaaggtagttgagagaagtagacaaaagtttggcgggaatcatggccatttcccacaattccatgcctctcagaaatctttactagcaatgtgaaaattgtatagaaatatgaatggaaaaacacagtcatatgtttctgttcacattttggggtgggaatagggttctgtggcaaacatataccttttgttgcctcaaagcatacctttaaaaacggtgagtccaaacggatgtgtcatctggtcaacatggcccagtcttttcctgtctaaaccatcaaggttgctgtgctcaatcttatcaaaaaaggcatccacccagtacaaccgggaagtactaagaaaaggaagaagacatgttatca

SEQ ID NO: 512106 - DNA, 1044 bp, Homo sapiens
  misc_feature (275)..(275): n is a, c, g, or t
tgtggatccgccgctgccggagcagcccgaagggagctgcggatctgcgaggccagtaccgaccgcggcctagtcagcgttaggcttgtcattcgagcgctgccattgtcacccggtgactatttagtcagcatcttacaaggcgtgtgtcatcactcgcgggacaagtggcgtgtggtcatagaatgcaggattacttgatagcggtacagctatgagctaaccacgtatacgtctagggctagcacgtactatccaccagcggactcggtagntggagtataccaacgtatcacgcggagccgtgcgcatgtattcaaactgggagagaacggtgcaagctgcatagatctggtgaccacaagcgggaggcaaggagcagcattcctggaccagtcacacatcacagcggataattcaatcggggggaggaacaccaaacagtgaggggtttcaaatatgggatagagattaataaacgcaaccgggatacaccagatgcgtgaccccaggacatggttcacctaaatatggagtcacaaaacgagtcaaacaactggagtggggacttatacagcaggacaaagatcgaacgagccgaagaagagcgttggttgcagtgaagattggtaggtgaccctagaaagtaagtttaaagaatcgaggagagtaaacatcaagggtaaaagttggaccacggaaacactccagttagcaagacatgggtgaaaacaagagatgggcatctgaggaacggaacacaggggcaacaacacgtttggccgcgataacagcgagaacaggtaatccgggccacaggacgcaggcaacgcaaactagcgagagccacacttcaccgaagagtacaggaatcacccgaaacggaagcaccaggggtagcggacccatccagggtagagacaacaattgggatccgcaaacagggttaggggagaaaacaggaaaaggaagtaggaatataccacacacaagaggcatataccaaacagagggagccaacatagagcgtaccgctatcaagcg

SEQ ID NO: 512107 - DNA, 971 bp, Homo sapiens
gtgctgtcagctctcgcactcggtgcttccgccgctctgacgtcgcttttctctgccggtcgcgagggaacgagagagatcgtcgtgctggtcatggaccatggctccggcatgtgccaagctggtatagctgtggacgacgctccccgagccgcgtttccctatcgcctcgatcgtgcgaccccagtacacctagtgcacggtcgactggctggtgcaatggtgccgaaaaggagctccatacgtgtggtggcgaagaggccccagtagcagggcgtggagatcctgacccgtgagagtaccccaatttgagcaatgtgtattcgttacttaattgggggactagcattggtaccaagaatctggtccaggcacactcgttctacatataagctgctccgtggtcgccttggagtaaacaccacgaatgctcgtttgactctgacggcctcccccttgaacgcgccgatagggccaaatcgatggaggcgaatgatgtagtctaggattattggttttgacgaccatcttgatgccctcggtccactgctactgctgagtcaatccacggcgcgacgcatgtccctcctaggcctcttggtggcaccgactggtattgtcttggactcttggagacggggtcacccacttggttggccagtcttacctactggctattcgtcgcgtccgcctggcgccctgttctgtgttgtgcgaccctgggcttggctcggtgaccgtgtagctggactacctcatgaagagttctcactgaggcgagatacgggctgcgtcagcacaggcgatcgggaaaaatcgtgcgccgaccatcaatggagaaagctgtgctaacgtttgcccctggacttcggagcaggagatgggcaccgcggatctccctcttctctggagaaaagtaacactggcgatggcaggtatccccattggcatgacggtccgggtccgaggct

SEQ ID NO: 512108 - DNA, 697 bp, Homo sapiens
  misc_feature (697)..(697): n is a, c, g, or t
gccgggcgcgtgctcacgcctgtaatcccagctctcagggaggccgaggcaggagcattgcttgtacccaggaggcagagattgcagtgagctgagatcacgcattgcactccagtctgagcaaaagagcaaaattcgtctcaaaaaaataacactttaaacaaataccaaaaaatgagaccagaaaaccaaaatatatggttctcattatggctgttgtagtggcttaaagtaattcctgctcccactttattttcaaagacaactatttgctacaactgaataaaaccttaatggagtttcattataccaaacaaaacaaacaccacaacaacccaacacaacacaaacaacacacaaaaaaacaacacgaacaaaacaaaaaaaaaaaaaccacaaacaaagaatgttggcgcgggccccgcgcaccagaagagaagatttaccaacaacaccgggttggggagccggccgacctccaaattctggataataaagaaaggccaggtgacatagtgtgcacaaagaaaaatccggctgcacgaagacagatggggctcggtcattccacaaacaaaaaaaaaaaaggcggggggaacacagacgcgtttcgaaaccacacaaagtggctcgcgggccaacgggcttcccaacaagaggacggcggagcataaaatacccggcgcgggcggagaan

SEQ ID NO: 512109 - DNA, 149 bp, Homo sapiens
tggaagtttgaggtttagatgactatggtggctataataattactggttatgggaatgatggttttgatgacagaatgagagatggaataggtatgggaggacatggctatggtggagctggtgatgcatgttcaggttttcatggttg

SEQ ID NO: 512110 - DNA, 205 bp, Homo sapiens
tacagagagaaagtcatgaactgtagggagcagtaccatattcatcaactagtattatataacccagcccgtcacagatagatcaattcctcagcaggaatgcagtgcccccatgcccccattgccaacaagtgtcataacttgcccctagcctctcactctccatgctacaccatagcacacccccgcatgcctagtgggtcct

SEQ ID NO: 512111 - DNA, 773 bp, Homo sapiens
gacataggccggcgcgactgattgacgccggacccatgatcattctgtgactttcagagtgctgtggtctgatgccgtgactccactagaactctgtccgattggtgggcgtactgcgtatggttgcgcgagaccagtgaggagttaatgtgtacagagggtactgctaaggctagttctatatcgtgcatactgaggttgaaagcactgaatgcaggtgatacagccgaagtatattatacaggtgctgatatttgactagagtttgtagtgtcgttggtctgtagatcttggatgttcagaaggcgaggatgcggtggagagagagtaccaagaagtgatatacatagcaagatccatcatatgcggtggctttgcaatggtagtccacatgtctttgctccgctgagtctggtggaacaagagctatggtaccacatgctgggccgattcgagtactcgagcctgtacatactcgcaggggcacattggtggcccagtacgtcacgattacaccacaaggaaaagtatgtccctatgttcttattgtggagattgtcgttggaattcaatagttgcgcaataggttgtgggaaagtatgtctggtggaggttatccagagtgccagtttactctgtgggatcacgttgtggtatgctgtggatgtgatggttggtaagaccttgtacatttcagttggaagggagaatattcctatgaggcctcgggaagcctcggagaagagggagatggcttggtgtgtggggaagaa

SEQ ID NO: 512112 - DNA, 193 bp, Homo sapiens
atcatggccgttctggaagatgttttctaccaccctgatcgttaagggagattccatgggcttaacgaacagaaatctgcttcatgttctgcctgtacagtagttcattctttctctagacgtagagctctagttgtctgagaacaaccttcttcaatcctcctctctctatcctctatgtgatcgacgtcag

SEQ ID NO: 512113 - DNA, 618 bp, Homo sapiens
  misc_feature (3)..(3): n is a, c, g, or t
  misc_feature (72)..(72): n is a, c, g, or t
  misc_feature (75)..(75): n is a, c, g, or t
  misc_feature (118)..(119): n is a, c, g, or t
  misc_feature (123)..(125): n is a, c, g, or t
  misc_feature (141)..(141): n is a, c, g, or t
  misc_feature (143)..(144): n is a, c, g, or t
  misc_feature (148)..(148): n is a, c, g, or t
  misc_feature (190)..(190): n is a, c, g, or t
  misc_feature (194)..(194): n is a, c, g, or t
  misc_feature (205)..(205): n is a, c, g, or t
  misc_feature (210)..(210): n is a, c, g, or t
  misc_feature (217)..(217): n is a, c, g, or t
  misc_feature (225)..(225): n is a, c, g, or t
  misc_feature (231)..(231): n is a, c, g, or t
  misc_feature (269)..(269): n is a, c, g, or t
  misc_feature (294)..(294): n is a, c, g, or t
  misc_feature (337)..(337): n is a, c, g, or t
  misc_feature (493)..(493): n is a, c, g, or t
  misc_feature (530)..(530): n is a, c, g, or t
  misc_feature (554)..(554): n is a, c, g, or t
  misc_feature (593)..(593): n is a, c, g, or t
ggnaaaagcatttgagaatgctcccatggatcctggaactaggtctactgtggcagcaaggcacaggctggnggnctcaggggtcctggaggtcaggcaggtcagccagcagcattgnngggnnnatctgggtctcacgcngnngggnctcaatatcggcagggttcatgccatggccttcgagccagtnagcnagtttgggggntgggngagaggntgaatctncctggncatcctgtggcccatcagccacgcccatgtcgaaagtntggtttaagaattcctccaggtcanagccaacaccgtagccagccccactgccctttggtgtgcctgngaacacagggggcagggggtcctccccctgtgacttagatagctgctgggtcacaaggttgacatcaggtgactctgacatggaagattgaggggctcccccggcgtctgggggcggcaggccaggtgggaagtaaggcaaaactcctggggtgcnggggccaggcgagcccagggggtggcacaagtgactnggcagccaggaggctggtggaggnggcaatctggggtggcgcggggacagggatgggcccaanagggcagtggggtggggtgcagggc

SEQ ID NO: 512114 - DNA, 162 bp, Homo sapiens
  misc_feature (37)..(37): n is a, c, g, or t
  misc_feature (138)..(138): n is a, c, g, or t
ggatttgctggtgcagtacaactaggcgttaataggngacatggtagctcaagcgctgtaatcctaagtgtctttgggaggccaaaggtgggagagatcacctgaacccaggaagtttgagaccaagcctaggcaaantatgggaagatcgtatgtctatga

SEQ ID NO: 512115 - DNA, 185 bp, Homo sapiens
ggatcttggctcatttcagtttcaggtcaaaaaaagtgaaaaagccaacagtaaactccaacaaaaccaaaaacctaaaattagacttaaggaagtaacttagaggtctgtattcaatgtggagttgtaagggtaagcaattaaagccagtgttggaagcatgcatacatatatatatatataaa

SEQ ID NO: 512116 - DNA, 126 bp, Homo sapiens
tgggaagggcatgaagcaggtggctgaggctggagaggccggagagtgtgtgggcagatgggtgcggctgcctccctgcctcctgggtggcctggcctggggtagcgtgagtcctcagctgggtgg

SEQ ID NO: 512117 - DNA, 136 bp, Homo sapiens
attgttgatatggtcctggcaagcccagtgtattgagaacttctcagactatccacctttaaacgctttgccatcggaagagacagacggccaggtcatcagcgaagagcgcggcgcagacagtcggtaggctaaa

SEQ ID NO: 512118 - DNA, 610 bp, Homo sapiens
  misc_feature (391)..(391): n is a, c, g, or t
  misc_feature (475)..(475): n is a, c, g, or t
  misc_feature (527)..(527): n is a, c, g, or t
  misc_feature (601)..(601): n is a, c, g, or t
  misc_feature (605)..(605): n is a, c, g, or t
gcaaaactctgtctttccctgtctgttttttcagatttattaccctaggctcctggttccattcttgctatactatttacagaggactcaacacctcactctgtttcatgcctccatatatagggacgagttatttcatctgcagcatattctgatattcaccattaagcctctcctgacctactccagctgaattaatggaatcttcttctaccagcaaacctgatagctacttttaggtactaagtaataacaactcagtccattgtattttaataatttatttacatgtaattttcccttaccagaatgtaagattttaaggcagagacagtcattcatttctgtatctcctggagccaagaagaatggattgcaaatgctctcaacntaatacctgttgctgggcatggtggcttacacctgtaatcacagcagtttgggaggtcaaggtgggaggatcacttgacctcangaggtggagaccagactgggcaacatggtgggactctgtctctacaagtttntcagctagacgggctggcacacatctgtagtcccatctatggcggagggtgaggcagaaggatagcttgagccngggnttggt

SEQ ID NO: 512119 - DNA, 287 bp, Homo sapiens
aagggagggctcgaagcttctcccggggtcgtcgcaagaaaaaatgcaagatttgcaagcttcgatcctttttccgtaaactcaacaccaggctaatgtcccaacggatctgatggtggggagggagacaactgttcttaaaggatcatccccactgctgtttgtccctagcttttcttaaggagagctctgagacatctacttctacatggcgttgttgggagtagaatctctttttagagcacatagtgctgacatgaagacctttttctgcactatatgcaaac

SEQ ID NO: 512120 - DNA, 165 bp, Homo sapiens
aggaatcgagacgctatgtgatcgtatatagtgagacttatacacgcaagacactaggagaatgtctgtagaactatccgttgcataggagagagaatggcaagtacaggtatactctgccaaacacttcacttctgaagtagattcactggtgtcctttctgtc

SEQ ID NO: 512121 - DNA, 321 bp, Homo sapiens
  misc_feature (44)..(44): n is a, c, g, or t
gttaactgactgtttatcatgtatgtttataactaaactgtggntaacacatacataagttaacacatatgtatgtattaaccaactgtttatgttatacacacacgtatgtgttagccaactgtttatcatatgtacatgttatacatatgtgttaacaaatgtgtgtgatttatgcattcgtgacatgaatatattttgtgaattaatgacatgcctttttcctatttttttcaatatttctaggccatgcagtttatctgtgagtttttaaaaattgtcacaatctcaataaaaaaaaattccaacatatttattaaa

SEQ ID NO: 512122 - DNA, 148 bp, Homo sapiens
cacatgtcagtgtctttaggacaactgagctgggacagaaagggactggagggctgccccccaacctgatcccttctgaacaaagacgtccacagatgtacctggacactctaggctcagagaaaagagggagactcctgctggattc

SEQ ID NO: 512123 - DNA, 396 bp, Homo sapiens
  misc_feature (199)..(199): n is a, c, g, or t
ccaacccaacaaggggttcaggccttgggtgggcccccattgcctttttctcccccacccccccgtgcccttgtgtccgaggaaagaggagccccccgggccctgggtggcctttggggccttttttctgtttccccccctccctctgggggggctggccgtgggtttgtcttttttaggtgggttggggggcctttgnccgccccctccccccccaaccagggtggtttcctttaacctgttttttgtgggggggggggatattttgtaacccctggggcccccgcccctttttttgggccccctgtccttacctgttttcggcccccttaattttttaaccccggggcaggcagggggtccgggccccccaaggccataaaacaggagccgtga

SEQ ID NO: 512124 - DNA, 1242 bp, Homo sapiens
ccaaacttttccctatggcttcggtgaccaggccgtgtttggagagctagccctcgggaggagggacagtggagaagttccagctgcagtcagacctcttgagagtggacatcatctcctggggctgcacgatacacagccctagaggtcaaagacaggcaggggcagagcctcgagacgtggtgctatggctatcgccgagattgcgaagcgatacctccaaaagccagccatactatatggagcagttattagggagggtggccaaccgaatcgccaaaggaaccttcaaggtggatgggaaggagtatcacctggaccattaacaaggaacccaaacagtactgaatggaggcagtcaagagggttatgatacagtgctctggaccccatcggagtgctgtcaaatggcagtccagttctcagcggcatcagtccagatggtgaagaaggctaccccggcagagttcaaagtctgggtgacatacaacctggatggcggagagctcaatagtcaactacaagagcacaaagccagtcagggcaaaccagatcaacctgaccacgccattctatacttcaaaacatggcaggccagcttccccagatatcacatgaccatgcaggtcaccatagacgcggaatactacattcagccctgtggaatgacgacctcttgatacctaccaggaacaaagcttgccacccagtattcaaaggcctctagaccataccgcaccatgagaaaggcccactggcatcttgggaacaccacctgagcaggacatcccagccgaccagagcgcgaggcacaccagatatactgcaccgcaagggcgcttaacgtctaggcccactacttaagcgccaagggagaagacaagctgctgacaagccatctcggtaccatcacagtgatcacaccaccaggtaccgggagtccaagtcatcacaccaggaacaactacaccaagattacacaaataaccagactcacagtcgacactggcataacaacaaaacacaaataagaggaaagtctaaacacaacatagaactatacaccctagtccaacacatcagctactacgtaatacattacacaaccactgcttatatcatcaattaacaagataaacaaacaaaacgaaccattcacgatacacataacgatatagcaaaaccatacactaacacacctctcataaccaacatctcactatacgcgacctacccacgaac

SEQ ID NO: 512125 - DNA, 259 bp, Homo sapiens
attgactgtgccaattcattttacccaggcacgattctgttccattaagaaagaaggaaaaagcctcaccgaagttccacgaaggcagccaagaacctgcaaaaggcaaatttaccttcttcgggcaattagcaaagtctgcaaagattgtacaatatatttggggttatggtatagttttagcaacccaattgttccagaagaccctcaaaaggctgtgctagttactgtttatgtgaccctgtttaagatgcttccc

SEQ ID NO: 512126 - DNA, 179 bp, Homo sapiens
ccccaccactgcggacgataatcgcgcacgtagtcgccgtggtacgggttgtactgtcggatgtaagtgcggttctggttgatgatgtatgtctggttgttcaccaccacggtttgattgatcaccgtggtgttgttgatcgtgacgctgttctggtgccagccgcgaaacgacgtctg

SEQ ID NO: 512127 - DNA, 174 bp, Homo sapiens
ccgagtccgaaagatgactgaaaaagcaaaagcttatttaaatcgttggtaacttgtaccaaaatattttacctcaaaatctataaagcaggtacagttaaggactaagtagaactaaggcttctgcttccttgatgctgtggtggagtagggaatgttatgatttgctttgca

SEQ ID NO: 512128 - DNA, 439 bp, Homo sapiens
ggccggggactattatttatgcatcatttgaggtcagccgtttgagaccaggctggccaacatggtgccttgcctctactatgcagaacattagccagtcatggtagcacacgcctagaatcctagctactcgtgaggctgaggcagtagaattgcttgaacccagtaggcagaggttgcagtgagccgagaccgtgccactgcactgcagcctggtagacggactgagactatgcctctctctcactcgtctagtgcactgattccatctcctgtatctgtcattcattactatctactctctcatatctgatccctacgtccgtcctgtacccttacacgccttgctccgcagtatcctccctctcacctatcatctcctcttcttcttcctatctctctgcactctcatattccctcgtccctacttctctcccct

SEQ ID NO: 512129 - DNA, 107 bp, Homo sapiens
ccctcgggattgggcagctgggggaagttaatatgagccattgggtgtaccagtgcattcatttgggcaaggaaagtgtcataatttgatactgtatcttgttttcc

SEQ ID NO: 512130 - DNA, 274 bp, Homo sapiens
acaagcccggatatctcggatcaagcatactgaccctggaatatcgcagcgttttgctcctcaaatgaaatacgcttccgtcatttcttcaaggggcgcgccctatgctgcttagcgtcgcttgtcaaactatgagctcatctattctctaatgaggtactctggcagctccgttcatgtcactgttgataatacccgtatcacactgctgtttcctcgtaccgtccactccatcttaccgggtcatagctgttttcctgaatatagatagagg

SEQ ID NO: 512131 - DNA, 446 bp, Homo sapiens
tcctaaatattatgtcatcatttcagtcatttcatcgcatcatttcatctcatctcgtatcttatctcatttcaatttcatttcattatttcatgtcatctcatctcatcatttcatctcatcatttcatctcatcacatctcatcatttcatcattttatttcatcatctcatcatttcatctctcatttcgattttagtttgaatttcatttcactatttcagtttcatctcatcatttcatcgtcaccatttcatttcatcatctcatctcatcatttcatcattcatctcatcatctcatcattcatctcatcatttcatatcattttatctcatctatcatttcatctcatttcatctcatctcattccatcattacatctcatttcatctcattttatgtcatcatttcatgtcatcatttcatcacatctcatctcatc

SEQ ID NO: 512132 - DNA, 815 bp, Homo sapiens
gcctggcgcccgtgacagaaccagctgtctgagctgcccgggcagcgggggagcagcgagcgggcttccgcgagccggagaaggcacaggcctgtcccgggtcccggcaggtctgcgcgtctgttcccagtcgctctgcgagggcctaacaatggaggagcaacctgtccatgaatccctgcaggacagtgagcaggagtgggaaatctcgacatggaaaagccctacaagtcagaaatgaaggaaacctggtaaaacgaccggaaagccagaagatgaactagagcctgatgctgaccggaaacgtcagacgaggccagaaaagccagacgtggaggggacgacagactgcgcagggacaagagcagaggatcgagcggcagaagccaaggtgatgcagcggacaagtgcgcaagatgacggcaagccatcgacaggcgggtggcccggtccggaactgtgaggggcaagttgccgcgcgcaagcgggccggaggagcataggtcgccaggaccgatccacaggagtcgaagacaggccgtgattgacgcccacgtgctgaccacggccctgccgcccaaagatgcgaccctgggggcttgagagaattgactcgttgccgcccgtgcacatagagcgagtctatgaggcataccccacgggagaaccacatgtggcgcgaacccgagtaccgcatttgcctctcgccaatggggaccctccttccgaaggcatcggaactttaatggcgtgaaccagggggcgattcttcgcatgctcaaggtgaagccgaagagtcgccttgtaggaaggaa

SEQ ID NO: 512133 - DNA, 260 bp, Homo sapiens
  misc_feature (37)..(37): n is a, c, g, or t
  misc_feature (149)..(149): n is a, c, g, or t
ggggccccaggtaggacagcttggatgttgggccccnagccaggggcctcggggttgggggcagcttgggtgctagcaaaaggaagtttctgggggggggcatgcggggagacccagcccccctgtggggggggcttttttttccaggntgggccttggcctccagaggcctttttgcccaccaacccctttgtattgagaggggcctggacccctcctcttcccctcagtgaaaacaataaagacaaatttttgttgca

SEQ ID NO: 512134 - DNA, 653 bp, Homo sapiens
  misc_feature (628)..(628): n is a, c, g, or t
aattcgggagtttcgccgccgcagtcttcgccaccatgccgccctacaccgtggtctatttcccagttcgaggccgctgcgcggccctgcgcatgctgctggcagatcagggccagagctggaaggaggaggtggtgaccgtggagacgtggcaggagggctcactcaaagcctcctgcctatacgggcagctccccaagttccaggacggagacctcaccctgtaccagtccaataccattccaccttattaccagaaaacttagccaaaaccatttacccaaataaagtttaggcgatagaacttaaacaacaaaacaaccaaaacaaaaaaatctttgttgggcggcgtcggagcgctgagaaaaaaagttttaaacacccttgcgtgttggggcgccgcccgggccgccagttgtggttaggttggaaccgtgggccactaggcgtgtgctcccaacgaggcaaactccggcgccttgacatctgggtgtttgggtttcttccaccaatttaaaaaagcgcgcgggggcgacaccacgacgctgttgtggaccacaatctcaggagggagttcggcagggcacattgcagggcactctacaccaacgagacgtccagagggagncaggatattaatagccgggccggaa

SEQ ID NO: 512135 - DNA, 1027 bp, Homo sapiens
  misc_feature (206)..(206): n is a, c, g, or t
  misc_feature (270)..(270): n is a, c, g, or t
  misc_feature (305)..(305): n is a, c, g, or t
  misc_feature (319)..(319): n is a, c, g, or t
ggtacagaagttagccgggtgtgctggtgcacacctgtggtcccagctgctcgggaggctgaggtgggaggattgcttgggcccgggaggtggaggttgcagtgggccgtggtcatgccactgcatctccagcctgggtgacaaggcacaaccctcaaataaataaataaatacatgttaaacatatacctttattacttcatttntgtaagagcttcagggaataggcttttttaaagggaatagacttatagatcaattttaatattngacttatagaattttatgacactaaatggataatngtaaagtttgagtngggacccattttgtaagacattcaggctataaacaaggtaataaatcacactcttccagttctacgtcccaatttaatcggtttacagttcggtggctgtcttttttttgtgtttatttttctgtggacacggggggttccccattgggaccaccgggcgtcgggcggcgcctggtggtagaagtactgggcgcacacagcgggcgctccccaccatcgagggacctcgaggataattgtactcagaggcatccggtgcgtcggcagaacaagggcgtagggaaacgagcactgtccacgaccgcccataacaccccccccgggaagagaaaaatgcggcgaaccacacgggggggacaaacacgacgacatctgccccaatagttaaacccggggaaagtggccacaacacaccctatcggtgcgcaccaaagtgatcacccacactagagtgagggacccccacgcagtaaggggctcaccgacagaataccgtggcaaaatcgcggggccacacataggccccccgggggtccccgggtggagcaggcccccctctgcaaagagaaccccggggggcaactacagccccgtgtgcacacgacgatggggcacaaacaacaacagcaacatcgtggcctaccaacgccgagtggcgacacaaaaggcggcgcgtagagcgcgacaactaacgctcgaccgataata

SEQ ID NO: 512136 - DNA, 256 bp, Homo sapiens
cacccccttcctatatacggaggtaacccctatcctgaatctatttctattattccaattagaaatttcaactttattgcatgtgcctaatccacatcaatcctacattagtttaaaaactccattcaaatagtattactctgacattatcattctggaagtatttctaaaactgcatgtgtctatgtcatgtgtagtctcactgagctaattttaactgctgcatgcggtttcactgttttaaaaaaggaaggat

SEQ ID NO: 512137 - DNA, 432 bp, Homo sapiens
gtttttttttttaaatttttggtaattcctaagcaaccccctttggacttttcctaactccaataccccacccctggcctttttttatcccaaatgttggtgatgcggagagggaaggtcattttaaggggacctcccggcgccgaatccacctttgggagaaaaataaagttttttaaccccccttttaattggaccataaattacgcctttaacccctaaataccaaggcgcctcccaccgggacatgggggcagccgggaccccattttacagaatttctgggatttctccgttgtaaaacctgatttcctcctgcatgcctccttgaattccccaaatgggtcgccaaacaaccaaatggagaaaaaaagttttacttccttgcattcttctacctttaaatagcaccccctctaccccctctagagc

SEQ ID NO: 512138 - DNA, 966 bp, Homo sapiens
  misc_feature (660)..(660): n is a, c, g, or t
aattcgggagtttcgccgccgcagtcttcgccaccatgccgccctacaccgtggtctatttcccagttcgaggccgctgcgcggccctgcgcatgctgctggcagatcagggccagagctggaaggaggaggtggtgaccgtggagacgtggcaggagggctcactcaaagcctcctgcctatacgggcagctccccaagttccaggacggagacctcaccctgtaccagtccaataccatcctgcgtcacctgggccgcacccttgggctctatgggaaggaccagcaggaggcagccctggtggacatggtgaatgacggcgtggaggacctccgctgcaaatacgtctccctcatctacaccaactatgaggcgggcaaggatgactatgtgaaggcactgcccgggcaactgaagccttttgagaccctgctgtcccagaaccagggaggcaagaccttcattgtgggagaccagatctccttcgctgactacaacctgctggacttgctgctgatccatgaggtcctagcccctggctgcctggatgcgttccccctgctctcagcatatgtggggcgcctcagtgcccggcccaagctcaaggccttcctggcctcccctgagtacgtgaacctccccatcaatggcaacgggnaaacagtgagggttggggggactctgagcgggaggcagagtttgccttcctttctcccagggagcaataaaggtttctaaggagaatgaaagtagagcgtacaagaaacacaatacagcacgcacgaagggacaacaaattgagaggaggggcggacaaacagcaagggcatgcaacaaggggcccagcgtgaccacagagccggttactgtgaccacgcatatggtgtgacacaggtgggcaaaacacgcgcgttccccctaaagtgagagccaatcaacgcgaagagccagtaacccgacatag

SEQ ID NO: 512139 - DNA, 1074 bp, Homo sapiens
  misc_feature (768)..(768): n is a, c, g, or t
cgtttcataatatgtttcttcacatgtttcaatcatcataaataaaaatagccaccatgccgccctacaccgtggtctatttcccagttcgaggccgctgcgcggcctttaataaggagcaaaagtactgcgcatgctgctggcagatcagggccagagctggaaggaggaggtggtgaccgtggacagtaaagggtggaataggtaggagacgtggcaggagggctcactcaaagcctcctgcctatacgggcagctccccaagttccaggacggagacctcaccctgtaccagtccaataccatcctgcgtcacctgggccgcacccttgggctctatgggaaggaccagcaggaggcagccctggtggacatggtgaatgacggcgtggtgagggaaaaaataaagagtagaggacctccgctgcaaatacatctccctcatctacaccaactatgaggcgggcaaggatgactatgtgaaggcactgcccgggcaactgaagccttttgagaccctgctgtcccagaaccagggaggcaagaccttcattgtgggagaccagatctccttcgctgactacaacctgctggacttgctgctgatccatgaggtcctagcccctggctgcctggatgcgttccccctgctctcagcatatgtggggcgcctcagtgcccggcccaagctcaaggccttcctggcctcccctaatagagaaagaaaaagtccagagtacgtgaacctccccatcaatggcaacgggnaaacagtgagggttggggggactctgagcgggaggcagagtttgccttcctttctcccagggagcaataaaggtttctaaggagaatgaaagtagagcgtacaagaaacacaatacagcacgcacgaagggacaacaaattgagaggaggggcggacaaacagcaagggcatgcaacaaggggcccagcgtgaccacagagccggttactgtgaccacgcatatggtgtgacacaggtgggcaaaacacgcgcgttccccctaaagtgagagccaatcaacgcgaagagccagtaacccgacatag

SEQ ID NO: 512140 - DNA, 874 bp, Homo sapiens
tttagtctggcctctgttttaattggccgattggccttcctcgcgctccctgttactgtgcgttctgtccccgtggccttgctgccctgcgtctgtgccctggctcctgctgtgctgtgcctatgtcctgatgtgctccttcagcgtgagtgtgcctgcacaccaatggctgccctgatgtgttgcaactgtgagctgtgcctgatgctgcctgtgtaacctggatgcatgcacctaagaatgtgacctgatagcccctgctgtgtgatggtgttgcatgatgtgcttgtggcatgagtgcctgtgtgctaatgtgacctgctgtgtgccttcgtgtgtgtgcttgtgctttttgtgctcacctgcactcctgctcttgtgatgcagcttttgtggtgcctgactgactgggtggtcgcaggatgtgtccttgggccctgccgtggctgatggtctgttggcagggagattcatctgatgtgtgccctgctcttgagtgactactgacagtcacctgcaggttcgaatggctgcactccccgaaatgttgcggcatgattgtgtcaccgagtgtcgtcatcaccagtggatggaagcggagcggattcgcagcgtagctgaaaatggtgctctccctgggaggatctgacttgaggggcatccattctggacttgcactcagtgtgccctgtcttgtcgggaagcactttgttaaccttgtacagattacttcgggggataaaaataccagaacatcttctcagaggaggacttccggttataccgggagttgctggcagaaggtcagctcaccattgctgaagctttggcatcagcgcatctcgctgatttgacaaggcccacttcttctccg

SEQ ID NO: 512141 - DNA, 107 bp, Homo sapiens
gatcacggtctcatctgtactgtgttaagcacctatagtgtctgatctcagcttgaaataagtttacatttatcttccaattacagtaatgctgacgaaacagcaag

SEQ ID NO: 512142 - DNA, 745 bp, Homo sapiens
  misc_feature (439)..(439): n is a, c, g, or t
taattatactttaagttttagggtacatgtgcacattgtgcaggttagttacatatgtatacacgtgccatgctagtgcgctgcacccaccaactcatcatctagtattaggtatatctcccaatgctatccctcatctacaccaactatgaggcgggcaaggatgactatgtgaaggcactgcccgggcaactgaagccttttgagaccctgctgtcccagaaccagggaggcaagaccttcattgtgggagaccagatctccttcgctgactacaacctgctggacttgctgctgatccatgaggtcctagcccctggctgcctggatgcgttccccctgctctcagcatatgtggggcgcctcagtgcccggcccaagctcaaggccttcctggcctcccctgagtacgtgaacctccccatcaatggcaacgggnaaacagtgagggttggggggactctgagcgggaggcagagtttgccttcctttctcccagggagcaataaaggtttctaaggagaatgaaagtagagcgtacaagaaacacaatacagcacgcacgaagggacaacaaattgagaggaggggcggacaaacagcaagggcatgcaacaaggggcccagcgtgaccacagagccggttactgtgaccacgcatatggtgtgacacaggtgggcaaaacacgcgcgttccccctaaagtgagagccaatcaacgcgaagagccagtaacccgacatag

SEQ ID NO: 512143 - DNA, 308 bp, Homo sapiens
  misc_feature (7)..(7): n is a, c, g, or t
  misc_feature (111)..(111): n is a, c, g, or t
  misc_feature (113)..(113): n is a, c, g, or t
  misc_feature (256)..(256): n is a, c, g, or t
gtgccgntcccccagcactgccagctcacctgggctgtgcttgaattcttcgctgggcctcagctgcctccccgtggagcagggcgtgggacttgcaacccgccatgcctnantcccccccttcccctgccctgctccctcatggccagagcctcccggacgggcgccgcccctgctctgcaaccagtcccattgaccgcccaagggctgaggagtgcgggggcatggtgtgggactagcaggcagctccacccanggccccagcatgggatccagtaggcaaagccagctgggacttcctgagtcgg

SEQ ID NO: 512144 - DNA, 555 bp, Homo sapiens
atcctcgtctcatagaagtcgatcgcccagctacacataagccgtatctccaggcagccatatctcacaggcctcggagaactcaccctcctccatgccctcacccacataccaatacacaaacgccctcttggaatacatcaggtcgaacttgtaggtaccaggcgggcccaggcctacggcgatagcagacgtgtagctacagcatgcacacatgcacgctgaaccttggccaggtcacccccaggcaccacaagaggaaaagctagtaatagataccaaccttgaagcctagtgagaaccagttccacaaactgaatgcttgcgcttggtctatgacatggcggcaataggcagcagtatgacatccttagacaccatatcttccacaggtacagccaggcagcaagccatgtacctatccgttgccgaggatccacactttaaacatctaggtaggcaggctccaaagcaggcattggtgcactctgccaccgacagctgctccgtggtatgcctttactggcagagattactggtgcataggtagcccag

SEQ ID NO: 512145 - DNA, 157 bp, Homo sapiens
gatcaaaaagcgagagctgatgggtacgctaaaaaggcggctctctgcaaaacagaagtactcaaggcaagtcgggcacaccctctggaagctctgccgacgaggacccttctcctcctcctcagcacccatagtcttaaagacgtgagaactcaga

SEQ ID NO: 512146 - DNA, 172 bp, Homo sapiens
atattacgtggcaagagtaaaataaatagttcagatgactactaaagtcaaagtcattaaatctggaagtaaacacgagaattcattctggggaaatcagtgctgtcgtgtgtaagaggttactgcgtgtgctcagtgagttgaacacgtgtggtgcatgtatccaggatac

SEQ ID NO: 512147 - DNA, 149 bp, Homo sapiens
ggcagttctgagtcccgcccggcgtgcgcggagcggggcacccagcagcggaggcgcggcgcgcagcacacccggggacctattgttccatgttgcggagcgaggaggtggccctggtccagctttttctttccacagggggtgcctac

SEQ ID NO: 512148 - DNA, 323 bp, Homo sapiens
  misc_feature (37)..(38): n is a, c, g, or t
  misc_feature (46)..(46): n is a, c, g, or t
aggcagggatgtgtggtttcactgtcattttcaatgnngcactggnagtcctagcacctgcacgtggcaagaataagcaattattaggcaagtagattggcaagagtaaaataagtgtcctgatttacagataagctgattgtctacatgaaagtcacaaggatctaccagataattcctaggacttgtgagttcagcaaggtctctggataaaagattatcacccaaattcagttacatttgtatataatacaaaaatcatggtgaaacccaaattaaaacataatagtttttacagttgcttcaaaaagtgaatactaggg

SEQ ID NO: 512149 - DNA, 213 bp, Homo sapiens
tgacgtgccgttgcacatggaagtctgtcagaggattacgtgcggtctaggtgaggaatccgcggggggacatcacgaatcgcgtggaccacatcggatctgggtacacaacgcgtctcctcgatcctaggcaatgatggtgaattctatgcccaagatacacgtagatagtgattggcagcggtaggatcctcggtggagcacgcctacgcg

SEQ ID NO: 512150 - DNA, 298 bp, Homo sapiens
ctaccctgcccacattacacccactgacccaacgcctgagatcagccacacccccagacagtgggggccacataccagacatcagagcagggcacctagagacacacgaatcactccccacaaaccgataatcacagagccagaatgcactgctctgggactaaagaataggtaagatcaggccaccactgaggcccaaatactggcccaggtggccgcctagtccccagcaaccacagcctccactaataaccacaccctaagccacccaagaaatcatacagagcctacagtacaa

SEQ ID NO: 512151 - DNA, 885 bp, Homo sapiens
gcatccgcttgtggaagtacgccctggacatgcaatcagagcaacctggagcctctgagccccatgaccgccagacagtttcctctccttcgcggaactcttctcctacgtgcttcaggaccgggccgccaaaggcagcctgggcgacccagatcggctttgcgtgacctcatgggggttctctagccaaaggggtccgggaagtggaacgggccctgcagctgcccagagagccccggagactcagcccagttcaccaaggcgctggtcatcatcctccaactgctctacctgctgtagaaagtggagtgcacccccagccaggatctcctgaagcaccagactcgtctaccgcctgcttcaagtgcgcgcccgaggggtccagaacggcttcatccccgtctgcacatggctgtgagactaatggacaccacaaactgtgggccgctatcccgtggtgctagattccccttccctgcacgtggtcaaagtgctgctcgactgtggggccgacccggacagcaggtattttgacaacaacaccccgatacacatagcatcccagaacaagtgcccggccatcatgaattgccgctgatcgaagcaggggcccatcatgtggacgccaccaatgccttcaacgaatgacggcctatcgagctgcttggactgaagaatgcttgctgacgcatggggtaccattgcaggccttcaactacgtgaccctgcagtgccttgccggtccgggccctggataagaacaagatcccttacaagggcttcagtcccggaagatctggaggcgttcattcgaaactgtactgaccttgccagaaacgcgtgtacctctacctctcccctctctggctgaaatggggggaaatc

SEQ ID NO: 512152 - DNA, 326 bp, Homo sapiens
catgtgatctcacgactgatctaaggccagatatgagcccatgaatcacatgtcagtcacttggccacagctacagcatgaggcctgagatgcccacatcacatcacatgctgagcacaggtggcccagttcccggtgcagctgcccagcctccggtgcgaagagccggacctgcagagcctggaggcccatgatagaggtggtgtggtgcagcagttcacatgcaagatgtgccagtaccggagcagcaccaaggccacactgctgcgcaaaatgcggggaacgcaacttccgtccagtagcagcagccgcaagcagcagctggt

SEQ ID NO: 512153 - DNA, 108 bp, Homo sapiens
tcagcggtaccaactgatgcgaggaagaactatagacagtaaagagtaaaggatgaggaaaggaggggaaaaaaaaagagaacattttgagggtttcttagcgatagt

SEQ ID NO: 512154 - DNA, 1030 bp, Homo sapiens
  misc_feature (136)..(136): n is a, c, g, or t
  misc_feature (224)..(224): n is a, c, g, or t
  misc_feature (499)..(499): n is a, c, g, or t
  misc_feature (518)..(518): n is a, c, g, or t
gcgaagagattcttagtgaacgccgtaccagccgcgtctctcaggacagcaggcctcctgtcgcttctgtacgtggcgccgcatcatgccgtgcacctaccgtccccgtcgaggttcttgttttgctgaaattccnacaagtaaacgtatgccagagacggacctagtgcaagagcattagtcgatgcaactctcctccacaatatgtatgcacattcacatgnacacactacttgggacggtgtggcctttgctaacaggctcacactctgccttgcctatatcctctactggaagaagatggatagcttatagagagaactcactggaactataagaatcatcagctatgcgtgagctgattcttggtcgcgccgggaattctaacataacggaggagttcgatgggcctctgaaatgaaaccttgacgaacactcacctaatactaatggtcagaactcttaccaatgtatgcgtagtacgaacagcacgaagcanaacaatatatcgacttggntttcctatgcacgtaccatggtccacctgggatcggaagatgccttgttatgacatatataaattttccccaaaggagttcagctcgtgatccaccaaaacgaagggagaacccctagagaggttaggtacttcccagttcaagaattgagtactcgtgcatggtatggcaatgttattggtgcgagcagtccagggggcctgatgcgtgcaacaagggggaaccttccaagacgcaggagagaattttgcctgctctgtgactcgaaatgagtcagttaagactttaacaaggcctgattggaccttgtgggtctcctgtggccaagagaccccaaaggggtaaaacaaagggaatttcaccaatcttagcaagaaccattgctggttggggagatactgggctttattggcaggcaaccttgaagtttaaattacaaagggcgacaattcaataactcgttggaattccacgaaggcacgattgggttgtgggagcaatggggccatact

SEQ ID NO: 512155 - DNA, 97 bp, Homo sapiens
acggccgtgtattactgtgcgagacgactcggtagtggtggttattaccttaaacctacctggggccagggaaccctggtcaccgtctcctcaggga

SEQ ID NO: 512156 - DNA, 185 bp, Homo sapiens
ggcattcccgcgtcaaccagaatgatttcccccggagctgagggattttcgataaagtaaacattcgcaatctggacggtcagcccgtaaacaccgtccgccgctttaaaaccgacaccgcttttcaatgaaaagagcggcataaacggatcactcatcatggcacctcctctgatgccgtcgac

SEQ ID NO: 512157 - DNA, 416 bp, Homo sapiens
tgggtttaaaaaatggtggtacctttaaaaatgaaaaatttcctctcttggttggcaattatctggggtgttttctttgtaattgtggctcaattgggtcatcatgaagggtaaaaaaagcgaggtgccctttttatgctgttgtttagggtcaggccctctccacccatggtgccactgatttgctgtgtgaccctgggcaattcatcttacttataaggtgcctcagtttcctttctgtcaaattggggtataatattattgccctacctcaaagggcagtttggaggcttgactattgtttttaagaaggcttttggggatccttcagcccaggatttctcaagacctgagttttttttatattaggattgtccaccatgaatttgatacgtccgtgtgtcccagatgctgtc

SEQ ID NO: 512158 - DNA, 177 bp, Homo sapiens
attcggcacacgggagggctgtcaacggtgatggtggagtattccacgtcccgcggctccgagcgaggtggacatgttcgtggctcaggccgtgctacagtttctctgtttaaaaaacaaaagtagcgcatcggtggtcttcacgacgtacacccagaagcacccgtccatcgagga

SEQ ID NO: 512159 - DNA, 101 bp, Homo sapiens
  misc_feature (38)..(39): n is a, c, g, or t
acataaaatacactattaataatgataactgatgagcnnatgtaaaaatcacacaaaaaaatttcataatgttttaagaaagtttgcgaatttgtgttggg

SEQ ID NO: 512160 - DNA, 241 bp, Homo sapiens
  misc_feature (39)..(39): n is a, c, g, or t
  misc_feature (104)..(106): n is a, c, g, or t
  misc_feature (111)..(111): n is a, c, g, or t
  misc_feature (120)..(120): n is a, c, g, or t
  misc_feature (149)..(149): n is a, c, g, or t
  misc_feature (172)..(172): n is a, c, g, or t
  misc_feature (179)..(179): n is a, c, g, or t
  misc_feature (187)..(187): n is a, c, g, or t
  misc_feature (193)..(193): n is a, c, g, or t
  misc_feature (198)..(199): n is a, c, g, or t
  misc_feature (207)..(207): n is a, c, g, or t
  misc_feature (229)..(229): n is a, c, g, or t
  misc_feature (231)..(231): n is a, c, g, or t
acagcattataaggaggggaaggccaagcccccgggggnccggccatttgccctggacaaatttgtgcgctgagccaaactccagggttgcctgggaacagtcnnnccccnagatccccngtagggaaatgagtgttccctggaacaangaggtgggggcagtgtggccccntcccccnctgggggnggacanctgtnncctggggngggttggtattaaaaaggaaancnattttttgga

SEQ ID NO: 512161 - DNA, 760 bp, Homo sapiens
cccgggtggctgggctgcatgcccctgcggctggcggctgggatgttcgtgcaggaggagaacgatcttcgctgggcaatgtgctgcgtgctgcacatctgcgcgtcctgactggcgccgagtggctggtggaggccatccgagagacacctcggtggagaagctcaaggaggcgctgcctcaagctactgtgctcatgggagcttagcaagtatcccacagaagtataacccatcatagattaatccatcgctgcctcagagagtggtgctgactgatgccaggaccatcctggaagagaacatccaggaccacggatgtcctattattgataaaaaagcgtgctccatcacgcacttcccaagatggctgagtgtctcagcagacagaaaatgacacgaacaagaccagaactgctccagataacgaggccatactgcggtgccaccgtcgagcctgccctcctacaagcatggaccgtggccgcggtccagaccaacatgacagacttccaggacagaactccggaaggatactggtgtctctcatcgaggtggcgcagacctgtagccgctgaacccggcatgcgggtggacttgcttatgcaaggggaatgccttgctggcgacgacgaggatagcgtgtgcgcgagctgcctggggggtcacggagatggcttccgggaccatgcacgaggcctttgtgacccgttttggcctcggcctggtggcctgacgccaacccgcattagccctttggc

SEQ ID NO: 512162 - DNA, 290 bp, Homo sapiens
aggtggcaacgtaatggcgtcccaggtgctcaggaggctgaggctggtagactgacatgaatctgggaggcggcgtttgcagctgatgagccacgtgctttccagtccagcctggtgtggcagagcaagactctgtctcaaaaaaaaaaacaccaaaacaaaacaaaaaaaacactcaaatctcaacagtaagaaaaacaccagataatccatttagaaattgtgcaaaaaaaacattaaagatatttcccccaaagagattatacaggaaggccattcattatggcccc

SEQ ID NO: 512163 - DNA, 392 bp, Homo sapiens
  misc_feature (2)..(2): n is a, c, g, or t
  misc_feature (17)..(17): n is a, c, g, or t
  misc_feature (42)..(42): n is a, c, g, or t
  misc_feature (85)..(85): n is a, c, g, or t
  misc_feature (194)..(194): n is a, c, g, or t
  misc_feature (240)..(240): n is a, c, g, or t
  misc_feature (306)..(306): n is a, c, g, or t
  misc_feature (384)..(384): n is a, c, g, or t
tnaattccataagtggnaaagtcaaactgagaatatttgtcnaaatattttctccttattaatatgggtgtttagaatgtgagcnacatctttaatataggaattatgggcccaggtgcagtggcttatgcctataatcccagcacttctggaggcagagacaggtggaatcgcttgagctcaggaattcaagnccagcttggtcaacatggcgagaccctgtctctacaaaaaaatacnaaaattagctgggcatgatggtatgtgcttgtagtcccagctacttgggaggctgaggtgggaggntcacttgagcccgagaggtcaaggctacagtgagctgtgattgcacagctatactccagcctggccaacagagcaagnccctctca

SEQ ID NO: 512164 - DNA, 155 bp, Homo sapiens
gttccagggccaggctggatgccacatgcaccccattatgccgcaggcgccctacccatcttcaggcagcctatgggacgcaggccccattctgtccctcggtcgccgtgttgccggaggtgggtccgtcgtccccaatagtcgtgctcgctcag

SEQ ID NO: 512165 - DNA, 240 bp, Homo sapiens
aggatcatcagaatatacaatatgccggaataggggtcgtgtctcctagcctaagaaacttaaaagaaatatcttttgacacaaaacacaaagatgttttccaaaacaattgacatactgatacattacgcctttagcagtagagctcaatacataagctaacctattgtgcacaaactaacattaatataatattatatatactattactgcatagagtattatatagactttagtagc

SEQ ID NO: 512166 - DNA, 448 bp, Homo sapiens
  misc_feature (345)..(345): n is a, c, g, or t
  misc_feature (362)..(362): n is a, c, g, or t
tgagtcgaaagaggcgacgaaatgcaggcaaggacaggagacatctccctttgagcaaagagtaataaggaactatcctctgctctgccactgccccagggagacatggatctgtgaggacagatttggccacggctggtttccgttcaagggcaaggatcacagctgcccttgaatctcattgcctcagagaagactagagggctcttggactatcccgaggccaaccaaaaaaaaattcccacctccccccaacccaaaaaaaccgaattgtaaaagtgtaatatttttttttttttttccccccccaacccccccgaaataagaggggagcaaaggagaaanaaacccccaaaaaaacncccagagggattctgttcgtgactcccagggctgggacattatgtaggagccacttcataaacattctctttactcataaaaaaaa

SEQ ID NO: 512167 - DNA, 2726 bp, Homo sapiens
ggaccccgcaggtgattgggggcgtagcctggagtgagggtttggctggtgtagcttggagtgaggccccctggcgtggagtcttgaggcctgctgagggcgtgagatggcatgaggcgaagagagggccatggcaccgactccgagatgggtcaaggacccgtacgggagtcgcaatcctcagaccctcccgcgctccagttccggataagcgagtataagccgctgaacatggcgggagtggagcagcccccgagccccgagctgcggcaggaaggcgtgaccgaatacgaagatggcggggccccggcgggagatggcgaggcgggcccccaacaggcggaggaccacccccagaatcctccagaagatcccaatcaggaccccccagaggatgatagcacctgtcagtgccaggcgtgcgggcctcaccaagccgcgggtccagatcttggttcctctaatgatggctgccctcagctgttccaggagcggtcagtcatagtggagaactcctcaggctctaccagcgcttctgagctcctcaaacccatgaagaagaggaagcgcagggaataccagagcccatcagaggaggagtcggagccagaggccatggagaagcaagaagaaggaaaggacccagagggacaacccactgctagcaccccagagagtgaggagtggagcagcagccagcctgcaacaggtgagaagaaggaatgctggtcgtgggagtcctacctagaggagcagaaggccattactgctccagtcagcctcttccaggactcccaggcagtcactcacaacaagaatggcttcaaactgggcatgaagttggaaggcattgaccctcaacacccgtccatgtacttcatcctcaccgtggctgaggtatgtggctatcgcctacgcctgcactttgatgggtattctgagtgccatgacttctgggtcaatgccaactcccctgacattcaccctgctggctggttcgagaagacgggccacaagctgcagcttcccaaaggttacaaggaggaggagttcagctggagccagtacatgtgcagcacaagagctcaggctgcccccaagcacatgtttgtgagccagagccacagtcccccacccttgggcttccaggtgggcatgaagctggaggctgttgaccgcatgaacccgtcccttgtctgcgtggccagtgtgaccgatgtggtggacagccgcttcctggtgcactttgacaactgggatgatacttatgactactggtgtgatcccagcagcccctacatccacccagtgggctggtgccagaagcaaggaaagcccctcacccctccacaagactacccagaccctgataacttctgttgggagaaatatctggaagaaactggggcctctgctgtccccacctgggccttcaaggtgcgaccccctcacagcttcctggtcaatatgaagctggaggctgtggaccgcaggaacccagccctgattcgcgtggccagcgtggaggatgtggaggaccatcggataaagatccactttgatggctggagtcatggctatgatttctggatcgacgctgatcacccagacatccaccctgccggctggtgctccaagacaggacatcccctgcagcctcctctcggacccagagagcccagctctgcctcccctgggggctgtccccctctcagctataggagcctgccccacactaggacctccaaatacagctttcaccaccggaagtgccccactcctggttgcgacggctctggccatgtcacaggcaagttcacagctcaccattgcctctcaggctgcccactggctgagaggaaccagagccggctgaaagcggagctgtctgacccggaggcctcagcccgcaagaagaacctctcaggcttctccccaaggaagaagcctcgccatcacggccgaattggacgccctccgaagtatcgaaagattccgcaggaagatttccagaccctcacgcccgatgtcgtgcaccagtccctcttcatgtcagccctgtcggcccaccctgaccgctcactctcagtgtgctgggagcagcactgcaagctcctgccaggagtagcgggcatctcagcctcgacagtcgccaagtggaccatcgatgaggtcttcggctttgttcagaccctgacaggttgtgaggaccaagcacgcctcttcaaagacgaggtaaggtgcaagtgcagagtgggagacagagccggggtcactgtccttaagacggcaggaagcaggtgccctccccagcgtcacttctgctaaggagggacccgtgttgccccaccaggtaaggtgcaagtgcagagtgggagacagagccggggtcactgtccttaagacggcaggaagcaggtgccctccccagcgtcacttctgctaaggagggacccgtgttgccccaccaggcaagaatagtcagagtgacccatgtatctgggaagactctagtctggactgtggcccagcttggggaccttgtgtgctcagatcatcttcaggaaggaaaaggcatcctggagacaggagtccattcactcctctgctctctacccactcatttgcttgccaaacttagctttgccagtgatagtcaatattaaagtgtacttttttcccctttaatccaatatagttgataattaaagtgtattttgaatgac

SEQ ID NO: 512168 - DNA, 143 bp, Homo sapiens
ttagaggatcctgttgttttcttctccactgcagcggtgcttgtggggctgggatgagccctctctgtccccaccggccctccttgccaagccattcctgtgtggctcccgcaggcctgaactcacccaggaatggcttggca

SEQ ID NO: 512169 - DNA, 946 bp, Homo sapiens
  misc_feature (63)..(63): n is a, c, g, or t
  misc_feature (65)..(65): n is a, c, g, or t
  misc_feature (72)..(72): n is a, c, g, or t
  misc_feature (77)..(77): n is a, c, g, or t
  misc_feature (85)..(86): n is a, c, g, or t
  misc_feature (88)..(88): n is a, c, g, or t
  misc_feature (96)..(96): n is a, c, g, or t
  misc_feature (99)..(99): n is a, c, g, or t
  misc_feature (102)..(103): n is a, c, g, or t
  misc_feature (106)..(107): n is a, c, g, or t
  misc_feature (109)..(110): n is a, c, g, or t
  misc_feature (112)..(112): n is a, c, g, or t
  misc_feature (125)..(127): n is a, c, g, or t
  misc_feature (129)..(130): n is a, c, g, or t
  misc_feature (132)..(132): n is a, c, g, or t
  misc_feature (135)..(135): n is a, c, g, or t
  misc_feature (139)..(139): n is a, c, g, or t
  misc_feature (142)..(142): n is a, c, g, or t
  misc_feature (146)..(147): n is a, c, g, or t
  misc_feature (153)..(153): n is a, c, g, or t
  misc_feature (171)..(171): n is a, c, g, or t
  misc_feature (192)..(192): n is a, c, g, or t
  misc_feature (196)..(196): n is a, c, g, or t
  misc_feature (200)..(200): n is a, c, g, or t
  misc_feature (202)..(202): n is a, c, g, or t
  misc_feature (205)..(205): n is a, c, g, or t
  misc_feature (209)..(209): n is a, c, g, or t
  misc_feature (211)..(212): n is a, c, g, or t
  misc_feature (223)..(223): n is a, c, g, or t
  misc_feature (228)..(228): n is a, c, g, or t
  misc_feature (230)..(230): n is a, c, g, or t
  misc_feature (233)..(233): n is a, c, g, or t
  misc_feature (235)..(235): n is a, c, g, or t
  misc_feature (239)..(241): n is a, c, g, or t
  misc_feature (250)..(250): n is a, c, g, or t
  misc_feature (259)..(259): n is a, c, g, or t
  misc_feature (262)..(262): n is a, c, g, or t
  misc_feature (268)..(268): n is a, c, g, or t
  misc_feature (270)..(270): n is a, c, g, or t
  misc_feature (274)..(275): n is a, c, g, or t
  misc_feature (277)..(277): n is a, c, g, or t
  misc_feature (279)..(280): n is a, c, g, or t
  misc_feature (283)..(283): n is a, c, g, or t
  misc_feature (286)..(287): n is a, c, g, or t
  misc_feature (302)..(302): n is a, c, g, or t
  misc_feature (305)..(305): n is a, c, g, or t
  misc_feature (314)..(314): n is a, c, g, or t
  misc_feature (319)..(319): n is a, c, g, or t
  misc_feature (386)..(386): n is a, c, g, or t
  misc_feature (389)..(389): n is a, c, g, or t
  misc_feature (392)..(392): n is a, c, g, or t
  misc_feature (395)..(395): n is a, c, g, or t
  misc_feature (399)..(399): n is a, c, g, or t
  misc_feature (407)..(407): n is a, c, g, or t
  misc_feature (422)..(422): n is a, c, g, or t
  misc_feature (425)..(425): n is a, c, g, or t
  misc_feature (427)..(427): n is a, c, g, or t
  misc_feature (430)..(430): n is a, c, g, or t
  misc_feature (435)..(435): n is a, c, g, or t
  misc_feature (466)..(466): n is a, c, g, or t
  misc_feature (494)..(494): n is a, c, g, or t
  misc_feature (499)..(499): n is a, c, g, or t
  misc_feature (501)..(501): n is a, c, g, or t
  misc_feature (542)..(542): n is a, c, g, or t
  misc_feature (880)..(880): n is a, c, g, or t
  misc_feature (938)..(938): n is a, c, g, or t
gcctgcgagcgctgctcatggcgctctatgagctcttctctcacccggtcgagcgcagttacngngcggggntctgntccaaagnngngctgttcntgntgnnggnngnngngctcacgtacatnnngnngntgntggnggncttnnggagcnacgggttttggctgaagnggagagctaggaggaggaggngacngtgngnttncaanannaggtggtggtngtggncntgntnggannngaaagggangggttcctnggntggagnangttnncngnnttnaanngggtgcaaggggatngcntgcgcgtgncgctngtttcgactagagaagaagacaggaaccaggatgggaagacggacatgttaaattttaaggtggagnttnccntgnagtncacggagnacgttctcggtgtgnagntnatnctgantttgtcctatggattacacaggatggggacnctggtgatggagaggatggggtttgtgnagtgntngtttggtgtcccgggatcacagttataggtgaacggagacntgaggctgcagcagaagcagccgctgagctgtggtggcctagatgcccgatacaacatatccgtgatcaacgggaccagcccctttgcctatgactacgacctcacccatattgttgctgcctaccaggagaggaacgttaccaccgtcctgaatgatcccaaccccatctggctggtgggcagggccgcagatgctccatttgtgattaatgctatcatccgataccctgtggaagtcatttcttatcagccaggattctgggagatggtaaagttcgcctgggtgcagtatgtcagcatcctgcttatcttcctctgggtgtttgaaagaatcaanatcttcgtgtttcagaatcaggtggtgaccacattcctgtgacagtgacgcccggggngattgtgt

SEQ ID NO: 512170 - DNA, 279 bp, Homo sapiens
gtacagcctcttccagatcattgtgtgaaccccagacatcagtttctgctaatttactcctaactgtctgtcttaatattatattatttttcattgttcttaggaagtttcctagtacacaagcacttttcattactccactaaatacccaagagggaatctctgcacatctccaggatttgtttcctgtactgcttttttctctccagttttctgtcctgtgatctctatctgctttggtttcacatggccactcaatactcacatggccactcaata

SEQ ID NO: 512171 - DNA, 616 bp, Homo sapiens
tctcttgggacagaagcagcaaaaccccatatcaaagcagacaaactctctataaatgtgcatcatcatctattttggcaaagattgatatctgaccccacagtgtactgagagaatgcactggttccagagatatggtaaactggttctcctggacaggtaaacgtgctggttgtgtcttccataagttgttgatcactagcagcacttttgagatcactgattttcccacacaaattgtgtaagtggactcagccaaaactggcattttacacataaaggtgcataaagtgaaattacttggtcacttggtttaacgttggtaattctgggcccaatcctttccccaatccttacaccttaatggccaccgttcattggaaaagttaggccttcaaattaagattcgataccatggcatcagtatggcacagggaggtagcaatgatctgaatgcgaacttcatgagccttggggggagctacttcaaccttttcaatgcaaaggggcttgcctgcttcccaggcgatggctgctttgcatttaataactttgcccttggtgcccatttttctttgggaaactgtgttggaagtttctttctgagttaagaaag

SEQ ID NO: 512172 - DNA, 108 bp, Homo sapiens
ccagacagagtgcaagctgacagtgaagcaggatgtatgtaggcctatgaggataacctgcactgtaatagcctaaacacaactctatatttacttacagccttatgt

SEQ ID NO: 512173 - DNA, 264 bp, Homo sapiens
ataaagtcagctttcaaaggctcagggtgggggggcctgcccgaggccataatgctcccccccccccctcctaacccctggtttgttggaataacccaaatgtttgcatccccccaagtcagtcaatttcctttttgtcccctggggggggaatggggtagggggggatactttaaagggctcctgcttaaataaattagacccgcccaggggttttttaaaaaaaatcctgccatgccccccccttaaaaataggccctttta

SEQ ID NO: 512174 - DNA, 286 bp, Homo sapiens
cgcgtcgacccctgccccctttgttttgtatccaataaatatcagcgcagcctggcattccgggctactactggtctccgtgacttggtggtagttgtccccagggcccagctcttttatctttttgtcttgtgtctttatttctatgatctctcgtctccacacacggggagaaaaacccactgaccctgtggggctggaccctacacagagcgacacttctaacggggccctgttccagaccccactgttgatccggccgcgaatttagtagtagtagtagacc

SEQ ID NO: 512175 - DNA, 846 bp, Homo sapiens
  misc_feature (254)..(254): n is a, c, g, or t
taggagtgctctaaaaaaaaccccttgtttggtaatttatggtggggggtgggaatagtaaaattattgtcctcgaaaatgacaagttaatgggcaaaaaatattaatctataaaggggtttggtgtctccagagcgggaggagccctcatttagcaacgtgaacagaaaccccctctcgagaaggacgcacttccacccccgacgtgtgcgcggtacacaccacacacacgcgcgcacgtggtcacgtgcaanataatttttacacacacacgtgaggagttgactctcctccctaagagctctccttggtgcctcaggagccaagatttccccgtgcgtggcgggcggtgccctccccaggtgccgggacataataagacagaaaggggggggacagtgctcccctgcaaaggtgggacgttcagagacacacgcctcctattcatgtagcaaaaaacagcccgtggaccactccgggcgccacaaagcccctcgtgcacacctttcgaaggggcgtggggtgccccttctctgagtggcagaaagacaacaccagcaaaaagacggggtgaacaactggcagaatccctccatacccccgaacagcctggtctgtcctccccacttccacgtctcaacagccttgtgtagcaccgggtgtcttgcaccattttgtgggctttggtgggccgaacacttggcgccgtagaccttggtgctcccgggggaggctcccctgtccaactctggcgttcccagctcctcccgggcccctcgtgttttgccaggtgtcccagggttctaaactcccgtgttcccaaagcgatcttccccccggtgaccc

SEQ ID NO: 512176 - DNA, 351 bp, Homo sapiens
ttttttttttagacagggtcttgctctgtcacccaggctggaatgcagtggtacaatcatggctccctgcagcctagacctcctgcgctcaggtggtcctcccacctcagcctcctgagtagcggggactgcagttgcatgccactatgccaggtcgatttttgaactttttacagagatgggggtcttactatgttgcccaggctggtattgaactcctgggctcaagcaatcctcctgccttggtctcccaaagtgctgggattacaggtgtgacccgctgtgcccagaagggcggacctgaaacaaagctattcatctacattagggatcccaacccttcttcttttt

SEQ ID NO: 512177 - DNA, 1589 bp, Homo sapiens
gtacggcagcatgtacaataatatattgtactaacatttgccatctgacagttcaggaatatgtaggtatatcgcttcgaaaccctctatgttctcgcgtatttgagtgaggcctaggaagaggaatagatgactatatcgactgtgttagcacttagtaggtataagtcatacagttacctgtcaaaggaggctgagatccaggtcgtgatacggacaagtcattggttggaccccttagttaggacgcaactcacacaataaatgtctttcagacaccgtcgcctggctgtgtacattagtcaatacagagaattgatagcgcctaaagagcgcagattagaggtgagtgacatacaagttcgaactgaaaattcaattagttggccctaaggagcgtacagtctatcagaagagggctaataggcccatttgacgtcccctactgctggcttgaagcacagcactagaggtgtcatgtgtgtgccaagggataaggtttagtaacttaaagcatttagagcgaaccattgggagccaatagaagctggattaggcgagcactaacacgaaacaatgggaattcagagtcggagtaaaggtcccaaaaacagcataaagcccattgccaagaaagtcccattaaagtataattcaaggcacagtcagagattaacatcattcgagaccgtaagggttggagcacgaaaggggcctcaacgaatgtcaatatacaaggaaaacccaaaagtgtagaagcagtagggcgcaaaccgagtggacagatgagcagcacacaaccagggtcaacatacgataaaaggatgaagacctgactcagatacacacaatgcacaagaaaagcaaccaccggcagtgagatatgccattataggaaggacccaacaaagagagcaagatagaaccggagagaaacaccagagatccacaaacaatataacccaacgaggaggaagcagccaacacgtagatcaaaatacacaggacgaaccaacagatattttaagcaagcggtgcaagaccacaagagaaaagaagacatactctgtacaaaaaacaggactagcactgcagaaaacagagcatacaatcattgaacgagaagcaagacgacaagagatagagccaggcgcatcaacaaggacacaatacagaacagcatgagacaaacttagatgacgcacaacagacacagaccacgctaggaggagaaaacgcacgaaacacgagagaacagagaaaaaaagtagcaaagtatgcatgagcgaactacagagaagaaataatgactgaagataaacgacaacgaacaaacagacaagtcaaaagaaacaggagaaccgcgagtcataaaaggagacaccagaagctagatcggagacgccagagaaaaagaaaagataagacaagcaaaacgcaatagatcgaaaaaaacgaaggagtagacgaagaagaaagacacagagaaacagagcatcagaaactgacagagacgagtaccacgagaaagaggaaacgagcatatacactgtctgaccgtaagaagacaagagatgggagaaggagga

SEQ ID NO: 512178 - DNA, 164 bp, Homo sapiens
cctaagtggaactgctccgtgggtgatggagctgctccgtgggtgatggagctgttctgtctaattatgatcgtgtctctgagatgatgaacaacatgggtggtgatagagtatgtagatttaccagtagagtagacggcatgctagttccactataggcgggc

SEQ ID NO: 512179 - DNA, 128 bp, Homo sapiens
taaaatagcaaaaaaaaattacgccgggggttggtggcgggtacctgtagtcctagctacttgaggaggctgaggcaggacgaatggcgtgacccctgggcggtggactcttggacggggactcctct

SEQ ID NO: 512180 - DNA, 552 bp, Homo sapiens
tccacactgggtcgagtcacggttgaggagcagtctggggacatcagctcttaatattttcacgtttggagcagtgggttctcaggttctgagtgaagtgaaccagaatcctcctagggggctgtggtaaagataatcccatactatgtactgcgtagagttcaagaagaagaggggagagcatgcagataaaccagtacaatcagtcgttcacattaccactaactacaatgatactcccatttgcttcctgtgaagtagttactaataatcactggttgtcgcttatttacaatttccataacatacctttaactgtcttcatataggtattgaaagagtccacataaaagccacatccattttctaattttgaacaatagttagagaaacctaatatacttctcatatataggtctagcttctgtctcatgagttccccaaaataggcatactatatatcttgagatgacagagttcactggggccaatgtcacacttttctcggggcagggtcataatatttctgcgatagggaagaataagattcac

SEQ ID NO: 512181 - DNA, 691 bp, Homo sapiens
gcgatgttcctgggactgtcctggttgacctgcgcgtctgctgcagagaccatgtctgccgacggggcagagtgctgatggcagcacccaggtgacagtggaagaacctgtgtacagcagcccagtgtggtgtgacctgtgtggccagcatgcctctgatcagctccacctgctgacatgtgtgtcctgcagcctatgcctccaccaatgtgatgagctaccctgcactgtcaagacttgtcttgcgactgcagcagagaagtggagtgaggaccctcactgtgctggctgctgtcatgctggtgtgctcatgcctgatcctctccaatgctggagcccacagattgcatcagtcctagctgaatactgcccacagggtggctggaccaacgttggaaggagaaccatccccatcctgcaagcagcaccacggagtaagtgtccatggctggacaccatggagcttgctgtcgtctaagtgtgtcggggtgcccaagagatggttgtctacgctgccaatgtgaccggtggccacccaaattgtcgcgagggctggtggacctgcgacccgcggtgctgtgcagagcggcgtggactagactaaagtccgtagttgtctggcggcgtccaatcagtcattgggctcccgcttgggccagatggtgctgagtggtgtcgacacggtgctggg

SEQ ID NO: 512182 - DNA, 433 bp, Homo sapiens
  misc_feature (65)..(65): n is a, c, g, or t
  misc_feature (292)..(292): n is a, c, g, or t
  misc_feature (322)..(322): n is a, c, g, or t
  misc_feature (349)..(349): n is a, c, g, or t
  misc_feature (352)..(352): n is a, c, g, or t
  misc_feature (370)..(370): n is a, c, g, or t
  misc_feature (382)..(382): n is a, c, g, or t
  misc_feature (385)..(385): n is a, c, g, or t
  misc_feature (405)..(405): n is a, c, g, or t
  misc_feature (409)..(409): n is a, c, g, or t
  misc_feature (422)..(422): n is a, c, g, or t
tgtgtccacaccgcagtgcttttgcccctggggggattggacacacatcctgccaaaggcgttangaagttttgcccaaatgaagccaggtgggctccgggttcactcccattttcccgaggggtgttggcctccccagggtttgcctttttagggatttaaacgaggttcgaggctcccctatcagggcagctttcaggattgtcattttcctttttgcctgggggtttaacttttgtatttttttaatcccaagtttgaaacaaaatgtttttttggactttttggaaangcccattttacttttgaatttagcttttantaattggcatttggaagctcagcaagngcncaacccttattttggttnccgtggaaaccnctnccccccctccccaatgtggngggntcaataaaaatgntggaattccca

SEQ ID NO: 512183 - DNA, 425 bp, Homo sapiens
  misc_feature (90)..(90): n is a, c, g, or t
  misc_feature (132)..(132): n is a, c, g, or t
ggggccaaaaatggcaaggtttttcccttggccaaggtctacagatggtttcccaaccataaatctacaccaacaatggtgccaactgcnttgcattccaaattggaaacaaaatggggctaggctagaccnactgtgctaaaacaatctctatcctagaacccattccagcacacacatgcaacagctgcaaagcaccatttgcccctaacttttcaacactctcatgttggggcaaacacagccagctttgtcagcagcatttgcagcaaaggggtataggataatccgtttaaacgcaaaagtgcccccgttttaaagaagccgtataaaacgggttttccccctgccaaaaggcgggggtttaacgcgacctttaacttttggggggggccttccaagttcgaaagatcttccgaagaacg

SEQ ID NO: 512184 - DNA, 1492 bp, Homo sapiens
ggttgtgcctgctgtgcgccgcgctggcctgcagtccctgggccctgctgcccctgctgcctgcctgcctgccgccatggagccctggccccgacgtgcccgccgccatcctggccccggccgaccagtccgcggagggctgtgttccagcgaagacctgcaggccgtgtggccctggacagggcccatgatcagcatagacgtgtggaagcatgcttgcatccgaccagccggcagcatcagcgcgtaccaggaccatccgtcgtcgttaccgccagtaaggaccatagtggcaagcgtgcatcggtagttaggacaggtcgtcaatccacggtgcaccggacgacgagacccagcgttctcctaccacggcaccatgatccgccaacgcttgccatctcttgccaggacaacccccaaacccagccgaagacggttgcctgagtcaatcaggcgggcccggacgactggagcagtgatcccatagccgcgcgacccgtaccctcagaagccaaaacacacgtacaagcagcgcagagacccggacgggatccaacacctgaccgacacgaactacgaaccagcaacggcaatcgagtcagcccccccagccacagccgcccacaaccacgagccttccccacaagccccaaggaccacagtgcccccgacacaagggcgacaaccagccgaaggccagtcccgccgagcccccaggcgaccccactcaccggcagcaccggccatgacgcgagcacagcaccggcaggcagccagcaccgacaaccaccgacaatcacgcagacgagcgccccaccgccaccaacagaccccaagcacgcggaccacgcccccccaacaacacacccagacaggcgcccaccaccgcagcgcacagaccaaactacacacgggagagccagcacacaaccaaacgcgccaccacgaagcagacccggccgcagcccgcacccacccgcgcccgcacaagcgtagcataaagagcaagatagcgacaagaaatagcgagacatggagacgcccatacggcaagaatacgggaagaagttacgacgagcaagataggatccacgactggcggaccaatggactaagggcaccaaagcccaaacacacacccacagcctgccaagatagacaaacaaataagagacacgaaccacgacaaaagatcagaaacagaggcgcgcccccccgacccggcaaccaggtcacagccgacacaagcacaacaagcagcgagcgcgcacaggcaagacagtcagcaaggactcaagcgaagacagcaacgaccgccagcgcccgaacgaccacagcaggaagcgcgagcacaccacgcgggcgcgcaaggcgcgaaggacagcgcgcgccagcacgaacacgccaccacagcgagggacgcgcacgtacacggttctcccaggggacgacgcgccagagcgcgcacagaagagagagggcaggagagcgg

SEQ ID NO: 512185 - DNA, 115 bp, Homo sapiens
gggctggacttcttacacatgttgattagttacacttgcacttaaaaagatggaggctgaaggggtaagcaaacaaacttgtgaagtagacgaagactcatctctgaagtacaac

SEQ ID NO: 512186 - DNA, 402 bp, Homo sapiens
ctattgctgggaatgaaacgagtaccagcaggcccttgctgtggaattttctgagcgaggtcagagagaagcacagtgtacttttagaacaagatctgtcctgcctttttttgtattctggagtacacttggggagaaatagagtaagctgctgtttggggaagaagtttgggcttttgatttattttgaaggagtttaagaaatgctaccaacatggtgaaaccccgtctctagtaaaaatacaaaaattagctgggcatggtggtggccgcctgtaatcccagctactctggaggctgaggcaggagaatcgcttgaacctgggaggtggaggttgtagtgagctgagatcgcgccactgcactccagcctgggcaacaagagcaagactccatttccaa

SEQ ID NO: 512187 - DNA, 1112 bp, Homo sapiens
  misc_feature (1112)..(1112): n is a, c, g, or t
gacctgtagtgtcgcggttatttggtcgaaagctgtaccaagaagacgtcggtgatcgctcggtgaagtacgtggagccgctattggggacctccgctccgagaaaatggtgaagaatattgaaagtcagaccaggcacgtctccatagctacacatttgacgttctcttctgtggcggaacaccatacgcatgacagagacgtagcctgtgcgggatctggcactgttggttcctgcatgaagacagatggctgagcggtgcctgtaacggtagcaataccacttaccggctgtcacggctaaagtccgcccagtgcagaagactgaacgaagttgaagacgacctagtagacgctccgtctagctctttgagacatcacgtggtcctatacactaaagtgggttaatttactgtagaacatacatacgagcacgaaaagatgctgtgggtgtgcacaagtggataaacgaccattgacaagatggagggtcgctaacacggcggcatgaaaagcatagtgtgggcatcgattggcatccccctattagacgcacagaggatcctccgttgttcttgaggggtccgcgtttggacaagttctgcttcgttagctcatggcgaaaacgcaagagggaggtcatgggcgaactaagcgtttgaaggtgtgggtaaagaagtctacgagatacggagcaaaagatatcggacagcggggcgaaaacccaaggacctgtagtgagagaggcacattcccgggtgacaggtggcgcatccagcgagggaacacacatggaaggggactagcgggggcaccgacgggcaatacgggccaatgggccagcgaagcgcaccaatctggtggaacgatccccaaagtgaacactagcagcccagggctaaaaggggaatggacccggggcccactccagggaaccgtagggacacccgagacaaagacagaagtgccccgaagacaagggaaacacacagtgtggcgcaaggacacacccacagacggagagccgacacgagcctttagacaagagcgaccgttttgtgacaaccagcgatcagggggtaggtagagacacacgcggaggagaatagcan

SEQ ID NO: 512188 - DNA, 175 bp, Homo sapiens
  misc_feature (51)..(51): n is a, c, g, or t
  misc_feature (61)..(61): n is a, c, g, or t
taagcaattgaactttttatttaaaagagatggggtctctctgttgcccanattggtctanaactcctgagctcaagtgattctcctgactccctaagtgttgggattacaagcatgagccaccacgcccagctgcaatttaattttaaatcagagttcaaaacaatagaattta

SEQ ID NO: 512189 - DNA, 140 bp, Homo sapiens
cggcggtcctcatatgttcgtttatccttccagaaagcatatcatattagaggtctaagaaatcagtgaatcaagtgactagattataaatattctctatgtgaatagttgaataaaacagctgtttttttctgcttcct

SEQ ID NO: 512190 - DNA, 111 bp, Homo sapiens
cgaattgaaactacagagggaattgtgggaactcaacttgaaggcagtcggtcagaagttccaaaggtcacccgggcgcggtggttcacgcctggtatcccacgcactttg

SEQ ID NO: 512191 - DNA, 329 bp, Homo sapiens
tgaaatggattttctctcttgtgtgtccaggctggagtgcaagggtgtgatctcggctcactgcaacctccgccttcggggttcaagtgattctcctgcctcagcctccccagtagctgggattacagatcgtggccaccatgcccagctaatttggtatttcaagtagagagggggttcctccatgtgggtcaggcgggtctcgaactcctgacctcaagtgatctgtccacctcggcctcccagagtgcggggataacaggcgtgagccatggttcccagcaggaattcctttttaatagtatgggataaagttgggggttttcacg

SEQ ID NO: 512192 - DNA, 875 bp, Homo sapiens
ggcagccgaggcccaggcacggtcaggctgtgtcctggaggggagggtgggcagggccgtctgagtgctgcacagctgcgtcccacatgtcagctcctcgcccagctggccctccctgtggctcagcacacgggctgccttgcggctggttcccggatggggagggtacactgcctggagctcaggggctggctggggtgagtccgaggccgggctccagcacagccttcaagtgaggcccacagtggggctgctggtactgaaatggcatcctggcttcccagtagcacattccttgagtgtgtcagtccctctggggaccatctggaggacgggggctagagagcagccctggtcattctccaccaagaccacacatgaggccccgatggcacagtgccgggatcctgtgtaattagggtctgggtgccctcgttgccctactcctctgaaagcgagccaggttcaccttgaaccctgcagaatgatgctctttctggcgtctttctctgtcttcctgggccttacaggttcttcggcagtaaatcaactaaacggtaacactcttccctccatcttccacattcaggcaaagctggccccggggagctcctgcgcagacgtccctcacggccagggaggccgcaatgaaggctgaacctggggaaggggcccaggtgcggtgtagacctcctctgtcatccagcccctcctgagggggcttgatgggcgtcacaagtgggcagcttttccgcgcttccccgtgtctgactgtgctgagggcctcctgaagtgcaattggttagtcacggtttagtgttctttactgcaatgctattttaagatgcaattaaaacgtctcatggcaaagaaag

SEQ ID NO: 512193 - DNA, 140 bp, Homo sapiens
tttaaaaaggacgtctcttctttgggggggaacaacagaaagtctggctgaggcggttgctgagtatgcgctaagtcacagctttatgcggttgtgtcgggagaaaaaaaaaacagacccgaacagaacaaacaaaaaca

SEQ ID NO: 512194 - DNA, 372 bp, Homo sapiens
tatatggcgaataggaggatcatgataggataggataagatgaggactgatcgggcatcttactgggagcaatttgagataggaactggaatgggatcctgctttccgtcagaccgagtaccggctccgtttcggaggtcatcgctgtcatggagcgggaactggaaaatatcatctcaggaaacatagaaagatctgtacccagcatggctgaataatgattctcagtcggtatcgtgtattgttggctctcacatccactctcaacaaactcttcataagactggaggaaaaacagagtccatagctggtgactaagctcaagaaaaagagggttgtccccaaaaagcctcccccatcaccccaacctac

SEQ ID NO: 512195 - DNA, 377 bp, Homo sapiens
  misc_feature (174)..(174): n is a, c, g, or t
  misc_feature (333)..(333): n is a, c, g, or t
catccggcggcgaaaaaagtctcccagcgggcgattacgctgctcaaccaggcgattgttgccgcagtgggccggaaaacttactggttactgtggcaaatccggatatcgaaaccgcgcaacgcttgttcaagtttccgggtatcggcctgctggtggtaaccggcggcgaangggtagtagaagcggcgcgtaaacacaccaataaacgtctgattgccgcaggcttggcaacccgccggtagtggtggatgaaaccgccgacctcgcccgtgccgctcagtccatcgtcaaaggcgcttctttcgataacaacatcatttgtgccgacgnaaaggtactgattgttgttgatagcgtagcgatgacttatgcgt

SEQ ID NO: 512196 - DNA, 511 bp, Homo sapiens
ctatccggccgtgcagggccggtgctggaatgcccccctcatccgcgcacgtggacttggcgtcagccgctagtgcacacatcccgtgttctctcctgccctgtggactccgtcacactgatctccacctgaggcgggaccatcaatcccccgagaacataaaaatcacaagcacagaagagcagattgcacgggaacctggaatcggctgggtcctgcagatcactcagcgtctgctggctaggagagacagaaggccccaaggatctcactggctcacctggagccccctcgtcttgtgtctaagtctctctttatgtgttctgtggtccacctttccgctcctaccttgtgcgtcctcattgactcgagattacagtgtgcgtgccatcagggcagggcctctgtgtcctctgcctcgtgtctccagccatagcacatgaaccagaacagctcagaacactctgtccagtgacagtcagtctacatccttacctagtgctctatagca

SEQ ID NO: 512197 - DNA, 170 bp, Homo sapiens
agccggcgcagctgcagggcaccatggaaatcctgagggatgtgaggtgatcaagagcggagacaaagtgtgagccagcgaagccacgctgcggaacatgcgcaacatctcccccttctccgttggggcgggtcatccagcaggtgttcgacaagtagcagcatctacaa

SEQ ID NO: 512198 - DNA, 484 bp, Homo sapiens
ctgcatactacactctgttactctctcaacagctctatctgctatttatatacttacctggcaggggagataccatgatcacgaaggtggttttcccagggcgaggcttatccattgcactccggatgtgctgacccctgcgatttccccaaatgtgggaaactcgactgcataatttgtggtagtagggggactgcgttcgcgctttcccctgccttactggaagtagaaaggtagttgatattatgatcggcgctgggtctggatgtgaggtgtttaaaacacgggctgttgggcagttcgcttacgctttcacgtttttgtggtggtagggcgaatactgctttttttcttaccccgcgggggatcctctagtaacgcgccaattatactgtgggtttatggtcttcagggtattgccgagacgtacgatctcatgctttctccaaggccgacccgtattttcttggtttggtgtgtgtag

SEQ ID NO: 512199 - DNA, 188 bp, Homo sapiens
ggtagcagccaggcactgtcaggccttattcttctccactttgacagcccgaggcttaatcgctccggttcgcttcatctagggacgcagcctgaagcgacctcctgcagcttcacggctcccaggctgagtttctcatccactcgttgttttccctgttgccgggataccgagctcgatacttcgta

SEQ ID NO: 512200 - DNA, 144 bp, Homo sapiens
cgtgatccagctccatcacgatacacaagatcgatggggcgaccgcagttcaagtcaatgacacgaaggtaggaacagagcgccgacaacacctctgttgcttttaatgcctgccaagagttaataagcaacaatctgagcacc

SEQ ID NO: 512201 - DNA, 207 bp, Homo sapiens
gcggccgcctactactactaaattcgcggccgcgtcgacgggagataccatgatcacgaaggtggttttcccagggcgaggcttatccattgcactccggatgtgctgacccctgcgatttccccaaatgtgggaaactcgactgcataatttgtggtagtaggggaaagcgcgaacgcgtcgacgcggccgcgaatttagtagtag

SEQ ID NO: 512202 - DNA, 449 bp, Homo sapiens
  misc_feature (320)..(320): n is a, c, g, or t
  misc_feature (347)..(347): n is a, c, g, or t
gttcactctagagtatccccatctatactgacgcggaggtaggattggtgctgtgggtgaaagagtatgatggggaagggacagacgaggtcagtaggtcagtatagataggtcagtatagataggtcagtatagataggtcagtatagataagtcagtatagataggtcagtatagataggtcagtatagataggtcagtatagataggtcagtatagataggtcagtatagataggtcagtatagataggtagtatagataggtcagtatagataggtcagtatagatgcggaggtatagataggtcagtatagatangtcagtatagataggtagtatagatangtcagtaatagtagttaatagtcagatagatagtcagatagatacgtagtatagataggtagtatagataggtcagtgtgtatcctctagagtcagctatga

SEQ ID NO: 512203 - DNA, 641 bp, Homo sapiens
  misc_feature (13)..(13): n is a, c, g, or t
  misc_feature (356)..(356): n is a, c, g, or t
  misc_feature (401)..(402): n is a, c, g, or t
  misc_feature (428)..(428): n is a, c, g, or t
  misc_feature (468)..(469): n is a, c, g, or t
  misc_feature (484)..(484): n is a, c, g, or t
  misc_feature (521)..(521): n is a, c, g, or t
  misc_feature (526)..(526): n is a, c, g, or t
  misc_feature (567)..(567): n is a, c, g, or t
  misc_feature (584)..(584): n is a, c, g, or t
gcacgaggtgctntgcagtatgaagatgtaagcactgctgtccagaatctacaaaaggctctcaagttactgacgacaggcagagaatgaagcctttgtatgacagacccatgtatttttggcatgaggaactaacagtccattactctatcttcagcctatcaggatcacagttttaaggaagacttggttttgttgaatatgacaatgaaatctgtgtgtatcagatttttattgaagcattcatcagcagcctcaaccagttttcattgaccatttactagattcaatcgtctctgagtatatagggctgatgggagcaagaccctaaaaatgtccattgaaccctgcttcanaaaatgaaaacacacctctataaaatgtgtactgggaataagctnntgatttacatacattaggggaatttnttctgaatggttgacaaacagatgatattacttgctatannaatataatgtaactntaataagatagccagatatctaaatagaaatacgttntgttncctcagacatcaattaacatctaactgctgatgatctgaangacattagtcaattaantatctatattatactcattccagtctactattgtagcgagagatgattgtatgcgtg

SEQ ID NO: 512204 - DNA, 407 bp, Homo sapiens
  misc_feature (278)..(278): n is a, c, g, or t
  misc_feature (305)..(305): n is a, c, g, or t
cctatctatactgacctatctatactgacccccctcgcgccgacaattatggggcgtcagtatagataggtcagtatagataggtcagtatagataggtcagtatagataagtcagtatagataggtcagtatagataggtcagtatagataggtcagtatagataggtcagtatagataggtcagtatagataggtcagtatagataggtagtatagataggtcagtatagataggtcagtatagatgcggaggtatagataggtcagtatagatangtcagtatagataggtagtatagatangtcagtaatagtagttaatagtcagatagatagtcagatagatacgtagtatagataggtagtatagataggtcagtgtgtatcctctagagtcagctatga

SEQ ID NO: 512205 - DNA, 405 bp, Homo sapiens
  misc_feature (13)..(13): n is a, c, g, or t
gcacgaggtgctntgcagtatgaagatgtaagcactgctgtccagaatctacaaaaggctctcaagttactgacgacaggcagagaatgaagcctttgtatgacagacccatgtatttttggcatgaggaactaacagtccattactctatcttcagcctatcaggatcacagttttaaggaagacttggttttgttgaatatgacaatgaaatctgtgtgtatcagatttttattgaagcattcatcagcagcctcaaccagttttcattgaccatttactagattcaatcgtctctgagtatatagggctgatgggagcaagatgtcttgctcccatcaggatattggtactcttcattttacagatggggaaactgagtctctgatgggagaagctacggtc

SEQ ID NO: 512206 - DNA, 438 bp, Homo sapiens
  misc_feature (98)..(98): n is a, c, g, or t
  misc_feature (106)..(106): n is a, c, g, or t
  misc_feature (112)..(113): n is a, c, g, or t
  misc_feature (178)..(178): n is a, c, g, or t
  misc_feature (309)..(309): n is a, c, g, or t
  misc_feature (336)..(336): n is a, c, g, or t
ctgcgcagatatttccgtgggttattcttcttgatggcagtctgatgtacaaatacatcttctttggtgtcatttcgatttataaatccatatccatntctgacgntgaacnntttgacagtgccaaggactttggtggcgagaacttttttctccgcgtcttcgctccggcggcggnggctaggtcagtatagataggtcagtatagataggtcagtatagataggtcagtatagataggtagtatagataggtcagtatagataggtcagtatagatgcggaggtatagataggtcagtatagatangtcagtatagataggtagtatagatangtcagtaatagtagttaatagtcagatagatagtcagatagatacgtagtatagataggtagtatagataggtcagtgtgtatcctctagagtcagctatga

SEQ ID NO: 512207 - DNA, 115 bp, Homo sapiens
gatcccagcggcgtcctttttttcagcaacttcagttaatacattatgtgtgttaagactgcttgattttgtccagaaagtaactaaggctctgttcacttctttttcagttttt

SEQ ID NO: 512208 - DNA, 250 bp, Homo sapiens
gcggccgcctactactactaaattcgcggccgcgtcgacgcgaggcttatccattgcactccggatgtgctgacccctgcgatttccccaaatgtgggaaactcgactgcataatttgtggtagtaggtttttttttttttttgagatagagtctcactctgtctcccaggctggagtgcagtggcacaatctcagctgactgcaacctccgcctcctgggctcaagtgtcgacgaaagccgccaattta

SEQ ID NO: 512209 - DNA, 270 bp, Homo sapiens
gtatatgcacaatgtatattgacacccatatatttaaaacagcaacatataccctgatgaattatactttacagtactcatagacctacattgatcatatatttattttttcatgtatctacttccaatatgatcaactaggaacttaagccccataagaacaaagacattcttcagttcactgctatttccccaacaactacagaatgctcaaataattgaataaatgaatgaaaattaagtaagtctttcacaaatatacaacacact

SEQ ID NO: 512210 - DNA, 206 bp, Homo sapiens
tgtgcgacctagaggttcctcctttatccaagcagtcggggagataccatgatcacgaaggtggttttcccagggcgaggcttatccattgcactccggatgtgctgacccctgcgatttccccaaatgtgggaaactcgactgcataatttgtggtagtaggggaaagcgcgaacgcgtcgacgcggccgcgaatttagtagtag

SEQ ID NO: 512211 - DNA, 507 bp, Homo sapiens
  misc_feature (378)..(378): n is a, c, g, or t
  misc_feature (405)..(405): n is a, c, g, or t
gcggccgcctactactactaaattcgcggccgcgtcgacgggagataccatgatcacgaaggtggttttcccagggcgaggcttatccattgcactccggatgtgctgacccctgcgatttccccaaatgtgggaaactcgactgcataatttgtggtagtatagataggtcagtatagataggtcagtatagataggtcagtatagataagtcagtatagataggtcagtatagataggtcagtatagataggtcagtatagataggtcagtatagataggtcagtatagataggtcagtatagataggtagtatagataggtcagtatagataggtcagtatagatgcggaggtatagataggtcagtatagatangtcagtatagataggtagtatagatangtcagtaatagtagttaatagtcagatagatagtcagatagatacgtagtatagataggtagtatagataggtcagtgtgtatcctctagagtcagctatga

SEQ ID NO: 512212 - DNA, 362 bp, Homo sapiens
gcggccgcctactactactaaattcgcggccgcgtcgacgggagataccatgatcacgaaggtggttttcccagggcgaggcttatccattgcactccggatgtgctgacccctgcgatttccccaaatgtgggaaactcgactgcataatttgtggtagtattttttttttttaaaataggttcctctggtcattgtgttgacaagctcggtttggaaagcattgatttacttatttcaccccaaattatatctctgactcagttagctggtagaatgtttgtgtgggctattagatcaccatccctaaatcctgctcttgccactaaggaccatctgtcataaatcactgatgctgggag

SEQ ID NO: 512213 - DNA, 105 bp, Homo sapiens
tggaaacaagcggcagtgggctaaagctgatgtatacggaattaacggacgtgcagatcaaagggcaaatgtagaagtgcctgtatccctgaaaatacacatgta

SEQ ID NO: 512214 - DNA, 692 bp, Homo sapiens
  misc_feature (316)..(316): n is a, c, g, or t
acacgtatgtttattgcggcactattcacaatagcaaagacttggaaccaacccaaatgtccaacaatgatagactggattaagaaaatgtggcacatatacaccatggaatactatgcagccataaaaaaggatgagttcatgtcctttgtatggacatggatgaaattggaaatcatcattctcagtaaactaccacaagaacaaaaaaccaaacaccgcatattctcactcataggtgggaattgaacaatgagaacacatggacacaggaaggggaacatcacactctggggcctgttatggggtgagcatntctatctccatctatataatattatcttctacttttgtcctgaaatccttttaatccatccatatactctcatcattatcctctatacatcttttcctattcctcactcattattagtttccctttactaatttttacgtgatgcacatcatccactgaactttgtatattttttgggatctaatctttttgtctctatttaataatcatataactactcactcttaattactaacatataccttccttactatcctatattcttaaccttagtacctttttttacctcactttcctgatcctaatcatttctttaacataatatatattgtcaaatagttttctcttctcttgctacgtctcttcctaatgccct

SEQ ID NO: 512215 - DNA, 182 bp, Homo sapiens
gcggccgcctactactactaaattcgcggccgcgtcgacgggagataccatgatcacgaaggtggttttcccagggcgaggcttatccattgcactccggatgtgctgacccctgcgatttccccaaatgtgggaaactcgactgcataatttgtggtagtagttgaatcaatacgtgacca

SEQ ID NO: 512216 - DNA, 403 bp, Homo sapiens
agccccctgaagggtgccctccttacagagctaagtggagacgtttccagatcagccccagttttctataaaggctggcccaggccctgaatgtttaggacattctgtggatgaaaataaaaatggtggaataggttttatcacatcttttatttttcttttccccctactctctaccctttcccttatgtgggggaacctttttaggtaattaatagggttccttcccctcatatgttcatatagatgaaactaatttttggcttaagtcagaaccactggcccaaatttaagtcatattttaggggggaaatggcctaccccatattatattatattggatatttatgttccccccggaatttggttttctgctttgttaataaaaggaaaaactcccgga

SEQ ID NO: 512217 - DNA, 105 bp, Homo sapiens
acggcgaagcgcagcggcggcgacagtctggggtttgcgtctcggggtgtgtcggccgccgctgctgcttgggcctggtatgtacaagtggctgtaggattctcg

SEQ ID NO: 512218 - DNA, 141 bp, Homo sapiens
tctgacctgtacggtgatccagatggttttgcttttaattatgcataaaaaaaataggaaccatgcagcagcatcagcttaggcaaacaggttagtcaaatatacagctaggaactgttcactcagtcattaaggagagcc

SEQ ID NO: 512219 - DNA, 1158 bp, Homo sapiens
gtttgtcatgttccaaactgtcatttcattttacgttgttcagcatatggggcagtagtgtgcattgcaggtggcagtcagcattcaggcgtcagtcagcacagtagcaggttaaggcagggtgcatggtggctcatgcatggtggggcatgcatgcagggctcatgttttgtgcaatacttcgataatggccccatttgggccaaaaagccggttagcgggggcaggcctcctagggagaggagggtggatggaacttacagggtgttagctcctgtacagcattgatcacaggctgcgagatagataactagggatcggtggtgcctggcagcatacatgtctgcagcacactcatgcactgcaggacagagaagctatcggaaatacaagagtaaagatacgcacacaaattagacgaaatagcacagcaaccctaaccccgtgcgccaccacgcaccacacactgcaaccatcatcacacttccccaactaacacaatcacccccacgagaacatcgggaaaccacaatctcctcgacgctcagcgtgagacacaacggcaatcaacgatgacaacaccgacgcagagcagcagcatacgtgaaaggcagtcacaactacgacaacgcagctgagtccggtcatgtatacagataaaactgagacgcgcaggcacacaccggccacagcagagaacgacatccggcatgagaacgaagaccccgtgacgagacagacaagaccacccaagaagtgaccaaaccgaccagcacaagccactagaccaagaagcacataccaacagcaaccagaacacagacacagagtggacggcgggcgaagcacagagacgcgcgaggacgcgagacggcacgcagccgcggaaaggaaagacgcgggaggcgcgacggagaagcgcagacgaacgaggaagagacggcggaagaagaagaagcggaagacgagacggagccggacacgacgtgaaggggagagggacgacggagcggagcggacggacggaaaagagatgtgagcgcgactgcggacgcggaggagacagggcgcgagaagacgaatccggggcgggacggctacgactggggagccgaacaggggaaaagaacgaaggagagaggaggacaggaaggacgc

SEQ ID NO: 512220 - DNA, 1293 bp, Homo sapiens
aattcgccaagaatgacgaacataaagggaaagaggagaggcacccgatagtagtgttctctaggcctttttgagaaaagcagtggaggtcgtctcctattgggactcacactatactgacgaactctactaagcaaacaggtgatattcgttagacatcaagggaatgggtactcgttcacagaaacggaatgctcccaacagaggtgttgacccactaggggatagaactagggaacgaagtcgtagcgatagtggtgtactcgcaggacatggctggttgggcaacttgtatgtaatagcgaagagcaaggttgagacggggcgaaggagtctcatctgtcgcgaaagagcacatttcaaatggtgctgctagttagacgcaccaattaaatggcacttcttgaatggaggcccgagtactaagcgtttccctagagaaacagtagtggagatggaatcacatggatccatgagacacaatgaaacatgcatagcgcaaaggaagggacaagggttaccctgggggttcagacttagaaacgcgcagcgcatgctcgcaccgcagaagaaacgcacactttatggtgcagaatccaatcgggcaaggcagccttgagctggctgggaacctcattcgccctatgaattacatgggcataaatcagcggtggtttaaacaacatggaagacactaaaaggggaacccgtcgtgagggcctgtacatagaagaaacccaccacacagcaaaccgagaacgcaacatgaggagaccgacaccagcacaggacaagccaacccagggcaagaatataactcgcagcgagcctagaacacccagaggtgaaaaacaaacggaaggcacggaaggacaacaacggaagaaacgaaatcgacaaggaacaaacagatcttggacccacacaggggcgacaaaggcaataacgcaggcgcgacccaacaatgagggcagggcgaccaaccacaacacagaaagaccggagaaggaacacaccgacaatacgaccccagacacgaacagccggaacagcggaccaggaacaacgggcgacgaagcagcgaacagagaaacaggcgcgacaccacacacagtggaagaaacagaggcaggagaaaccaggcgccgcaaacaacgagagaaaaagaaaaacgcacaacgaacgacaaccaccaagacagcccaccaactaagcaaagaagcaaaaagaacaccacgcatacaccacacaacaacaaaaaacaacatcaaacaaccaagcaacgaaaggaat

SEQ ID NO: 512221 - DNA, 83 bp, Homo sapiens
gccgccgcctactactactactactgctcgaattcaagcttctaacatgtacggggacatggcgaaaccccatctctactacc

SEQ ID NO: 512222 - DNA, 562 bp, Homo sapiens
  misc_feature (134)..(134): n is a, c, g, or t
  misc_feature (378)..(378): n is a, c, g, or t
tctatttggcctgaagggagtgccgttcctgggctaaaaacaagcaccagcctgcattggaaaacgcaggaccccgttgcccaaaaggagcagccacggcctgcggaaggacttggcccagcaaggtctcccanggttttcccttctcctcagcgccctaaggagagaggcccagtgtgcgggttgaggaagtcgcgaaggaagaagcgccggaagtgcgccgagaaggcaaccagtgttccgccaagaaaaatagagagaaagcgcccgtaagaactcctcgaggtgcccacagaaattatccagccacgcgctggttccacacctgtcctgttgcgaccccataagaagggcaacgttgggtgggccttccccccnacaatggggcaggaacatctcctgtggacacactgtgcggcgcccacaatgccccgtggttttggacccctttcgggagattcaccacgggttgccaggcttcccgggccgcatgtgaactgaccagctgcgtgcgcggggctatccggcagattgcccttggtggagtgggctaccaatcttg

SEQ ID NO: 512223 - DNA, 297 bp, Homo sapiens
aaggaactggaggcaagttttttccttgggaaaaaaaatgcccttaaaaatttgcatgagccataaagtcctggtttgagccctaaaggaaacagggggctttttttttgctggagtggcaaaagggggccgtttgggttttaagtgcccaggggaggctgcaaagtttaatttcccagaccagtttggatagaccagctcgctttgctccagtccttacaaacaggtttatccatggccttagctgctgttttataaaacccttttagggtggaggaaaattttaataacccccca

SEQ ID NO: 512224 - DNA, 290 bp, Homo sapiens
  misc_feature (236)..(236): n is a, c, g, or t
  misc_feature (249)..(249): n is a, c, g, or t
acagactacgatagtacacactaacagactttcagatatgacgactctctcaggatcattaattcaagagactactacagttattttggtcccggtccagtcattctcctagcatcattattacccctcatctaatctaatccaaaacctaaatctaataaaatacttctaaaatctggcaccctaatggcctcccacactcaaacatttcacttactttgtaatttagagaggcnctacatttggtcnaaatagaggcacagctaatagatgtatgtcacatattacgg

SEQ ID NO: 512225 - DNA, 251 bp, Homo sapiens
  misc_feature (117)..(117): n is a, c, g, or t
  misc_feature (186)..(186): n is a, c, g, or t
catagatgaatcttgaaaacaggttaaatgaacagatccagtaacaaaaagaccattgattttttgattccatttcatatgaaaaattcatgggagactgagaggcgggcggatctnttgaggtcaggagtttgagaccagcttggtcaacatggtgaaccctgtctctacaaaaagatataaaanttaaccaggcatggtggcacatgcctgtaatcccagctacttgggtggctgaggcactaattgct

SEQ ID NO: 512226 - DNA, 327 bp, Homo sapiens
acacgtactacactgcatccctaagcacaacatattcaataaaactaaaacaatacagacagaaaagactggaatacattactaataatacaatgcacagatacctgcattcaatacatccacacaacacaatagcaaacatggaaccatgatctccccaaacacacaaagcaaggaaccggtgactgaccctaaaaagaccaatgatagactttgctgaactgacaaacttcatgacggcttccacagagccgaatactccacaagagactcagttagctcgacagaccaccgcctattcgaaactacacgtcagaaaagaaaaaa

SEQ ID NO: 512227 - DNA, 552 bp, Homo sapiens
  misc_feature (100)..(100): n is a, c, g, or t
  misc_feature (106)..(107): n is a, c, g, or t
  misc_feature (111)..(111): n is a, c, g, or t
  misc_feature (121)..(122): n is a, c, g, or t
  misc_feature (133)..(133): n is a, c, g, or t
  misc_feature (144)..(144): n is a, c, g, or t
  misc_feature (149)..(149): n is a, c, g, or t
  misc_feature (155)..(155): n is a, c, g, or t
  misc_feature (164)..(164): n is a, c, g, or t
  misc_feature (168)..(168): n is a, c, g, or t
  misc_feature (171)..(171): n is a, c, g, or t
  misc_feature (188)..(188): n is a, c, g, or t
  misc_feature (464)..(464): n is a, c, g, or t
  misc_feature (471)..(471): n is a, c, g, or t
  misc_feature (499)..(499): n is a, c, g, or t
gatgtgcatatcaacatttatacatggaactggagaacattgtgccaataataattaaaaaatgccaatttttaaggttatattttaaattgttctaatnaagttnnagtnccttgagggnnaaagattgttnttctgggtaanagctnttgggntggtttttnagancanagtcttgttgtgggtanactgtgactaggttcacagcctttgtggaacattccgtataacggcattgtggaagcaataactagttcctatgaaagaaccagagctgggaagatggctgggaagccaggccaaagtgggggcaacagcttgcttctctttctcttctcaccctcagtttgtatgggaagatggctgggaagccaggccaaagtgggggcaacagcttgcttctctttctcttctcaccctcagtttgtatgggaaaatggagatgtcctctccactttatcccncgatatntaaatgaaaaagaaagaaaacccacacncaaagcaaaaactcaagtattaagagcacatatttttgacccagtggaggctt

SEQ ID NO: 512228 - DNA, 330 bp, Homo sapiens
gaccggtctttaaaaaatacttatttcactaataagaaaactaggccaggcacagtggcttacacctgtaatcccagcattttgggaggctgaggtgggtggatcacttgaggtcaggaattcaagaccagcctgggtaacatggtgaaaccccatacccactaaaaatacaaaaattagccgaggcatggtggtgcacacctgtagtcccagctgcctgagaggctgaggcatgggaatcacttgaacccgggaggcagaggttacagtgagccgagatcacgccactgcactccatccagcctaggcaacagagcaagactccgtctc

SEQ ID NO: 512229 - DNA, 474 bp, Homo sapiens
  misc_feature (100)..(100): n is a, c, g, or t
  misc_feature (106)..(107): n is a, c, g, or t
  misc_feature (111)..(111): n is a, c, g, or t
  misc_feature (121)..(122): n is a, c, g, or t
  misc_feature (133)..(133): n is a, c, g, or t
  misc_feature (144)..(144): n is a, c, g, or t
  misc_feature (149)..(149): n is a, c, g, or t
  misc_feature (155)..(155): n is a, c, g, or t
  misc_feature (164)..(164): n is a, c, g, or t
  misc_feature (168)..(168): n is a, c, g, or t
  misc_feature (171)..(171): n is a, c, g, or t
  misc_feature (188)..(188): n is a, c, g, or t
  misc_feature (386)..(386): n is a, c, g, or t
  misc_feature (393)..(393): n is a, c, g, or t
  misc_feature (421)..(421): n is a, c, g, or t
gatgtgcatatcaacatttatacatggaactggagaacattgtgccaataataattaaaaaatgccaatttttaaggttatattttaaattgttctaatnaagttnnagtnccttgagggnnaaagattgttnttctgggtaanagctnttgggntggtttttnagancanagtcttgttgtgggtanactgtgactaggttcacagcctttgtggaacattccgtataacggcattgtggaagcaataactagttcctatgaaagaaccagagctgggaagatggctgggaagccaggccaaagtgggggcaacagcttgctttctttctcttctcaccctcagtttgtatgggaaaatggagatgtcctctccactttatcccncgatatntaaatgaaaaagaaagaaaacccacacncaaagcaaaaactcaagtattaagagcacatatttttgacccagtggaggctt

SEQ ID NO: 512230 - DNA, 377 bp, Homo sapiens
aagcaatttttcatgttttactcctatgagacagatatgaaagaacaatttaaactttgaacgtctacaaaagattggtccttggatgaaataaacttttcaaaagatgaatgttcttttcacaaaaataacgtagaaaaatgcactctactaagaaaccatgattagatagaccattgaaggtaggacaataagatgaagactttgtattttggctgtaacagtttcacttgtgtgactcatcttacacattatctcacttcattaaatctcataattatactatagaatgtatactgtcacaatttacacatagcatacatgacacatgttcaaatttattctatacaacatgaacaatagaacatataaacaag

SEQ ID NO: 512231 - DNA, 214 bp, Homo sapiens
tagaggatcccgactacatagaatgtggggattcctggtggtggagctactccctctgtggtgcttctcagtgccaccattgaagaggttgattaagccaaccaagtgtagatgtagcattgttccacacatctaaaacatttgaaggacctaaattcgtagcaaattctgtggcagttttaacaaagttaagctgctatagtaagttactggg

SEQ ID NO: 512232 - DNA, 914 bp, Homo sapiens
  misc_feature (78)..(79): n is a, c, g, or t
  misc_feature (133)..(135): n is a, c, g, or t
  misc_feature (170)..(170): n is a, c, g, or t
  misc_feature (173)..(173): n is a, c, g, or t
ggcagagctgcgcgcgcactcgggaaaggggggaagggagcagggtccaggcagggtggggttaggccccctgatccnnctcgttaccccgactggcacggaataaggggacggaaatgatcgagatggcggnnngagaaggagccgtttctggtgccggccccgccgcngcngctcaaagatgagtcgggcgtgagtggtggctggcccactggtgccacctgcaccaatgaggcctgcctctgtgtggagctcctgctggctgggacggagctgttggtcctgggtcgttgctgcgccatctgcggggtccccagccgctgcggtcggtcgggaaagcccctggggccgcgtgcacctcctccagtggtccccaggctgcagcagcaccgagggggctggccccaggcgcagtctgcatggggatggccctgcctgtcggatccccctgtgggctgatgcctgctcccccggacgtgggggaggagctgccggggagggtgggctgggacccgagcttgggtccccctgctcctcctcgacccctgcaatggctatcagcccaccggacacctggggcgcgggcggggggcaagaggagaaatagctgttaatgtacgggggaggcgacacgaggcttccacacatcagggacatcaacgcggcgccagccgcgctgaaatccggcacatgtgatcctgcgattcaccctccaaatatcattgctggagcgcgaaaaatactaagactcaccattacagctgacgttcggcaacactggcagttatgcgatctacaccgagacatatctaaaggaggacagacctctaagactcaacccccacgactcgcgacacaggcggcacaatccgtgtgtcagatctcaataccagaaaatattactcgaccaccat

SEQ ID NO: 512233 - DNA, 1116 bp, Homo sapiens
agtgccggctggtggaggccgtggacggcaaagccatgaacaccagccaggtggaggcgctggggatccagatgctgcctggctaccgggacccctaccacggccggcccctcaccaagggtgagctgggctgcttcctgagccactacaacatctggaaggaggtggtggaccgggggctgcagaaatcgcttgtgtttgaggatgacctgcgttttgagatcttcttcaagagacgtctgatgaacctcatgcgggatgtggagcgggagggcctggactgggacctcatctatgtgggccggaagcggatgcaggtggagcaccccgagaaggctgtgcctcgcgtgaggaacctggtggaggccgactattcctacccggacgaggaaggcccgaaacactggtctgactcacgctacgagcatgtcatgaagttgcgccaggcagccctgaaatcagctcgagacatgtgggctgattacatcctgttgtagatgcggacaacctgatcctcaaccctgacacactgagccgctctccaagatgctgcctgtggacgagttcctgcccgtcatgttcgacgaaaaccagtgtccgagtacaaggccacttctccctccggaactggatgccttctctgtggagccggtgctcatctacccaaaaatacacaggagacgatggtatgttgagtgacaccgagaactcaagtcgtatgggaccactgagcacgtccagaacgactgtgacgcggcaagtccagaagatgcgcgagcagcatggtcccagtggtaactgagggcttcggggcactttgtgaccttggggtggccccagagaggcctcgggtggggggggggtggctcaccaagcctctggtgttgcaacacctggtggtccaaggaacgaaatatggaggggggcacatgctgctccaccacaggggtgtccgtggtcaaagtgtgaagacacccagcctcttgtatgtgagacgacaaaattagacgagcaggagcaggggcacttaaacaacaggggggacgaacacaagaccagtagacgcaacagacgtgaagctagacagtagagtgcagcaagagaagaagtcgacag

SEQ ID NO: 512234 - DNA, 879 bp, Homo sapiens
ggtccaaggtgggcttcagcttggccccaagctgctgggatgggccctggccacctgcagttctgaactggaattagtgggtaaatgtttttattcatctttcttaaatgtatgtatagcttacatttatttcaatgtctttttttttttcaaaaaactggttggtatatggcatatataactaaaatataaaagcaacattttataaaactttctagagagacaaattccacacaagtggtaagggcaacctagtgtctctagattggtccgtgttccataaatgggattttaccaaatcctatgtaaatcaattttggtaacataacactgtaactcgtgggatttttcacatgtagattttggcagtaatcttgagatttaccaacacttttcggatgtatgtcacctctgattctgaaactaacattactattctgggatttcatatacagtattacaatcagggggggtttaccaagattagccttttaacagcatatctgaaaagttatctatctgttgacataaagaccaaactggtcttaccagaattagttcatattagtccgggatgtgtaaaccccttggtttaagaaccacaacaatctatgaatgcattaggaaaactgccacaagtgaccgactgcatcagaagagatcctactttttattcagccctcacgggatcggtccccggacgcggccggaacaagaccggagggaacagaaatacaacacaacttggtggccgcgccagaaacaaaaacatgtggcggcgcgcgagtgcaggatagcgccacaacgcgcgcggggcccacacacggcagcgcacagggagtatggcacgactacaccgggacagcacatcaacgaggc

SEQ ID NO: 512235 - DNA, 328 bp, Homo sapiens
ggactagggcacgagaccaagaaatcagccaggatgccattgcaatattccaggaatgagatgttggcagcctaggttggataaatggtctgtgtgggctgaaaagcctggtaagacagaagttagaagcattttcgagggagagttgtcagagcacagtggcctatgaatactagggtcatgactattggtgatcttttgagcaggctcattaaggggaagtctacagataccttctccatgtcatcccagttggtgatgatgccgtgttcaatggggtatttgagagttaggatccctcgcttgctctgagcctcatcctaccaaa

SEQ ID NO: 512236 - DNA, 878 bp, Homo sapiens
  misc_feature (78)..(79): n is a, c, g, or t
  misc_feature (133)..(135): n is a, c, g, or t
  misc_feature (170)..(170): n is a, c, g, or t
  misc_feature (173)..(173): n is a, c, g, or t
ggcagagctgcgcgcgcactcgggaaaggggggaagggagcagggtccaggcagggtggggttaggccccctgatccnnctcgttaccccgactggcacggaataaggggacggaaatgatcgagatggcggnnngagaaggagccgtttctggtgccggccccgccgcngcngctcaaagatgagtcgggcggagggggcaggaacccacggaagccagactgaacacaaagaggccagacatctgggagagctccgcggcaggaggacggagcgtgtgtccaggagatcggtatgcgcagccatacatgcaggggatccccaagacagacatagcgagacggacagggacaagcccacgggggaacagcgagaacaaaggcatcactaccatgatgaggtcacacacaagagcagacaagaaaagcaaacacagaaggaggggacggggaaccaccaaaggagacaggtcagcaaatgagaggagagacccagaccaatgaaaggggataaccacacacggggggaaggaaagcacgaaatcaaccacacggagaaacacgaagaagagagcgaaaagagacaggacaggacaccagagagagacaagcgagaaaggacaggagaacaaaacaaagaaagacaataggagggatacgaccgagacaaaatgggaaaatacaaagatacacaatatacaagaacacacagacacagacaaaaagatggagaaattacatacaaaagacacacaccagaacaccaggagagaagacaacaacaaaaggagaaagaaaaagcgacaaaggagagagaggcaaaaacagaaaacgacgtcgagaaacacaacacagagaacaataggataaacacaggaa

SEQ ID NO: 512237 - DNA, 430 bp, Homo sapiens
  misc_feature (226)..(226): n is a, c, g, or t
  misc_feature (248)..(248): n is a, c, g, or t
  misc_feature (274)..(274): n is a, c, g, or t
  misc_feature (300)..(301): n is a, c, g, or t
  misc_feature (339)..(340): n is a, c, g, or t
  misc_feature (358)..(358): n is a, c, g, or t
gctctgcagagccagccttggagcctgctcattttgggcccttgctgccaaggagcccagcctcacctagcaggaaaggagatgaaggccctcctcccaggaggtagggttttggctgccccgaacttaaatgcttttgaaatctcttagatgtggaaatattttttcgaacctgaaaatgcagctgggtagaatttcaaatggaagcataatccactgtgaaaantatattttagtgtgatattttngtaaaatagcactttttggtgtgtgnttgatacctggtttcccaagatctgnntatttcagatggtttacaaaagggagagaaggaccttnntcctcaccctcccctttntgacagaagattagaaggtacttcttttaagaaaaaaaaataaaatttgagaaatgtgtgattgattttaga

SEQ ID NO: 512238 - DNA, 1092 bp, Homo sapiens
  misc_feature (27)..(27): n is a, c, g, or t
  misc_feature (92)..(92): n is a, c, g, or t
  misc_feature (204)..(204): n is a, c, g, or t
  misc_feature (219)..(219): n is a, c, g, or t
  misc_feature (344)..(344): n is a, c, g, or t
  misc_feature (364)..(364): n is a, c, g, or t
  misc_feature (450)..(450): n is a, c, g, or t
  misc_feature (510)..(510): n is a, c, g, or t
  misc_feature (576)..(576): n is a, c, g, or t
  misc_feature (602)..(602): n is a, c, g, or t
  misc_feature (627)..(627): n is a, c, g, or t
  misc_feature (643)..(643): n is a, c, g, or t
  misc_feature (668)..(668): n is a, c, g, or t
  misc_feature (680)..(680): n is a, c, g, or t
  misc_feature (714)..(714): n is a, c, g, or t
  misc_feature (728)..(728): n is a, c, g, or t
  misc_feature (734)..(734): n is a, c, g, or t
  misc_feature (743)..(743): n is a, c, g, or t
  misc_feature (767)..(767): n is a, c, g, or t
  misc_feature (788)..(788): n is a, c, g, or t
  misc_feature (828)..(828): n is a, c, g, or t
  misc_feature (849)..(849): n is a, c, g, or t
  misc_feature (875)..(875): n is a, c, g, or t
  misc_feature (882)..(882): n is a, c, g, or t
  misc_feature (884)..(884): n is a, c, g, or t
  misc_feature (903)..(903): n is a, c, g, or t
  misc_feature (916)..(916): n is a, c, g, or t
  misc_feature (935)..(935): n is a, c, g, or t
  misc_feature (939)..(939): n is a, c, g, or t
  misc_feature (973)..(973): n is a, c, g, or t
  misc_feature (976)..(976): n is a, c, g, or t
  misc_feature (978)..(978): n is a, c, g, or t
  misc_feature (991)..(991): n is a, c, g, or t
  misc_feature (1009)..(1009): n is a, c, g, or t
  misc_feature (1016)..(1016): n is a, c, g, or t
  misc_feature (1020)..(1020): n is a, c, g, or t
  misc_feature (1024)..(1024): n is a, c, g, or t
  misc_feature (1030)..(1030): n is a, c, g, or t
  misc_feature (1056)..(1056): n is a, c, g, or t
gaccagtaaggggtgagggcacgtccnccgaagacgaggggtggcatccctgcccaggggcctgagcctgaatgcactaagggctggccccncagacaggctcaggggagggccgcccacaagggcttggggcccctccctcaggaagacgccacccctgccagggggtccgtggccctggcggtcacaactgcctgggttganctcagggaggttganctctctcagggagaactgtggggtggggatgtagccttgggagggcccttcaggaagtaggagtggggggttggggagtgtggtagagccagacacttctggggacgtcagtaatagttactaanatttggaggcagttggagangctggccccaaggttgaggtatcagttagagcagaacaattggacctagagctggtttttcctttgggtttaggtgttagttaacnattatcattggagttgagaactggagaaaaagggttgttacttttcagcactacacagcngcagggacacagatgggacacattcccagaaagacacaaaggtagacacgtggcttttcacccatncacacacacacaatcacgcatacctnttggcatgttttttaacacccacangcacccacacccacangccttggagttcacagaactgtttncattcatttgtnccagggtggggccttgagttaaaggaaaggggtntgttaagggtaganagtttngttggaganacggatttcttcctgaacaaagtncctcccctacatggtggacangggaagagacggcctttagttacttcctcttgacccccanggctgcctgccgcctcatgtnggacaggatgtcatcttgacgttgcngaacgtngncggtggtgcaacacattangggtatacaactngccccacaaggactctcanagtncagccgatgttgtaaccttcaagggtgccagagnagngngagatgtcccagngcccgagggggaggcagngtcttangaantttnattctncctctctcattaaaccctctaaaacnggaataggaaagctcacctgcgaaacttaggttgag

SEQ ID NO: 512239 - DNA, 661 bp, Homo sapiens
  misc_feature (544)..(544): n is a, c, g, or t
  misc_feature (566)..(566): n is a, c, g, or t
  misc_feature (661)..(661): n is a, c, g, or t
gggagaagagtctcgctctgtcaccaggatggagtgcaatggcacaatctcggttcagtgcaacctccacctcctgggttcaagcaattttcccacctcagcctttggagtagctgggattacaggcacacaccaccatgcctggctaatttttggatttttttttcagtagagacagggtttcaccatgtcggccaggctggtcttgagctcctgacaatcaggggatctgcctgcatcggcctcccaaagtgctaggattacagctcgtgagccactggttttataagggggagtttccctgcacaagctctcgctttgcttgctgccatccatgtaagacatgacttgctcctttttgccttccaccatgattgaggtctccccagccatgtggaactgggagtccattaaaactctttcctcttaaattacccagtctcaggtatgtctttattagcaggtgaaaatggactaattaattggcaacaaatgaacccagaagcctaggcccactcctgccctttcaatactttttccaacntgctaaaactaggagattctgngttacctgattaagggcctgctagactctagggcaccccaaccagcatgacctcttttaggtatgggcaatgtgtcgcagtattacatagctttn

SEQ ID NO: 512240 - DNA, 655 bp, Homo sapiens
  misc_feature (211)..(211): n is a, c, g, or t
  misc_feature (222)..(222): n is a, c, g, or t
  misc_feature (226)..(226): n is a, c, g, or t
  misc_feature (236)..(236): n is a, c, g, or t
  misc_feature (239)..(239): n is a, c, g, or t
  misc_feature (244)..(244): n is a, c, g, or t
  misc_feature (248)..(248): n is a, c, g, or t
  misc_feature (251)..(251): n is a, c, g, or t
  misc_feature (262)..(262): n is a, c, g, or t
  misc_feature (503)..(503): n is a, c, g, or t
  misc_feature (578)..(578): n is a, c, g, or t
ggcctgggtgagcccccttcaggcttaccccgaacaatttggttgcaaaccctgggtggcagtttttaaaatggctccccaataaaacccagttaatcacttggcaaaagtcacgtcggggtttcctgttagtccctaaaggtctgtgaataagtgcacttatgtatgtccaataattaatattctacccagactagtgaaggatttttgnaaaattgattnccanaaactgtcanccncaaanaaantgnattggtttttnaaaaaagaaagtgtatttggaaataaagtcagatggaaaattcattttttaaattcccgttttgtcactttttctgataaaagatggccatattaccccttttcggccccatgtatctcagtaccccatggagctgggctaagtaaataggaattggtttcacgcctgaggcaattagacactttggaagatggcataacctgtctcacctggacttaagcgtctggctctaattcacagngctcttttctcctcactgtatccaggttccctcccagaggagccaccagttctcatgggtggcactcagtctctnttctctccagctgactaaactttttttctgtaccagttaatttttccaactactaatagaataaaggcagttttcta

SEQ ID NO: 512241 - DNA, 468 bp, Homo sapiens
  misc_feature (316)..(316): n is a, c, g, or t
  misc_feature (391)..(391): n is a, c, g, or t
ggctggtcggagggtcaccgggatgtgggggcgcctcgtactgttgagctgtaaagagagggtgtaggtgttactgaagaggatcgtgtattgggcagtgaggtcagatggaaaattcattttttaaattcccgttttgtcactttttctgataaaagatggccatattaccccttttcggccccatgtatctcagtaccccatggagctgggctaagtaaataggaattggtttcacgcctgaggcaattagacactttggaagatggcataacctgtctcacctggacttaagcgtctggctctaattcacagngctcttttctcctcactgtatccaggttccctcccagaggagccaccagttctcatgggtggcactcagtctctnttctctccagctgactaaactttttttctgtaccagttaatttttccaactactaatagaataaaggcagttttcta

SEQ ID NO: 512242 - DNA, 613 bp, Homo sapiens
ggacgcgtggtgatcgacccacgcgtgcgctcttcgtccgtggggttgctcatgtgtgatgtcgcctcgtgctgtcccatacagtccctaccatgttaggagggtgagaacaatcccgaagctaaagggttgggtgttaaggagattgaatttggaagaaggctacgattctggtagtgcgaaggtgatgatactagcagtggttcgcagtgtaactcgagggttgtcattcgattgcgcatacgtgctatacccaagtgaggtatgacgagcatataattaacacggttatattaatgatagataacagcagcagtatacttagcagtttactagtgatgctatacgctaagagtactctattgtatggagccaagctccttaagcggataggtgtgcaaatggagcaggtctcagactaaggagccggggcatatgtggtggggaaatcactttttgactgggggatatggttgcagatttaggaaagggttttcctaagaatttgaaaggccttaaatttcatttattgaatttaagggcgtttttcggatttcaagaactcccaattggggccagcgttggtgcatgtcgtacatttaaaatttgatgg

SEQ ID NO: 512243 - DNA, 875 bp, Homo sapiens
gagaattatccttgaggacaatgactctgtgtgtgtgtgtgtgtgtgtcgttgtgtgtgtgtgtgtgtgtgtgtgtgtggttgagagcaggtgcttcactgtatagacagatcacagccagcggccgtagaagacacacacagagagagatgatggagggccggctaccgtcatggatgtggtgtggagaggagcgtggaggagttagtggtggtaacacaccacgagggagtgggtgacggcgggaagaacaacaaccggcgagagcgtcgctcgtgcatggtatgatgctggtgttagcaccaagaagccgtagtgtggatgctgcccatcatcaggacgatctacagtctcttcctcatcatcacacaaggtgtgtgagggcgccgcgtggggctttagacaccaacgcagcacacagagaaagaagagaagtagtacagcaggaacatcatcagcgcaccaagcatcctccccagcaggagcatggtgatggtcgatgtgctgcatcgtgtggtggggtgatgaagatgaaggaaaccacgcaggacgatcatcttgttaggtgggaatagatgtggtggtacgtaagtcggtctcttcgtctcccgctgcgagcatgtttcactcccaggcatgatcgtccgcaaccagggggggaggagacagccccccacggagaggggagcaggagggagaaacagtcaaagagcaggagggtagcagagtcggcggcagaaagcgagcagggcagtgacagaacgcagtcagcagggggttaatcgtgtgaagaaaaccacagaaagacaaaagaagcgtgtgggggtggagaatccttctcggtcgcgaaaacccgttgggaggggagaaaagaa

SEQ ID NO: 512244 - DNA, 277 bp, Homo sapiens
cgagctcggtaccccttttggggtctgtgctcttttgggtttcgctcaaattcgtgtaaaaaaaatttaacccaggaacttgccatctattatttcggggggacttggcagtctgccctaaaaagcttcagacaagattcatgagtataagcctgaaaaagagaaacctacaacacccggaattgggcctacgtccccatataattccttttacacctaagtgcgaaactccccctttgtttttggaaaataaataaagggtttcccataagtaagt

SEQ ID NO: 512245 - DNA, 1304 bp, Homo sapiens
  misc_feature (321)..(321): n is a, c, g, or t
  misc_feature (342)..(342): n is a, c, g, or t
  misc_feature (648)..(648): n is a, c, g, or t
  misc_feature (680)..(680): n is a, c, g, or t
gatgccgtggaggcgagaaggccacgggaccgaaggtgagctgccggcccgcagtctgttcgtagaagaaggtcctgaggctcgacgcatgagtggtgaatctcccatgatgtagacgaaagacatggcgctgttagacggaagtgtatggtgcgacttagtgtactacgcgcacaagtccaaagacacgccataccaggcagacacatcaatacgcgacggttgtgatcatggactcctgcatatatcaggagttgcgaacgaggcgcgagccaaccgtctataccagccggactgagacagttgcacgtacctggcagnaattgaaaaccagagtatcancacacctatgagtcgctcttgcgtagcacgggtccatacaacgacgcctttagcgtacaacgactggacgtatatataagtctggagacgctcaagcaatacgcttagcaacgacctcaaggaggaaccataagacgccaacaaaggacgtatatgcaagaggccatgtacggacgtagtgtccgtgcgccccgagagccctgtaccgaaggtacaaggtctgcgtcgtcacaacatggggggaccagtgcacctatacgaaagcagacctacgcgtggtacccttgctgaggcaagtgatgtttnaatcgatccagtgcatccctacactttagggntggggaagtaaacatagtagagagcatcaagccatagagatagagatagaatttgcaacacgaaccgtggaatcccatcgagcctggttgtcttcttgccctgccctgatgtccgtcaacaatggggggtcccttacttgcattatcaagggaaaggcaagacttgggacgtctagtccacaggaagacctgcaccactgtcgccttcacacaggtgaactcggaagacaaaggcgcttttggctaagctggtggaagctatcaggacccccattttccccctgaccagatacgatgagaatcggcgtcactggggtggccattgtcctgggtcctaagtctgtggtcgtatcgccaagttcgaaaaggcaaggtaaagacttggccacttaaaactgggtttaactggttacccctgttgcagttttccgggtcctttaaacatatcttggacttccttatcacacatcatatcatcacacacctacaaaacaacccgcgcgcctatttgggggggggaacacagctcactacagggcacctgataatctgctctctcacaccccttttgcacgggggacaggcggccccacggggcgcaatcgcacaccgccgcgacacatc

SEQ ID NO: 512246 - DNA, 253 bp, Homo sapiens
cctctagcaggctccccagttactctccagaagaagcacaagctgtttcttcacaaattattgggacaaaattgtttaccaagcaatacgggagacaagggcagtaagtatgcgatctagtattggtctgtgagcgaaaatatcccaggagagaatactactttgctataaccatggaaaggtcatttcatattatgaatattgctgatttatttcaaagtggttctactgtaatgatcagcatgaaccaata

SEQ ID NO: 512247 - DNA, 1019 bp, Homo sapiens
  misc_feature (822)..(822): n is a, c, g, or t
gggcaaatcagttcgcagcctgccagcgcgccctgtcaccatctccacaggagagtgcaggctcctcgctccctacgattctagagtacgatctcatgacttccataccccgtattctaagagagtgcacaacgtcttctctctctaagcccgcttgcgctcagcttatcctacgcctggggatccttggaccgtcgactcttctggccaataagtgaaagagtatcagagcattatcaatcatgcgacatgagccatcactatgcttgcttctgtggaatgctataaatctaccgtagatgacctggtggatctcaatgagctcattgaaggcactagatgatggtcccttacttagtagtgctcaccccttggagagatgaatgttatggatttatatagcatgtacatagcgttgacatatctgctctagaggggaacataacgacaggaggacgatgtttggcaagacttgcccatgagcaatcatgaccacgtaattgctgcatgcacacctcgcctcctttgtcagcaatcatagtgcctaggtatatgatctaatacattgcataccctgtaagggttaaccctctgtctgcaaggagtagtacaccagggaagatcatttgttctggtcattatgagaaacatggcttaaaacctgatgcgagagattggtcgtcttttctgaaaaacaaatgtggcacgacatttttgtattaaactgacagaactggggcgggaactccttttataattatacctcttcccgcaaggttagtcctcactgtctaccaactgtctgcacagaatcatttctantacgactagtgcctacctttcttgcgaagtacgagaaaaagaagggaccttggctacttgacccgggccagttggatcaccctatgcttgtacttcgtggaaaatgcggtccacctacttgcgggaaacctatctgggagacaccgaccacttacctccttgttggcaggttgcaccaaactggtggacaattctcc

SEQ ID NO: 512248 - DNA, 642 bp, Homo sapiens
taggtcttgctctgggtccagatgatcagcactgtaaagatagtggtaacgcctggcactgcattactgagcattaactctggacaggccagttcctttcaggaggacttccccaacccctcggccctttctgctttgcccctctcctgaaacgctatcacctgtgactggccaacccacattttaaagaatagttacattagtgattcctaaagatccttagtccttctgttcatccatccatggatacttaatgagcattcttgaggggctataatgaacaaggcagaggtgtcccttaccccagaagagctctaatgggaaagaagatgataaagacaattagcatacaaagtgatcagtgctgtgagaaggaagtgggaggaacataggactctcgggtgggcgcctcaactggactagatggtgcagggaaggcttccggaagcagctaccaagtaaagtaggacctgaagactgagtaggtgtcagtcagatgaggggaaggtgtgtggaattgaaagcatctccatggcagtggtaggagcacttgtgtgagagtatgctgtgtgtttgtgtgtgtgtctgtgcacatgtgtgtgtgtgctgcttagagtttttgagcaaagtatggaatgatca

SEQ ID NO: 512249 - DNA, 336 bp, Homo sapiens
gagacggagtttcactcttgttgcccaggctggagtgcaatggcgcgatctcggctcaccgcaacctccgccccccaggttcaagcgactctcgggtgggcgcctcaactggactagatggtgcagggaaggcttccggaagcagctaccaagtaaagtaggacctgaagactgagtaggtgtcagtcagatgaggggaaggtgtgtggaattgaaagcatctccatggcagtggtaggagcacttgtgtgagagtatgctgtgtgtttgtgtgtgtgtctgtgcacatgtgtgtgtgtgctgcttagagtttttgagcaaagtatggaatgatca

SEQ ID NO: 512250 - DNA, 912 bp, Homo sapiens
gctttgccctttcgccttgtttcgcgccaatccgttcccttccggcttcccaagccatgtccctcctggcacgtgtcccccgttgtatgagccaaatgttgggcccacctgtgagaattttcccccccgggcccgaatttgccacacaaactggggggccccccccaccgaccaacgggggttctaaccgacccgccgtccaggctttccctcccctgggttgtggggcaggcccgactattctaatgctcctgtgggcgagtctgccctttcttcacattcccgcccgggttttgtcccgccccccccctttgttccgctcggagtatctgctggcccaatgaggccaccgggtgttccgcggtttttccccctgcccgttttttacgccgccgcggggtcacacaactgtggggcaccccgcccccttcccatcccctgggcacccacgtccctcattttttgcacgggggcaccaccttcgagtttcggggcccgcatttctcccacgagtgcggtcccgtcggtcttgagcggcttcctctggtttgtgccccgcgccttcattgtgtgaacctcctctccccccggacagtttccccgccgcacagtgtgctctgctcgggtcctccccttgagggcgggcaacggtttcttccgccgggattattgtgctgcggccccttgtggttgcacagaggggcacgcccttcccacgagatgttgctacccaggggtgtagtcctgcgcccccgcagggcacagccccgtgcggctggttcaccacccacgggtctccccaacgatctgaatcagggatcatgccacccccttcgtccgacccagctgagcccccccgctgtttttcccgtttttaaacccaaaaaaggacccccttttccaaaaaaaaac

SEQ ID NO: 512251 - DNA, 152 bp, Homo sapiens
gttttaattggttttctctttcccgattttttttttattaaaacaaagggccttttttccaaagtaaaaaatcacaaacgcttaggttttactattcaattcaatcccccctcccattgcacttatctcccttccccaagttgtttgtttta

SEQ ID NO: 512252 - DNA, 519 bp, Homo sapiens
  misc_feature (481)..(481): n is a, c, g, or t
catatctctctttgtcacagttccagaagaattcccaggaatttagctttccctttactctaatctcagaaggagctataccctctttgaagctccatagagagaaataggaacaaacttacccaaaacacacggtgggtatgagtgctgatttttatccccatggagaaagggaattttacagcaatgagcatagggtctctggtgaaaggtcatatccatacatatctttatagaaaaaaaaaaagaaggcttggaaatagtgagaacaaagcccagagcccagggcttggtgggaaagcaggccctggctccccttcctgcatgtgagttttgacttcttcctgtgctggtcagggctgcaaatggctgataatatcactgaagcctggactatcttcaaagcccgactggcacaaaatgacatattaatgtagtatctcatttcctttgcattctggggacaagtgggattggctcnatgcccagggatatcctgtgaactcatggaataggact

SEQ ID NO: 512253 - DNA, 363 bp, Homo sapiens
gacacaggcaggcttgtggtggggcttctggatccctcagtgtatgggtcagtgtagcatctcacagggagggtggctttgaggcacgtaccccataggaaggcggtgaggaaagcaggactgtgccgtggtctgggaggtgtacagagaataggtgtgccgaagagtgggcctggaagttgaggggtgcctgctgcctgtggttgattgggcacctgtgcctctgtcctacaatcggacatgggtttcttgctcctagaattgtctgggtccctggtctgtcctactctgatctcagtgtgtttgaacttggatgtggagattcggatgtgttcccgcggattgctgtggctttgcgccttt

SEQ ID NO: 512254 - DNA, 150 bp, Homo sapiens
  misc_feature (7)..(7): n is a, c, g, or t
ggtcttntgcttcttggtatcgacatcgtcatcctcatcatctccagaagaccgcttgcccgtagctgaatcagattcttcatcttcatctccatcctcttcctcaccatcaccttcttcttcctcctcctcttcctccccaccttcttc

SEQ ID NO: 512255 - DNA, 314 bp, Homo sapiens
tttccagtgctacaggatctctgatctggggcacaacaccctggacttggctcctgagatcaactggccggccctcgtgagccatcattgataacactaaagggcagctggtggtgcatccagaagccctgaagatcctatctgcaattacgcagcctgtggtggtggtggcgattgtgggcctctatcgcacaggcaaatcctacctgatgaacaagctggctgggaagaaaaacggcttctctctaggctccacagtgaagtctcacaccaagggaatctggatgtggtgtgtgcctcatcccaagaagcca

SEQ ID NO: 512256 - DNA, 1808 bp, Homo sapiens
gggcagggacaaggattggaaggtaaagtccttattcagaccaatcttcctgcagggactatacgtagctttgggaaagggactttgaaacactttgattttcttttcagtaatataattatggtacttattcttttatgttattaaatattcttttggataacactgaggaaggggtgtttgtgagaaacagcactggtatttagagttcccagctatgaaggaaatgctcttcacaggtattagagtacaactgacttgaaaaaaaattcatctctccgtggttatatttctacaagaagttgtttaaatttaagtaaaatattaatatatgttatttgtctaacagtgaaagagaaaaaatcaagaacaataaaacattagagaagaaaatagaaaaatcctgtgaaaaaggtccaaatgcaggctgcaaagaggggaagccagtcctagcaagcacctaaccaactaaatgacctgaaaaaaaagtctgtcagcctctatctacctggatctcattagtaaaattaggaggcaggatgaaataatttataaggttgctattagctttaaaatttttatgagttcagagcctttaaaaacatgatgtcttcagcagaaaacaccactgtgaattttttttcaatattccttttaactataatggaaacaagttaaaaataataggtctaatgttcataaatccattaaatatttactggtcaccctcttgatgactattttgatttaatacatggtatatataaatcatcaatattttcaagttcaaaaatgcacagggaggaattttatggcttctgtgatggctttgaacaaaagtgtaatttacttccttgtttgtgtaagtgtttatatactgatcatttgtcagtaagcctgagaatctaagcacaatattatatatgcatgctaagtgcttagtttatcattatgattttcctcttgaatttaaattgtgtaatgcagataatttaacttttctagggttctcgtttatttttaaaatgttagtgtccaggtaacaaccagaaaaaaaaaaattctaagccatgtggtatgctaatactgaaaataaaatgagtgttatttcccttgagggaaatgtaattaaagataaaggggagatatgcctagaataatgacattcactatacataactaataagataatattgttttaaaattctgtaaatttttcttattttacttaattttatgtccctgctggtatttttgctttttcataaaaattatcatttatttttctcaactgcatattgccatcttcattttttaattttctcacatattcatagaattgttctctgtaatagatactgtacagtaattatttgttgatcgattaaccttttcaatgctacttccgacacctacttcccatcctccgtgtaacagatactgtcagttacctatccttaacagcctttccactcccaacttctgtgaatggacaagagatgcaattgtgatcactgaacatgaggcaacatcttctaggaagacatttccatagtcttcagacaaaagggagagatatcttttcagacaatctttgaacaatcctatatgaagcttacctgaagttgctgtagccgtttggcaagtctggggagactaacagacacactgaggatagcagaaaataaagatagaaacagcccaggtttttggtgaaattcatgagcttctgaataacgaaccccataccaccctacctctataaaagaattcttaatatgtgacataataaaatttctttattattt

SEQ ID NO: 512257 - DNA, 253 bp, Homo sapiens
aacgcgcaagtagatatatgctatataacactgatctttaagaatcatttagctctcaaactaattaggtaatcactggtaatccaccttggtcggaagaggcctgcttgtggtcagttgcacttgcttgctaggcagagggacaatcgggaggggctcaagagcgcctcccccgccagcgccgtcactgcagtggaaggcggtccttgggcaccagcaaaggcaaggcccattttcacatttccgcttgggg

SEQ ID NO: 512258 - DNA, 136 bp, Homo sapiens
cccccccccccaaatttataattttttatacaaatatttcctctggcttggaacttttggccaggtttttttttggcccggggggggggggtccaaagtctgggggccccccctttttaaataaaaattttcccta

SEQ ID NO: 512259 - DNA, 339 bp, Homo sapiens
ccaccatttaataagagcttcagttctgccaagggcattcctacactgtaaagaatttccaggctgggcgcggtggctcatgcctgtaatcccagcacttgggaggccgaggagggcggatcacaaggtcaagagattgagatcatcctggccaacatggtgaaactccgtctctactaaaaatacaaaaattagctgggcatggtggcacgtgcctgtagtcccagctacttgggaggctgaggcaggagaatcgctggaacccaggaggcagaaggggcagtgagccgagatcgtgccactgcactccagcctggcgacagagcgagactctgtctt

SEQ ID NO: 512260 - DNA, 124 bp, Homo sapiens
  misc_feature (2)..(2): n is a, c, g, or t
tnaccagctatacatgcactggcgtcgtttaacactaacagctataccatgcatggccgtcgtttaacactaacagcgtataaccatgcattggccgtcgttgaacataaacagctatacccat

SEQ ID NO: 512261 - DNA, 494 bp, Homo sapiens
  misc_feature (33)..(33): n is a, c, g, or t
  misc_feature (41)..(41): n is a, c, g, or t
  misc_feature (91)..(91): n is a, c, g, or t
  misc_feature (475)..(475): n is a, c, g, or t
  misc_feature (477)..(477): n is a, c, g, or t
  misc_feature (482)..(482): n is a, c, g, or t
aaaaaaaaaaaaaggcttggggtcccctgtttnccctcctngcggccttcaaactctgacttcactctgtaactgtacccctaaattcccnaatacaaaaatccttttttttttctgagatggagcttcactcttgttgtcccaggctggagtgagactcccatctcaaaaaaaaaaagtagaatatttacaatctaaaatgtcctctctggcccagatacggtcactcacacctgtaatctcagcactttgggaggccaaggcaggagggactactagagccccaggagttcaagaccagcctgagcaacactgtgaaacccagtttctactaaaaatacaaaaactagccaagcatcgtggcacatgcctgcaatcccagctattcaggaggctgaaacacaagaatcactggaacccaggaggcagaggttgcagtgagccgagatcacaccactgcactccagcctgggananataanaaagtactgtct

SEQ ID NO: 512262 - DNA, 610 bp, Homo sapiens
agccggacggggatctgagctggcaggatgaatgtgggggtggcacacagcgaagtaaaccccaacacccgagtgatgaatagccgaggcatctggctggcctacatcatcttggtaggattgctgcatatggttctactcagcatccccttcttcagcattcctgttgtctggaccctgaccaacgtcatccataacctggctacgtatgtcttccttcatacggtgaaagggacaccctttgagactcctgaccaaggaaaggctcggctactgacacactgggagcaaaatggactatgggctccaggtttacctcttccccggaaggttccctcaagaattttttcccatattggggcatcatattctccgtggccgagcttctataccagagtagtgagtgcgtgcgcatctttccctcactcacacacaggcctcattgctaaagtgtactgctggccgaagttggccccagttccatggggttcgtgtctttggcatcaacaaatactgagggatgggtttggggacagctccatgggcatggggaaggcactgaaacagaggactataaaacatcaaaaacaacacaaaccacacacaacac

SEQ ID NO: 512263 - DNA, 593 bp, Homo sapiens
  misc_feature (40)..(40): n is a, c, g, or t
  misc_feature (121)..(121): n is a, c, g, or t
  misc_feature (124)..(124): n is a, c, g, or t
  misc_feature (155)..(155): n is a, c, g, or t
  misc_feature (163)..(163): n is a, c, g, or t
  misc_feature (199)..(199): n is a, c, g, or t
  misc_feature (247)..(247): n is a, c, g, or t
  misc_feature (250)..(250): n is a, c, g, or t
  misc_feature (376)..(376): n is a, c, g, or t
  misc_feature (378)..(378): n is a, c, g, or t
  misc_feature (588)..(588): n is a, c, g, or t
gtggaacatttcaccaaatctccctccattcatctttttntcccccctctcaacccctagctctcacttctctcttctttctcacttcccccttaacactctattctaacccctctaaaanacncactaaaactactaacctcataataatcacntttaacanaacccccaccactaacccaccctctcaccaaaattnaaacaacacttcctctttccccttcaatataaccccttctcatctctnatnccctcaacaaccactccacctccctctcactacccctactcatcccccttcaaccccccatcacaccacatccccacctactccccttccttctcacttaccttcctcaacttcacattcaccttncncacctccccttcacccactccctcatccaccttcttccccaccaaatcaaccccaaccccctacttctctccatccctccacacctccatctcccccatcacctccttcctcaaccacttactcatcaccaacctcgccctcccccatcccacaacccaccttcaccaccccaccctcccgccaccaccgatcatccccgccccattctncaacc

SEQ ID NO: 512264 - DNA, 98 bp, Homo sapiens
acggccgtgtattactgtgcgggttcgtatagcagtggctggggccatcatgatgcttttgtcatctggggccaagggacaatggtcaccgtctcttc

SEQ ID NO: 512265 - DNA, 183 bp, Homo sapiens
ctcactatccagaaagaatgaacaagaacaggctgtatgcaacaaatatttagtccctttacacatattgtcaatcttcattaatgctaaaaaatgtagtgattattaaatgtctgaaagaatcagtatgtataattaagatggttaatctcttagtataacacattttgttcagtctcagcg

SEQ ID NO: 512266 - DNA, 145 bp, Homo sapiens
gagagagagagaggatcacttgagctcaggagtttgaaaccagcctgggctacacagtgagaccctatctctttaaaaaagtatatacactcaaaaaagaggaagtcaaattatacctatatgcagatgacatgatcttatatat

SEQ ID NO: 512267 - DNA, 411 bp, Homo sapiens
  misc_feature (78)..(78): n is a, c, g, or t
  misc_feature (404)..(407): n is a, c, g, or t
ccgtgggtgggggttaggggaacactctgttaaaaaatatggttgatgtattatcctagtaaaaggtgaggaaaaaancttcattttaaagagtaaaaatatgtcatccccctggcatggtggctcacacctgtaatccccaacactttgggaggccccaggtgggaggatcactcaaggctagaagttcgagaccagcctaagcaacaaagcaagatccctctctctaccaaaaaaaaattaaaaattagctgagtgtggtggcatgcacctgtagtctgtagtcctagctactcatgaggttgagacaggaggattgcttgagcccaggagtttaagactgcagtgagttatcactgtaccactgcactccagcgtggttggcagagtaagaccctgtctcnnnnaaaa

SEQ ID NO: 512268 - DNA, 166 bp, Homo sapiens
  misc_feature (22)..(22): n is a, c, g, or t
tggttctgggtagctgaggcangttaattgctggaacctgaaaggcggaggtagcagtgggcagagatcgtgctgtcgcactccagccagctgggcaacaggagtgaagctccatctcaaaaaaaaaacaacaaacaggctaaacctggccttttctgtttacccg

SEQ ID NO: 512269 - DNA, 777 bp, Homo sapiens
  misc_feature (679)..(679): n is a, c, g, or t
  misc_feature (705)..(705): n is a, c, g, or t
  misc_feature (739)..(739): n is a, c, g, or t
aaggagactagagccttgaagatgaggagtgcagtggccagtcatcggaaattgataatgaccaattgagaacatcatcgaagctgatcctcttacaactataagagagctgcccaagaactcaatgttgaccattttatggtcgttcggcatttgaagcaaattgaaaaggtgaaaaagctcaataaatgggtgcctcatgagctgagtgaaaaataaaaaaattcgttgttttgaagtgtcattttctctattctatgcaacaataatgaatcatctctctatcggattgtgatgtgtgccaaaaggtggattttatacgacaactggcgatgaccagctcagtggctggactgaaagaagctccaaagcacttcccaaagccaaacttgctccaaaaaatggtcatggtcattgtttggtggtttgctgccagtctgatccactacagctttctgaatccaggtgaaaccattacatctgataagtatgctcagcaaatcaatgagatgcaccaaaaactgcaatgcctgcagccggcattggccaccagaaagggcccaattcttttcacgacaacactgggccgcacgttgcacaaccaacgcttcgaaaattgaactaattgggctatgaagttttgcctcatctgccatatcacctgacctcctgccaacanactaccacttctttaggcaatctcancaacgttttgcagggaaattgcttccacaactancaaggcacagaaaaatgctttcccaagaagttcgtcaa

SEQ ID NO: 512270 - DNA, 984 bp, Homo sapiens
  misc_feature (22)..(22): n is a, c, g, or t
  misc_feature (80)..(80): n is a, c, g, or t
  misc_feature (89)..(89): n is a, c, g, or t
  misc_feature (140)..(140): n is a, c, g, or t
  misc_feature (147)..(147): n is a, c, g, or t
  misc_feature (149)..(149): n is a, c, g, or t
  misc_feature (167)..(167): n is a, c, g, or t
  misc_feature (178)..(178): n is a, c, g, or t
  misc_feature (191)..(191): n is a, c, g, or t
  misc_feature (208)..(208): n is a, c, g, or t
  misc_feature (230)..(230): n is a, c, g, or t
  misc_feature (247)..(247): n is a, c, g, or t
  misc_feature (256)..(256): n is a, c, g, or t
  misc_feature (270)..(270): n is a, c, g, or t
  misc_feature (283)..(284): n is a, c, g, or t
  misc_feature (286)..(286): n is a, c, g, or t
  misc_feature (296)..(296): n is a, c, g, or t
  misc_feature (307)..(307): n is a, c, g, or t
  misc_feature (326)..(326): n is a, c, g, or t
  misc_feature (330)..(330): n is a, c, g, or t
  misc_feature (337)..(337): n is a, c, g, or t
  misc_feature (344)..(344): n is a, c, g, or t
  misc_feature (348)..(349): n is a, c, g, or t
  misc_feature (368)..(368): n is a, c, g, or t
  misc_feature (381)..(381): n is a, c, g, or t
  misc_feature (400)..(400): n is a, c, g, or t
  misc_feature (406)..(406): n is a, c, g, or t
  misc_feature (416)..(416): n is a, c, g, or t
  misc_feature (427)..(427): n is a, c, g, or t
  misc_feature (429)..(429): n is a, c, g, or t
  misc_feature (454)..(454): n is a, c, g, or t
  misc_feature (458)..(458): n is a, c, g, or t
  misc_feature (480)..(480): n is a, c, g, or t
  misc_feature (484)..(484): n is a, c, g, or t
  misc_feature (491)..(491): n is a, c, g, or t
  misc_feature (497)..(497): n is a, c, g, or t
  misc_feature (734)..(734): n is a, c, g, or t
  misc_feature (739)..(739): n is a, c, g, or t
  misc_feature (744)..(744): n is a, c, g, or t
  misc_feature (750)..(750): n is a, c, g, or t
  misc_feature (809)..(809): n is a, c, g, or t
  misc_feature (818)..(818): n is a, c, g, or t
  misc_feature (821)..(821): n is a, c, g, or t
  misc_feature (827)..(827): n is a, c, g, or t
  misc_feature (831)..(832): n is a, c, g, or t
  misc_feature (837)..(838): n is a, c, g, or t
  misc_feature (841)..(841): n is a, c, g, or t
  misc_feature (866)..(866): n is a, c, g, or t
  misc_feature (888)..(888): n is a, c, g, or t
  misc_feature (891)..(891): n is a, c, g, or t
  misc_feature (893)..(893): n is a, c, g, or t
  misc_feature (905)..(905): n is a, c, g, or t
  misc_feature (910)..(910): n is a, c, g, or t
  misc_feature (920)..(921): n is a, c, g, or t
  misc_feature (975)..(975): n is a, c, g, or t
cccctccgcaccaggctgcctnctgtttcccggggagatcatgaaacgaggtcgccttcccagcagcagtcaggattctnacgacaatngcagcctgtcaactacttggtcccagaattcccgatcccagcataggagangctcctncnccagacatgaagatcganagccttcagangtgtttaggacanacctgatcactgccatnaagcttgcatgactcctaccanctgaatccggatgagtnctatgtgtnggcagatccctggngacaggaatgggnnanaggggtccangtgcctgtcancccggggaccatccctcancctntcgccanggttgtntctnnagacaaatccctcatgctncatcaggcccaanaagtacatcgtgtcatcangctctnagcctcccgnctcgggctatntngacatccggaccctggctgacagcntgtntcgctatgacctcaatcacatngatnccgcctngctggnactcaccaatgaagaatttaaggagatgggaatgcctgaactagatgaatacaccatggagagggtcctagaggaatttgagcagcgatgctacgacaatatgaatcatgccatagagactgaggaaggcctggggatcgaatatgatgaagatgttgtctgttatgtctgccagtctcctgatggtgaggacggcaatgagatgggtgttctgtgacaaatgcacatctgtgtgcncaagnctgtnatggantctcaaggtacagagggcagcgggtgtgccgacatgtgcctgggggtcagcaaaatgtntccgtgtcngangagggnggannatgannccnccgtagcgaaccagtgggtcacgtnactgtctctttgatcctgagtnacntngcacccaaaganatganccatacaagnntaaaatccacagcggtgggcaatttcacctttcataaagtttgggcttttaatnttgttaaat

SEQ ID NO: 512271 - DNA, 2126 bp, Homo sapiens
atctcagataaggcatcataccacttgagaacaacctatggacctgcagtggataggcctatgtgacaattcatttcgctgagtggagagtgagcacgacgcaaggcggattgggcctgccttaccttcacatgcaggcatcatgcttggactgagagaggggtggtcaattgggccatatgcgtgtagtagttgcgattatgaagtagtgcgtctatgaggctagattaaactcaaatacttagctgaatagggttcttcaggccaatgctctgatgcattgcatccggagacgacccttttgttagtgcatgagggtcggcgtggtagcactttccagtaatcgcgaggaagtgggaatacacaagcccgtatacacaatggtgctttccttgatcgctcttgagaatagataagattcaaagaggccatagtgtggcggagaccgaggttacaccagtctggaccaatagtcggagagaccctctttgtgtggaaacaacctctgggggccacttgttcgtgccaaggagaaatatcttcaatatagagttatagcttgatgcgctcgttgcgattcacccaaccagtccatggcacatcggatgttagacttcgctcagagacgccatccgacctacgtctcgctattcggatatatccagcacgtctgatgggccactttgaaaatgctggggactacttcccacaaaagacctttggttcctaaggcgagactgtagtgccggtttgcctggtcacgactggctctgggcaattggcatccgcacatgtacaatgggggaatacctgaaggccttactatttgggaggcggaccttctacggccctctttgaaggcgtttccaacattttggtgtgccccccatgtgaaaaacccccaagcaaatatatttccccgccccggggaatcaagcgacaaagacggctccaccaacaaccccaccaaaacacaggggggaccccaacctcccggcaaaacaccaccctctcgcccacccacacacgaccaacacccgacccccaccaccaccagacagtactccgtcccaacctcgcgccacaacctcaattgtttaataggataagataattatataatactcactccaaccaccaccaaccacacaacccacccccccacgccactccatcccacgcaaaatcacgcaccactacatcacaccacccccccagccacaactatcctcctaccccacaacaacacacatcagacccccctaagagggcgcagccccgacagcgacgacaggagacaccacacggagaaagaacgaagaggcggcacaggcgacacacaccaacgaccacaccggaggacgacggacgcgcgaagagaggagaggggtaagggcacagcagaagcagagaacagccgcgcagcgagctagaaggaagggaacacgacgaggagagacgggaggtagaggagggagaggaagaacgaccgggaggaggtggagggacggacagcaggcagagaccggagagaggcggaagcagcggaggagcagagcaacaacaaagaaagcacagaagacagcacgaagaagcgggcgcaaacagaggaaagaaacgacagccaggcagcggaagtgagagagaagcgacagcaagaggggagaacagagaagcacgaacagagaagcggcgaaccgagcagaccgacggatgcagcggacgcaagcaagagaaccacaggcgccgacggcagcaaagcgacaggaggcacagcgacggcaagctaccacgagacacgcacgccgcacacacacactcaggacaagagaacatgacacacaacgaaacacaacaaacacacgcaccccacacacagcacgcgagaccagcgaagagagacggagcaactgagacccacacgcagacagcaaacacaacatcacacccacgcacacacaccaacgcatgccagcagcacagtgaaacggtcggcttacagcaaccacgcagcgtctagacaggaagaagcaactaagactggcgaccgattacagcacacacgatggcgtgaggtcgagcgcgtgcgacgcggcaatccgccccaccccccacgcccacaccaa

SEQ ID NO: 512272 - DNA, 304 bp, Homo sapiens
atcggcggggcacccggcgggctgctgtggtcatcaatgttttttatgctggtggtacttatattgtccacttcgccatgggagaactctgtgcttccaccctccacttcaatctcctctcgctctgaatcagaacgatctgaagaaatagttgatccaatgctgtccattcgtattcgttccatctcctgaggaccctgcagctgttccagtcgccactttaaaaatctctgttctcgttccaaattctcgagctggtgctggctttttctttcagcttcttcaagtttcttgatgtgtgctt

SEQ ID NO: 512273 - DNA, 456 bp, Homo sapiens
acaaaagagacatatacaatcgagctcgtaccccttctagggtattgggacaagtttgggtaatgtttacgaatcacaggacttgctgactggagaagagggcagaaagcagagttatcacaacacatgatttatgaccatcttgagtcagctcagcagggggtggtgccatttacagaacaaagatggcatggacagagccctatggagaacgaggaggaagaaagagagttgggtatagggttcagatctcaagaccagggtctctggctctgtcacccaggctggagtgctttggtgccgatcatagctctttacagcctcaaactcctgggctcaagtgatcctcctgcctcagcctcccaagtagcaggattacagatcctacagatgcacttcaccatgcctagctaatttttttttttttttttttttttgggcccaccccggtcccgg

SEQ ID NO: 512274 - DNA, 312 bp, Homo sapiens
acgtgctgggaaaagggagctctgctgggagagcatagtaaattcagagaactgaagcgaaaaggattaaaaacgctgctctaaagaaaagaaaactggaggctgggcgcagtggcttacgcctataatcccagaggctgaggcaggcggatcacctgaggtcgggggttcgggatcagcctgaccaacatggagaggccctgctgggaatacaaagttagccaggcatggtggtgcatgcctgtaatcccagctgctcaggagcctggcaacaagagcaaaactccagctcaaaaaaaaaaagaaggaacg

SEQ ID NO: 512275 - DNA, 1784 bp, Homo sapiens
  misc_feature (433)..(433): n is a, c, g, or t
  misc_feature (1379)..(1379): n is a, c, g, or t
acgtgtatctctggtgtatcactaattgtttttgtgttacaaccaaccgtggggggaaagtatgattgtattaagttgtgtgcttacgtaataagattttttttttgtgggggagagggtcgtcggtgttgttatatgtcggtacatctttataatcagataagcgttgttttttaataaaagggggggctcttcttgttattaagcgctacgctgtcgccgacaaaaaggcttttgttttgtgggggcagcatcatcgtttagttgttttgggtgcaataacaactccctggggggcctcgctaatattgtgtggcaaaaggcgttggtagtaatgatacatactttttgtgtggagacaccctccccctaaaaatatttttgtggggggccatccaagatcctatatggagaatatatatttgttggggtntaactccaccggggagggaaggagatatatgttttgtggtgtgatgtgtgtattgtgtaacccctgcggtaagttgcttctgttattagtcttccctcaatatatattatgtcttaataaagcggggtcttctctgtataactaccgcgttgctctgcgccatcttctccaggagatgtgttagttttctcttcttaacaacagccttgggggggcggaccaccaacatcatgggatgttttgttaccaacatggtctggtttgaagattagaacgaatttttggggaggagcccctctttcttctgttaacacaatcggagagagcgcacacccactctgttgggtggtttatataggtggtataaaaggagagtaggagttttttttctggggagagttctcacacaaaatagtcttccgtgtggggttttttctcaaccgcggtggggggggggcgtggctcctctgtgtaatgagaatcgaccacgccccccctctgttgtcccacatgagtatgagcccgcctccttggatgatataacactttatgttgtggcgacacaccacaccaccgacaacatctggggagggttgttcttctcggggagtgactacacacgacttgtttcgtcgagacgttgtttgcacacaagagaagttgtttttgccacaacagaggtgccactactcttgtcgtcgtgggtgtaagatgtgtcccccacaacatatgacatcatcttagcgccacagtgttaaaagatgggctcgcgcctcacggggagatctctctcacacacagagatgtctcgcgtgtggctgcacacaaatttatatagagagtctctgtctatcacatataatgagagggggtcccaccagggtgtatacacccccaccgagatactgttatataaagatttctattaaaagatcgggagtttggngtgtctctggagagttggagagcacactggggtagatacacctctcgagagacgcacacccaaacacaaagccacaggggtgtgtgttgagaaccacacaccactaagtgtaagaagttataagagagtgttgagatatttcgcacaccacaagaagctgccatgcacccacttgttctgagatgtgagtgagtgcttattgaaatgtacactccacggaagtgaaaagaggtgagtataacacactggataggttattgaaagaatgctgggtcaccttctggaggcccctaaatgagttgagtctgatgttccttttatttatacaccagagttaaaacgccattgtcttgtaccctggagttggagtattaccaccactttaaggttaagttcccagctgtt

SEQ ID NO: 512276 - DNA, 403 bp, Homo sapiens
cttctccgatgccagtaattcttgccccaaccattgtacatacatgaggaaacccctatggataacatttgattcatctgtaacgttgggatattttgtcctcataaaaccacacttgaggtggatggtgaaaacaacctttgaattttatattttgtttctcttgattcctcttgaagaagggggtgatgggaaagttttcccccttgggtaatgaaaaggttgtgtaaagtgtgtggaggtcgtaggacggaaaatccagtgctgggttacttgtgtagcactgtggtcttgtgtatgcggttggcttgtctactgtgtggttcctcagcgatgtaatcttgtttaaatgtaaagttcccttgattttgtcatacatataaatgagtattttcagagatca

SEQ ID NO: 512277 - DNA, 410 bp, Homo sapiens
taatggatgcctgttgttataacaccactgaaactattgagagtggtgggggagttagtaggtcccaaagtgaaagaaaaagaggtaggtccggcttgagagcttttgctggttgattcactggcatcatgaacatccagcagccagggcaaggcaggttgagtctggcgcatcacacacggcagcaacacactttgtagcacacagtagtcagaggcagagcccaacactcaggtagcatggtggccttgagcagcggacagtggaaggtgctctgagcagggcagcatgcttgaggaccaaggtggccctaagtagtgtctacctctgtggcagtaggtgtagtgttgggtgaagtcaagcctgtccccaaggttctgccgggtctagttggctgttggaagtgctag

SEQ ID NO: 512278 - DNA, 99 bp, Homo sapiens
gcggccgactactactactactactgctcgaattcaagcttctaacgatgtacggggacatgctcccccaatcatgcaaaaaaaaaaaagttgtactgc

SEQ ID NO: 512279 - DNA, 367 bp, Homo sapiens
tgcaggtgactctatattatccccacggacatgagtctatggatatataaaagggtcttggttcttaatgaacctgtcatgcacaagcagcgtttcatgtgtcgtgaattagatacaaccatcgattaatttaagtcttggtctccctcaagtgaggaaattttagttgttcacaaataatacctgttaaatatatttgagtaaataatttcttatgtttatttcaaacaattctttttctccaaaagagcataaatggtattttgtgtaatgagagcttatagctatttctgaattatgaggagaacataacctatttttaagcagtgtttttcatttttttttgcattattgttgcagctatatc

SEQ ID NO: 512280 - DNA, 304 bp, Homo sapiens
tgcggcatcactgcacgctgctctcggggtgggcctggcccccgtgccccttcaacctcttgggcacggcatgtgggggtgctggcagctggcagtggcatggtcccccgtggcatggggctcgaccctctttcttcagcactgcggtctttaacttgcatccctctcttgggccaagccgagggttggacgtgcctgtcggaatcgggcatggccatcagggttggcaagtgcaatgtcggcacatcgggcatggcaatcagggttggacagcgcaaagtcaacgcatgtgtcgggtcaccgc

SEQ ID NO: 512281 - DNA, 385 bp, Homo sapiens
  misc_feature (341)..(341): n is a, c, g, or t
cgacatggctgtagctaccatctggtatctcaggctgacggagttgagttctccctgggatggagtgcccgagggaggggtgggctgcatatgtgatgtcttggcgacttggccattccaaagtttgggctttggggagtcccagctgacttagggtggatatagcccaccagcacagcacggctgctgtacaaaagcatggccagactgcttctttgggcgggtcccggattcattcctccgcgctgtttgggacttcccaactggggcctccagccgcccccactggtgttctcctgctgacggtgatttcagtttttttcttgggctggagctccctngatggaggggcaggccatcatgtttgctggttttgcaacttaac

SEQ ID NO: 512282 - DNA, 348 bp, Homo sapiens
  misc_feature (80)..(80): n is a, c, g, or t
acattttgaaattaaaatactccactagatattgtctccaacattgaaagataaagtaaagaaatatagccagggagggngatgggaaagtcggtcaacaggtacaaagtgcacttagatagaggaataagtcctgggttctattgcacagtagggtgattgtgtttaacaataattcattgtatatttcaaatagctacacaagaggatgctgaatgttctaaccacaatgaaaggatcaatgtttgaggtgaaagatttgctaattaccctgatttgatcattatacaatatatacatgcattgaaatatgacattataccccataaatatgtactattatttgtc

SEQ ID NO: 512283 - DNA, 174 bp, Homo sapiens
cccggtctcatgtcttacgcacagcgcttagctcgcacttgattttttacctttagtaggcctagaaagtataacattgctaggctttataccagtactaaccaaaaaaataaaccctcgttccacagaacctgccaccaagtatttcctcacgtcagacatcatctgcagggt

SEQ ID NO: 512284 - DNA, 712 bp, Homo sapiens
  misc_feature (668)..(668): n is a, c, g, or t
cagagaaaaacgtaaagctgagaaccaacgtaagtttgagttaggcggtgctgtgttggcggcttttaaagacttggggatggatattagtgaatcgactcctgaacagattaggaatcgtattaagaatgtgacaaaattccataatgatgtattaaaatctaaggtatatcaggaggttaaaaattataaaaatgaatattttgagcggaataagctttttcatcaggttctgcatggactaagtacttggtccaataaaggggaacacttgtatctcatcgaaatcaagaaagctttagcgaaaaatcaggaatagcctttttcagaaaggctgtacaggcgagtttcgcataaaagcttttatgtaatgtaaacctggagtacaccccaaagtaacgtaatggcagccaaaatcctgaacctaaaatcaatatcttagaagctgtggaacattgccttagcaacgattgaaacaagtcttagatttatacgtgacactaaaaagccaattagagaaaccggacatttttattggtgagaatatagacactttgattgggttctaacacctgaatttcgtataagagattttatgttaaataataaaaggctctaactgagagtgagagcctttattcttaaatttttttatctattgtgataanccatgtgccgttattacgctcataaagtggtaaattgctgacac

SEQ ID NO: 512285 - DNA, 438 bp, Homo sapiens
gagatcacgccactgcactccagactccgtctcaaaaaaaaaaaaaaaaagtttttgaaacctgattttcaaacctaccaccttccagctccgagtccacagggtaaactgtggtattgggtggtacccggggggatcagtgactaaggcatcccagtaactgatgatttctgggcccttgttgggtgtcaccccagagtttaggccacatctcttaccacaacctaggaagaggcctccccttcttggacagagtgtcagaggtcaggtccagggctaaaagcacccagacagctatgaggtggtaggatgtgtagaacctatagccagagtccttctctcagctccatttatttcagaggggacactctaaccacagggagtgggtcggtgagggcagcctttgcgggtaggacaggggctctcccaggttctaca

SEQ ID NO: 512286 - DNA, 202 bp, Homo sapiens
cagaggactcccgatgttgcgcgtccctctacagacaacttagcaaacatttacccagataaagtataggcgatagaaattgaaaccgggcgcaatagatatagtaccgaagggaaagatgaaaaattataaccaagcataatatagcaaggactaacccctataccttctgcataatgaattaactagaaataacttggca

SEQ ID NO: 512287 - DNA, 328 bp, Homo sapiens
gcacaagagatgatgtgctacgtctgagaatgtatgcgagtggcaacgaccttagagctcaaggctcactccactgctagatgatgtatctctctacggtcaggatcaaccgtagaacttacggcgtgactctgcagggtcaaactctccttgcttgtctcacactggaggctgcaatcgccacagggaattgcgtatccggttccacgacgcaacacaccacatgcggatcccacgttcattgcacactgttggcagattctcaaatccgaagtcctcctttgccatatggtacatgtgagttatacggcttgtctgacacatatcc

SEQ ID NO: 512288 - DNA, 404 bp, Homo sapiens
  misc_feature (5)..(5): n is a, c, g, or t
cacgngccattggcctggcttggaaatcttttgaactttagtttagccaatcctgaactgttaatgtaagagacaacatatgtggtttattactgtgcatacccgcccttgttcagccagaagatattccagggcaaatctgttatccaagacagcattggctagggagtgcagggaggcttgacgtccttttatggctctgcctgtactagttgccagtgtttcaagggtttgaaagtttctcaaagctgtctgacagtatgcaaagccatcccaaggggctattccaactcctgccaaaattagccctattgcctttttagatttcaccacatgtgtgatattatgaactgttattctattgggacttaaaagacctaacatgcattccttattgcgttgac

SEQ ID NO: 512289 - DNA, 1374 bp, Homo sapiens
  misc_feature (8)..(8): n is a, c, g, or t
  misc_feature (10)..(10): n is a, c, g, or t
  misc_feature (12)..(12): n is a, c, g, or t
cccaattngncnttggccgggtctaatagaattcttattttacataattgtgcattttaattgatagtcatatggtatttttgttaataacagcaaaggcattaaatcagtaccattgttccttctgcctgatgacttcttgtttgtaacacaatctgtattatcagaatcactttaaaccaaagcttttatattccctgtacacatagccaaaataattagcactgttacttctgtccacttgtaagctaatagtataaaaattataaagcagatactagtagaatttgtattctggtatatccttcaaggaaaaggacaggtgatcagtgcatttagacatccagaagttacttccactattgaggaactatgtagacatgaatttaagcttgtacatgtgccaatcttgttaatgtcacttgaccactgattcacatagacagacattaacgtctgatgcctcaggttgatggcgaactttcttcctagtgtcttaacatttatgaacttatgtttgacttgaggggcatttcagcaaagctgtgaggaaaagtaggttctggactgatgtctgctttgtgccatagacattttggaacataaggaagtatctgcttctactatatgtacaggacttgtccccaaataatttctgaatcccttaatgcagttgagaatcccttaatgcagttgagaacagtaaagttcatgaccataccgaaaagcacttttaagttcacttctttttaaatatttttttagaatttattttttaaaagcatatgtaactagtgatgattttagcattagctttacttggaggggagaagaaacaaaattacaccttaaactctattagatagactacaaaatggatttgatgtattcttacttttccaaagaattttttccacctggaataagaagagaggactagttgaaacatttgagctggagaggcttatgggcaatatgaagtgggccaaattcttgcaatacaccctattcaattgaaagtacagtgtctaaggataagaatacttctttaaagaccaacaattgttttaatgcaatcttaattagtaaatggtttacattttttctattgttattggttttaaaatttgctaccctgaattctgaaatattataagagttaataccaaaaatacttttaatgtctgacatctcttacatttcacatggttctttttattcattgtaaataaaagtaaacttggataaatttgagaataaactttgaattgttgcaaactatgattatcaatttgtaaatttaccctttgacataataatgtacatttttaaatgtagccattaaattctctatatttaacctaaaaaaaaaaa

SEQ ID NO: 512290 - DNA, 804 bp, Homo sapiens
ttccgcttttttttgttccggcgctcttttggattgttgaattttcttttacacttctaagtgctatacagccttttatggtggctgcttctgttacaatctctgatgaacctagacatattatataagcgcctctcgtttttggtgataggtctacgataaggctgtattggacagttatgaatattttgctgtgctttcttgtctatatagaacttggtatctctagtataagtactatgaacctccaaggttaatatagtagcgatttactcttctccaatcagtgcatatgtacaagaagcacttagtagttcagtatgtaatatgatgaacactttacagatgtttagagttagtacatctatactggaagcacagcagatgtctacttggaatatattcagcgataacttacctgaaggggttgccatggaagtaatacaatagactacttattagaacagttaccagtaacacatcataggagccaatctgggaaacactatcagaagtaaaaagaagaaagcatagtctataatagcctcagggaggccatttttgcctaatatttgaaatgagggtgggcctagatgagtatgtttatagtggagagtgcttccagctgagatgatttgagtctgtcctaactgctccattgagttctcgtgccctcatcagctgagggcagggaatgaactttaatgtgaagtaatccatctctgttactcttattgcggtttgttatttcattgtgttgaatataaacccccctcttctagcatatcatgagctaccacttcc

SEQ ID NO: 512291 - DNA, 934 bp, Homo sapiens
  misc_feature (16)..(16): n is a, c, g, or t
  misc_feature (78)..(79): n is a, c, g, or t
  misc_feature (94)..(94): n is a, c, g, or t
  misc_feature (107)..(107): n is a, c, g, or t
  misc_feature (114)..(114): n is a, c, g, or t
  misc_feature (131)..(131): n is a, c, g, or t
  misc_feature (133)..(133): n is a, c, g, or t
  misc_feature (138)..(138): n is a, c, g, or t
  misc_feature (147)..(147): n is a, c, g, or t
  misc_feature (151)..(151): n is a, c, g, or t
  misc_feature (153)..(153): n is a, c, g, or t
  misc_feature (161)..(161): n is a, c, g, or t
  misc_feature (184)..(184): n is a, c, g, or t
  misc_feature (205)..(205): n is a, c, g, or t
  misc_feature (251)..(251): n is a, c, g, or t
  misc_feature (266)..(266): n is a, c, g, or t
  misc_feature (277)..(277): n is a, c, g, or t
  misc_feature (736)..(736): n is a, c, g, or t
  misc_feature (841)..(841): n is a, c, g, or t
  misc_feature (866)..(866): n is a, c, g, or t
  misc_feature (899)..(899): n is a, c, g, or t
cacaacggggaaaaanggcagtagacaaggaacagcaaataaatttatcttgcatgccactttcagtcaacaggatgnngctctctagatagcngtgtttagaaggnatctgangcttcaacctcacacangngaaanactactgcnattnanagcaatanccaacatctcactcaacccagangaaaccaatggcaccaaagtnggcagcggagttggcactggctgttccaccagggccaataatgggnccgggaaaggtctgngggaatctggngcgggcattctggtggtatctggcccagaaggtaaatggaattctggaccagggatctccaaaatctccttcctcatcccaggtcagcagctcaaactcaatgtcatcccagctccagggcccagacacagcctcatctccaattcccatgcgggttcttgcttcagcccgggcttcggcctcagctgcagcagcatccagagcatccaaggcctcatctgcagcctccatgaactgtgcagtccagtcacgagggtctcttttctgaacctctgcaatgaatctcagcactttcatcttgctagtctcatggtaggaacggaggccccagaggaactcatactccggggggttgctgttgggcactcgtctgtagtccaggtatttctgctttacaaactcataggtgagaagtttccttagatctccaaggaggggatgtctcaccccaggacgcanccaatcttgcgtagtgcctcccagaggacagcctcactggcacggttgccattcatgaagatgacacccagaatcaccaagaggagaccgagcttggggtgtgtntttggtcgttcccagtatgccagcnagggactcggggggtactgatgagaatatacangtgttcttctttgtcaatttctttcagttgaatcc

SEQ ID NO: 512292 - DNA, 311 bp, Homo sapiens
ggtcggcgcgcggtgggtgcatggctgggttcgcggggtgcggtggcgcacggcggcgctcaggagcgtgcggctcggagtaagcggcggtcatgtagaccctgaattgtgatgccgtgatggcctctgagcctggaggcaccccctcgtctctctggcaccttctactctctcagtccacagcaccggtagtggatatactggcgtctccgacaggcgaggagagtagtgttctcagtgcctggcaagattcgcggcagtgacaagcagtgaggcatgatgacgaaggcgacggaggaggggagaggact

SEQ ID NO: 512293 - DNA, 228 bp, Homo sapiens
tgagttattagaagagaaatccaaaaagaggcctcatacatgccttcattccagtgtcagagactttcaacatggaaataaatattaaaagagcaatcgatatatatccatcacacactagtaggctagaaggaggcaaattaggaaccaaaaatctagacatagctccttgcatagggtaagatattaagcacacacttgcacagaataactccatatccaccctat

SEQ ID NO: 512294 - DNA, 139 bp, Homo sapiens
  misc_feature (108)..(108): n is a, c, g, or t
gcggccgcctactactactactactactgctcgaattcaagcttctaacgatgtacggggacatggaagcaggaccagtaagggaccttcgattaaaaaaaaaaaagncaataaaaaaaggctcattaatgggaaaaaa

SEQ ID NO: 512295 - DNA, 567 bp, Homo sapiens
gagttccgcgcggggctgtcggggaaccatggctgtgcccgagagacagtgtcactttattattcaagttatactgcttggtagatgatgaccctgatggctgcggtctataccatagctttagagatacgacagaggacatcagacaagagaattctacttttcgaaccacaggcctgtgtgtatcacatgaagggttataaaggttattgctaatgtgtgggaatgatgtagcgtagaagaaactggtagtctgggtagattcaaagcatcgtttaagagaaaaggtcttggggagccccaaggaacgtgtgaagttaagtgtgcgcatcgttgagtgtatgcctgttcgaggaacaagcagtggctttcgctagtccgtcttagcaatctggatgcagtagtgtaccaggtgaccgtacgcagtttgaagattccgtgtactgttttatgcactgtataaatgttgaagcggaattcagaaattacagtgggttgcagtttttatgctgtgtgctggagttacgcttgtacagtggaaagcagggccaagtacagaaagtggtc

SEQ ID NO: 512296 - DNA, 169 bp, Homo sapiens
cccgttgggcaacgcaccgtcctggagtgctgaaatacggcatgttcttgtctcactgggtgagaagatacagaggaagaagtagagattctggtttgctagggcctatgaggacagcaatgagttgtatcatctatgaagagctcgtccgtacggtgcgttgggccaa

SEQ ID NO: 512297 - DNA, 519 bp, Homo sapiens
  misc_feature (492)..(492): n is a, c, g, or t
gccactcttaaaggatcccccaaccatgtcggggttacatacggcgtatctcactggacaccacagaccacactgatgtgcttgtgagtgcccctgagctcaacaatgtcatctccctggactatgacagccctgtagtaaaggtttattacacatatgtgtttctggatgttatcaggcgagcagacctgaacggcagcaacatggagacagtgatcgggcgagggctgaagaccactgacgggctggcagtggactgggtggccaggaacctgtactggacagacacaggtcgaaataccattgaggcgtccaggctggatggttcctgccgcaaagtactgatcaacaatagcctggatgagccccgggccattgctgttttccccaggaaggggtacctcttctggacagactggggccacattgccaagatcgaacgggcaaactcggatggttctgagcggaaggtcctcatcaacacagacctgngttggcccaatggccttaccctggact

SEQ ID NO: 512298 - DNA, 704 bp, Homo sapiens
aaaattgtggagtcacgtttttttcaagcgtcttttctggggcggaaaatgttgggaacccccttggtgatatagccgtcaaagcacttgcctgatagggttttacaccttgggggacccacacacagcatccgcggagttcacgcactgtcacacgcactcgggccaccacgagcgaaaggggactatcctaggtggagaagcgtatctgggcccggcggcctgcacctgtacaccccacttaccttttccggaccacggaccacgggtggctttggagaaacttttccgaacagcaccttcttttcttcaaacgcacgggaaacctcgtgcaacctcaaactatggggaggggcccccaagctcataattcgtaaagctggctgagtgcaatccgctggtcgtatcggggccgggagttgtcctcacggcttggcaacactcgctcggttggaaacttaaattatctgcgtccccactgggagtacacgacacggcgacaacggaataatgtgatggcgtccacgtttggaggctgggagtaaaggttcctgtagccgacacccctacaggagaagctttgggactggggcaacaacaaggcgcccatgccacacaccgtcttttgaggaacccggttcagacgattttttgactgcggaccctgtgggaaccccgtcaataaatgtttaagacacactcca

SEQ ID NO: 512299 - DNA, 101 bp, Homo sapiens
ctgaaactccagtttttatatgtgctacggcgggagtgtctccaggaaccaagaagccctcagcctggtgtagtctccctgatcccccgtccatcacaata

SEQ ID NO: 512300 - DNA, 295 bp, Homo sapiens
ctagcgacggtgtaaaaaccagggaccacagactgagaaacacatgttgaaaaagcacgctgtcacgacgcggaacaaaacgtcgaagagcagcctggtcgcattcgcagaggcctgcgagcccagcgtggcccggcccgaaaggaccgccacaggacacgcgcccacccgggagctcgggccctgggcctgggttcgggagaccccccggcaaccaagaggacggaagaggagccgggaactcgttcgacgcggagaacccccggggacggcgtccatttgaggacccggtagc

SEQ ID NO: 512301 - DNA, 125 bp, Homo sapiens
  misc_feature (106)..(106): n is a, c, g, or t
tgagacgagtatggttgtttgaattcacttattgaactggagttcggtctgtagttatggtttctgtttatagagatggagtttcgctttcgtggcccgaggctgnagagcaatggcacgatctc

SEQ ID NO: 512302 - DNA, 425 bp, Homo sapiens
  misc_feature (358)..(358): n is a, c, g, or t
  misc_feature (368)..(368): n is a, c, g, or t
  misc_feature (402)..(402): n is a, c, g, or t
  misc_feature (404)..(404): n is a, c, g, or t
atcttacagaaatttctattcagtcctacttagtaacaaagagcatttgattgtgggtaacgttgacatactcaactattctaatgcacttaatcttcaaaatattttcttcagtaacatctttactgagggaggaaaaagttaacggttcttcatacacacacacacacacacacacacacacacacacacacacactagtgcccacttatccacaggggatacattaccagaccccttccctcccactggatgcttgaaaccacggatagcacctaacccaattttcatcaatttgaacatgtttctgttcatgtctcccacttcacaaatgttaacgccttttccctcttaactnaggcaccttnaacatggcacctgtgggctttaattttgcggttngnggtgtggacagttaaaattgg

SEQ ID NO: 512303 - DNA, 102 bp, Homo sapiens
taataaacagggccctgaaagaacatggatattttggacgttagttaagcacttatccctgctaaggcgcttttcatcattgtctaatttgttttttgtggg

SEQ ID NO: 512304 - DNA, 336 bp, Homo sapiens
tctagagcatcccctgtactcgtaattctcactatccatggccttgttgataactgaggatctgatactggcttcctgatgtgtctttttttttttggaaaacagagctctcgaatctgtggcccaggctggagtgcaagggcaaaatcaatctcagttcagtgcaaccttcacctcccggtttcaagcaatcttcctgcctcaaatccccaagttgctgggtattccagaaaacacctcacttcacaaaggagagtgtaacacgaccaatccattaccagggaagcgaaagcaactgcaccaggacaccgggagtctttatccaggagaataatt

SEQ ID NO: 512305 - DNA, 631 bp, Homo sapiens
gccatgacataggtgcttggcattctcacctaataataacatactgctctctggccggtaaccgagcgattctgcaacacaatccagattgcgcagttctcgatggtccattacgtggcatctatcgaacgaggcagttccaagctgatgctcgatgactcataagtgacggctgccgtgcctgtggaagcaggtagaagccggctgatgcaagtcgccccttttgcttagggtgtgagttctcaggcaattaacaggcaatttgttgcctgccttgaggggtataatgcacgcaaaaagcaaatggcacagactgtgtacctttggaagggcttactggaggtcaaacgctcacccgtgaaaacctttggcgctttacgaggctaagacctgcagcttaggtcgtgtgcaaaggttccaacgaatcagtaaatcaagggcgtttcacagtttgtcacttgtttccatgcaaatggccaacaagacatacatttataaccttgacaaaagaaaatgtatactttacgaacaaataatgcacagaaaaatgcagcctataattggctagttaggtagtcaaagaagtaagatggctgaaatttaccataagtaatattgcataatcttagat

SEQ ID NO: 512306 - DNA, 1308 bp, Homo sapiens
gggaattcaggacactgctatttattcctcgctcgggctccctttgcaccttctcgagaacaagcaagaacaaagaacaacatcaaactctactgctccgccgccgctgcttcactcatggacagctgtgatgagcttgactaccagcagctatctcacactcttctatccgtgcgtgtggtctgactcatgcacggatcctgcccctgcaacatctcccgagcaaatgctccagccagcacgcaaaatccttgaaacgtcatctcgcaaaacacattgctctaacgaagtgcccttgagcctcttcctctgcagcctggccagaacgacaaggcagcaatccacaaccgacaattcctaatgcagggccatctctcctaaacaaaactcctcacacgcctctgcgcaatctcccccgcaaacgaacttccccacctaacacccgacacgccgaccctgctcctagcagccctcgcttgccgcctaactcataaccctaccccagctcctggaacgactgccgcactcgaacactccctcgtgctccagcaccccacctgctcacctccgcccccgcacagggcagaacaccagaacacgccccacccctaccccaccacctcacctcggcgaagaagccaccaaggaagccagagcggcaccaacacccagccctccccgaatgccaccgcaccctgcccccaccacgcgcgcactccgaacgccgccccatctcatgacacgacaccccacttgaccacacgctacctgccgctacacccaacccccacccccactccgcctcgcgcaaacaaacccgccccccaacaccacccacccgcagcgcacccggacagcccgctgcacgcatgcacccacgaccacaccaccccgccaggccaccaaccccccacgacaccacacagcaccaacaccccgacccccccccccaaccacactctccccacaacaacgcccacacaaacccaaaccacacacccaccccccacccacccgccacccggcgcacagcccccaccaccgcaccgccaaaagggccgagcataccacacccagcgaccacacgaccacccacacgccaaaaagacccacaccagaccacccgcccccaccgaaccccaacacccgcccgcacagccgacaccgacaaaccaccacaccgcacaaacgcgccacaccccaccgccacgcacaccggacgacggccagcgccccacgcacccccgacacagccgtgccgcacccacgctagactcggctccacccgaccacccgcacccacgcccc

SEQ ID NO: 512307 - DNA, 913 bp, Homo sapiens
gacgccatggtccgactggcctacggcgctgggcaaggacttcgtgactctgctaggagcaggctggaggagaggccgagctccggaggtgcccacgccccgaggcatcaccctgaaggagctcactgtgcgagaatacctgcactgagccggactgggaccccggcagggacgctggagatttggggtcaccatggctcatcgagtgggctgtctggggttcttttttttatatttattccttatactattattcagttattctggaggacagtcttgcatctgtcacaccatgactgaagtgcaggtggcgtcacattatgtctcacttgcagcctcaaactcctgggcacaagcaatcctcccaccttcagcctcccaagtagctgggattacaggtgcacaccaagcacaccaggctaattttgtaagttttccagtagagacagggtctctctgttgcccaggctggtctctaacttctgatccttaaatgatcttcctgcctcagcttcccaaatacagctggggttcacacagtgtgagccaccaaccctggctgggtcatttgtagtgggaaaagcctctgggggctctaatatcgctgggtgactttggactatgcccccttccatcttgtgtccctcacattactcgcattctcgtgttggacagaggtgctcctggggagccccttggaagcatcttgcttgtgttccatcggtgctctttgactgccagggccactttcattctcgaaaatttgaacctgattggctaaccgtgcagaaggcagtgttcacccccaccaggtgttttgtggcaaccgggcgagaatgttctcccatttttaggaattgtgccttcttggaaaaggttctctcgggggcaagcctgtcctggtcctcccctg

SEQ ID NO: 512308 - DNA, 360 bp, Homo sapiens
ccaagggcagcagtctgtaaggaaaggctggccttcgtgcggcaccagccggcacacaggcgacccaggtgagaggccccaacagagggtctgtcaccatcataaaagaaacaccccagtgactcatcaaatgcaaaggggcacagagaagtcacaggaaagacaaaccaataagcatgcgttttgtttcttgtttttaaatgagactgctccctccaggcagaagcataacctggctgcctggtgctccaggcaatcagaggcagaaaggtggcaggcaggcatctcaggggcaaaccgacacagttcaagctccagctccacctctcgggagctccgggacttaggctaactgacaac

SEQ ID NO: 512309 - DNA, 957 bp, Homo sapiens
  misc_feature (489)..(489): n is a, c, g, or t
tataaaaggaaaacccggtaatgatgtccggggtttgagggataggaggaaaatggggaatagggtttataaaaatgagggtgtttgtctcgtgtagaatgaggtgttattatggtatgttaaatgtgcggggtggtgtgatgtagagccccgattgtgttgttgtggtggtaaatgtattgatagcaggggaagatattaagggtggtgtggactgataggtagtgtcgtagttccgtgtgtaagctacagagtagctagatctattgtgctatcagagagacagttcggtggatttgtataagctgcaagagagttctgtccacagattagcgtattaatacggtgggggagggattaatgggcgcgagggtcttacgtagaaggacttgtgccctatacataggctcctctcaagaacaaatgcgtatgtgacgtggagcgacaataaggaaaggtctttggaactctcctgttgaaaacataggntgtattcattaacgcgacgggattcgtgcgtaaatggtgcggttggcgaataggtatggtgacgcattggcgattagcgggaacatatagacttagagttgagagggtatggatgataagtcacacagggaggggacgaatatatatggctaaaaataactttgagcggctcgggcatagtaattgtccgagggggggtatttcgcgtatcggaaaaatatgggggagtggacacaaagcggaggggcgataaagggtagttgagattgtcaagaagaggttttcgatcgtaagccatatgtacaggggaattgcacgggtgaaaagtggaaatttgatgccttcgtgaaacaattttagcacttgtaagggcataataccaaggaaggggccaaggatataaggtaactgaacggggattaagacatggtgtataggccatataaaaccaaggggaatatgtaagac

SEQ ID NO: 512310 - DNA, 269 bp, Homo sapiens
  misc_feature (212)..(212): n is a, c, g, or t
  misc_feature (249)..(249): n is a, c, g, or t
gacaatgtaggagacagaatgtcgtgctagtcgacttgtatttgagtgtgaaattgagcagatggagaacaagaaatatggccaatccgtcacacaattgccatcagtgtttctaatgggtttagcagctattgatgattatagcgtaaatccatttcactaagtgttgggggaaaggtgttttcagatgcttttatgccttctgcatttantgttattttgagacagggtccctctctgtcacccagngtggactggagtgggcctat

SEQ ID NO: 512311 - DNA, 149 bp, Homo sapiens
gtgcccgactcgtagaggatcccccagttcctgcttcttgaaaggctgaggcaggagaattgcttgaaccctaggaggtggaggttgcagattagctgagatcacgccattgcactccaggctgggctagcagagtgagattctgtctc

SEQ ID NO: 512312 - DNA, 732 bp, Homo sapiens
ctcgtgccattccctttcccagtcttggagcacatgtggtccctctgctcagccaagacctccttgatcaggtgtggatcccctcgggtggcctttgggaaatggctccatctgcattaccgccggaatgttctggcctttggcggcccccagccaccgccagtgtaccaggtctccgagtatgccccggccctttggtgttcccggtcattctgatggaggaatcccaaatgtgggtcatattgcgaagccttggccccttggggcctccaccagtcatgatgggctctctccatggctgcccccccactgaggcccctggtgaatacttcttttcccgatgggatcccggctaaagaaatatcccggtatgggttctctcgatgccctggaccagcacctcagcagcccgaccagatatttcagtgaagctgaccaaaatccaagtggccccgggagtgtctggtgctgtgcaggaccaagggtccatcccaccaatttgtcccctacctgattgctggcatcccacactcatgcccggaccttggtgcccagagcttgaccccagtccgagccctgatgtactctggggagcttaagtttgagaagagacgtcctccgccccggtggaaggtggcgtccctagcctcccttcgtatgagaaacgggcttttttgagaaagggagtcccgcaccccctcctcggtttttttttccataaagtttagaaga

SEQ ID NO: 512313 - DNA, 166 bp, Homo sapiens
cctatccatgggtttataccctcaaatacctatgagtggccgggcgcggcggatcacaaggtcaagagaacaagaccattctggccaacatggtgaaaccctatctctactaaaaatacaaaaaaaattagctgggcgtggtgccggccgcctgtagtcccagcta

SEQ ID NO: 512314 - DNA, 1141 bp, Homo sapiens
ggtagacttagccagccatagagaagttgccttatatgttgaaggaggtgtatacaaagggaaatagggtgtctcctcgggactcgcaacttaagcacctcaaaatcacactcgtatacctcgaacatcgaacaagcaaatcgatcgaacatcgatcgaaacaatcgaaacattagatcgaacacttcgaaacaccgcaaaatgatcgaacactcgaacgcaacactcgaaccatcaactcgagcatcgaaactgatcgatcgaacactcgaacctcgcaacatgcatgcaactggcagctgcattgcacacatgcaacatgcatgacagtgcatgacaatgcaaatgggtgcaaatgcaaaagtgaaattgcaccataatgcaagtgacacatgcaacataatgcacgtggcacatgcaaattgcatgccaaatgcattgcaacttgaacacagcatgcacacatggcatggcaaagtcaaatattgcatcattgcaaaatagcaatgccacacatgccatgcaacatggcacagactggcaaatgcatgccacaatgcattgccaccaagcattgccaagatatcaagattggcatagcacattagacattggaacattgcaaacacctccatgcaggcattgcaacaacaagagttgcaaaccatggcaagcacggcaaacattccaagtagagaagatgcgcaacatagccagcactggccaacaagtcaatgccaacgtggcacaatcactagccacaatgcacacaaggcacacgatagcctgcccacccatgcgacaggcgccaccacgcaacagcgaccaggcacaatgacatgaagcatcgcagacgccagccacaaggcccaccgaacataacgacgcgaactacatgactggacgcctgccacggtgcacactggcagcaacagagggacacagaacggcacagctgcaaacagggagacaacaaggggagacacagagaaaacgaaggaaaccaagcaaagcagggaccaagacagcacaaggacagcaaaaagccagacgagaaaaaaggacaggaacggaaagaagacaaacacagaccagaaagaagcatgaaagaccgggcgcagtgaacatgggccccacagcg

SEQ ID NO: 512315 - DNA, 109 bp, Homo sapiens
gtcccactgcatgcctagctacatgtgtaattttacaagtaaaatgaaatataatttcatttcattatggggcctcagactcccaaagtccactgcacgcccagcctgg

SEQ ID NO: 512316 - DNA, 374 bp, Homo sapiens
agtttctcccttttggaacgggagtatttacccaatgcctgtacccccatggccacttccagcatcgatggtgtcaggtcaggtcctctgggtagaagaaatggagtcagttaggagtgctggagactgagtaagaggtggcagctgaggcttactaccccaggaaagggatgccaccagagaaggcagacaaccaagatggcgactctcaatttttgagctcctaattttctcatgtcagacataagaaaaaaaaatattttttaaagaaaaagctttaggttgcaaaaatctaggcctttcaactttaaaatcctattcttgcaagccttggagaataaagcttatgcataaacagtagatttggaaacaga

SEQ ID NO: 512317 - DNA, 926 bp, Homo sapiens
cagctttccagcttctcttgaaaaattaggaaacgtggccacacccaggcagcctctgtgcatgtggacattcgagcaggggttgggagcgtggaccctctggaaaggctgtgctcttcagcctgccacactccccaccgttccctgcagcccgtccctggtccaccatcatcccccccgccccgctcgcggcccccgccgcagggcaccgcacccggccccacccacgcccactcccgacacgtccccccctccccccacagctccctccgcactccccactagccgactcccacaaccctgccgcccccaccccaccacacgcgcccccgcccccccccgccctcccaccactcacccccccgcaccaccccccccggcccccccccccagccccgccgccccgcccgcccaccccgccccccccctcctgcaccgcccccccgctcacctcccccgcgcactccccacccctcccactcacctcccccccccacccacctacccccccactgccccccctcccccctccgccccccccgccacccccacccgccccggccccccccctcccaacggcgcccccccccgcccccgcaccaccccccgccccacgccccgccagcccccactaccccccccgctatcaacaccgctccctcgccccctcccccacctcgcgccgcaccaccccccgccccccccaccccccaccccaccccacccccgccacaccccacgcccacacaccgcacacgccccccaccacgacccgcctcagcccccccgcaccccgcccctccccaccgcgcccccccgccccacaccacacccctcgccaccccacgcccacccgccacacctccacccctccccaccgcaccacccgcgcccaccccaccgcgcccccccgccgccaccacgcg

SEQ ID NO: 512318 - DNA, 287 bp, Homo sapiens
tgacgctgatccgcctgttcgagacgctgcgggcgcaaggatacgagggcggctatgataccgttcgccgccatgcccgccgctggcagcgcgaggaagtgggccgcacggcgaccgcgttcgtgccgctgagctttgagccgggcgaggcttaccagttcgactggagccatgaggtcgtggtgctggccggcgtgacgacgacggtgaaggtcgcgcatatgcggctgtgccatagccggatgttcttcgtgcgtgcctacccccgcgagacgcaggagatggtg

SEQ ID NO: 512319 - DNA, 428 bp, Homo sapiens
ggggaggacttgcggcgggacaagggtgcgacgtgattccggctgggtctggcctctcaagttaacattgtggctttcgagcagcggggatccgtttctggggatgccgcacccgttggtattatggcgggaatattccgtccggcgatctacagattatgctgtatgaagaccagcaggcgaatgagctggacgtcactttttctgacgccgattatgcaaattcattaggcgatctggatgttttgcagcgccgtttccagtttattttacgggcgctgaacgcatcaacggcggggacgatcgaggcgttggatcggcaagtggcggcgctggcggataccgaggccggcggcagcttttacaccaaccgtcggcaaccgcctgccggcggtatcattcgttgggatcgcccggctgaggcgctg

SEQ ID NO: 512320 - DNA, 404 bp, Homo sapiens
ctgcttgggaggctggggcgggagaattgcttgggcccgggaggcggaggtttcagttaaccgagattgcgcccctgcactcaggcctgtgcggcggagtgagactttgtttcaaaaccaaccaaccaaccaaactatttggccctgtattggtggatatattatatgcctttggccaaaatattcagttaccccaagcctggaactattaaaccctgggccttagtttattataggtccgtaaaagaaagccggtcctgtttatacctagattttagccccgtgagagcttttccgacttttttttttcagttctgttagatatttaatttttgttgtttaatgttttaacaggtccgtttggttactttttttagcagccattaaaaaatggattcctttta

SEQ ID NO: 512321 - DNA, 183 bp, Homo sapiens
aaaatttgcccccccccaaatcccccccctttttggaaaaacaaaagtttaaaccggggagccccccgttcctttttatgggttaaacagtttccccccctttgagcggggggggagggaagggcctttaaattgtgggtgggatttttgggccccccaaaaaaaaccggtttttccccccca

SEQ ID NO: 512322 - DNA, 143 bp, Homo sapiens
ctggccgatgcgcgtccagtcctgtttcagcgacaccagaagctggccctgaaccaggccggtgatgtccgagttggccggcagttgaagctgggtcagggcgccgtcgtcgcccaggcgccaggtctcggacgaatagaagt

SEQ ID NO: 512323 - DNA, 284 bp, Homo sapiens
ccaagggggagagatttatggattttatttcccagattctctggtcacaggtttttgcccagggaaattttgagaaattcccaattttttaccagataaaacatgaaaagtttgccgttagttccccccccctcccctccctctttttagttttaatttattggttaaactgatggcagcaatccatgaggggggtcaaagaggggacaaatgtatggggggatattgaatggtaaacatattactgaaagacccattttaataaagatttttgtcataattca

SEQ ID NO: 512324 - DNA, 360 bp, Homo sapiens
ggtcgacatggggctgagctgggtgtggagtggtcgttgtgggtcttggtgagtgggagggggagtagcatgagccgggcctcgaggcagaaggacaaccaggagacagcctggaaaaagtgccagacccacaagggctcaaggctggccaaaggggaggtgggataggctgcaaagtcctgaggtctgaagattggccctggcaggaagaaaccaggtaaggtggggtgttacctacaccctcggggccaaatgcaggtcagagccagccaattaccaggcccttagggaggtgtgagccccttgaaatgatgcaaggttttttgttttgttttggagacggattacgctcttgtcgtc

SEQ ID NO: 512325 - DNA, 456 bp, Homo sapiens
tatacatgtctgggcttgatctggttagacttctgacacaggaaagaaacccatattagttttttcctctgctcttgaaaaatatcttaagattctcaggagttactatgtagctctaaaatgtacattatcagtattttcttgtcatggtgtatagtaaaaggaactgtggatgggtgctttgcagatttgtgtttcatgccactaacttgctctgtgactctgatgaggtccattaatttctttttttaaattttttaaattttttgagacggaatctctctctgtcacccaggctggagtgcagtggtgcaatcttggctctctgcaacctccgcctccgttcaagcgattctcctgcgtcagcctcctgagtagctgggactacaggcacgtgccaccatgcccggctaattttttgtatttttagtagagatggggtttcaccgtgttagc

SEQ ID NO: 512326 - DNA, 872 bp, Homo sapiens
  misc_feature (33)..(34): n is a, c, g, or t
  misc_feature (850)..(850): n is a, c, g, or t
  misc_feature (853)..(853): n is a, c, g, or t
  misc_feature (855)..(856): n is a, c, g, or t
acaacttacaggctaagtagcgaggccaggtgnntaatggagcagttcggcggtcccgcgggtctgtctcttgcttcaacagtgttgggacggaacagatccggggactctcttccagcctccgaccgccctccgatttcctctccgcttgcaacctccgggaccatcttctcggccatctcctgcttctgggacctgccagcaccgttttgtggttagctccttcttgccaaccaaccatgagctcccagattcgtcagaattattccaccgacgtggaggcagccgtcaacagcctggtcaatttgtacctgcaggcctcctacacctacctctctctgggcttctatttcgaccgcgatgatgtggctctggaaggcgtgagccacttcttccgcgaatgtggccgaggagaagcgcgagggctacgagcgtctcctgaagatgcaaaaccagcgtggcggccgcgctctcttccaggacatcaagaagccagctgaaagatgagtggggtaaaacccccagacgccatgaaaagcttgccattggccctggagaaaaaagctgaaccaggcccttgtggatcttcatgccctgggttctgcccgcacggacccccatctctgtgacttcctggagactcacttcctagatgaggaagtgaagcttatcaagaagatgggtgaccacctgacaaactccaaaggctgggtggccggaggctgggtggggagtatctcttcgaagggtcatctcaagacgataaagctttgagccaggattttgagggccttgaagaaaaggtttgcaaggctcctcagcaaaggggtttaattctaagtctgcccanganannttggccaaaacacaat

SEQ ID NO: 512327 - DNA, 885 bp, Homo sapiens
ccggcagtcgctgggaaataggcccccggggtgcggtggtggcggtgtgggccatggcgcggagaccccgggcgccggccagctccggggaggagttctccttcgtcagcccgatggtgaaatacctgctcttcttcttcaacatgctcttctgggtgatttccatggtgatggtggctgtgggtgtctacgctcggctaatgaagcatgcagaagcagccctagcctgcctggcagtggaccctgccatcctgctgatcgtggtgggtgtcctcatgttcctgctcaccttctgtggctgcattgggtccctccgcgagaacatctgcctcctgcacgacgttctccctctgcctcaccgctgtgttcctgctgcagctggccgctgggatcctgggcttcgtcttctcagacaaggctcgcagggaaagtgagtgagatcatcaacaatgccattgtgcactaccgagatgacttggatctgcagaacctcatcgatcccggccagaaaaacgtcagctgctgtgcacgcgcattcctacacaggacctggtctcagaacatgtattccaactgctcagacagaccaccccagtcgagagcgctgctctgtgccttactcctgttgcttgcctaactcctgaccaggcaggtgactcaacactaatgtgctggccaaggtatgcaggccttctgccaacttgcgacgttagcacagtcatctaccacccactggcccgcacttggaccaggtggagccacctggcatacacaacagcaccctcaatcctaacttgggagccgataggcacctaggccctggccatccccccaatgtaacttatccctggcgacacccttgttagttccacccacacctcgtga

SEQ ID NO: 512328 - DNA, 899 bp, Homo sapiens
  misc_feature (33)..(34): n is a, c, g, or t
  misc_feature (847)..(847): n is a, c, g, or t
  misc_feature (849)..(850): n is a, c, g, or t
  misc_feature (859)..(860): n is a, c, g, or t
  misc_feature (864)..(864): n is a, c, g, or t
acaacttacaggctaagtagcgaggccaggtgnntaatggagcagttcggcggtcccgcgggtctgtctcttgcttcaacagtgttgggacggaacagatccggggactctcttccagcctccgaccgccctccgatttcctctccgcttgcaacctccgggaccatcttctcggccatctcctgcttctgggacctgccagcaccgttttgtggttagctccttcttgccaaccaaccatgagctcccagattcgtcagaattattccaccgacgtggaggcagccgtcaacagcctggtcaatttgtacctgcaggcctcctacacctacctctctctgggcttctatttcgaccgcgatgatgtggctctggaaggcgtgagccacttcttccgcgaatgtggccgaggagaagcgcgagggctacgagcgtctcctgaagatgcaaaaccagcgtggcggccgcgctctcttccaggacatcaagaagccagctgaagatgagtggggtaaaaccccagacgccatgaaagctgccatggccctggagaaaaagctgaaccaggccctttggatcttcatgccctgggttctgcccgcacggacccccatctctgtgacttcctggagactcacttcctagatgaggaagtgaagcttatcaagaagatgggtgaccacctgaccaacctccacaggctgggtggcccggaggctgggctgggcgagtatctcttcgaaaggctcactctcaagcacgactaagagccttctgagcccagcgactttctgaagggccccttgcaaagtaatagggcttctgcctaagctttcttccaggcaangnngttttaatnntaanaggtggccatggggtaaagtttggggcaagaaaca

SEQ ID NO: 512329 - DNA, 925 bp, Homo sapiens
  misc_feature (33)..(34): n is a, c, g, or t
acaacttacaggctaagtagcgaggccaggtgnntaatggagcagttcggcggtcccgcgggtctgtctcttgcttcaacagtgttgggacggaacagatccggggactctcttccagcctccgaccgccctccgatttcctctccgcttgcaacctccgggaccatcttctcggccatctcctgcttctgggacctgccagcaccgttttgtggttagctccttcttgccaaccaaccatgagctcccagattcgtcagaattattccaccgacgtggaggcagccgtcaacagcctggtcaatttgtacctgcaggcctcctacacctacctctctctgggcttctatttcgaccgcgatgatgtggctctggaaggcgtgagccacttcttccgcgaatgtggccgaggagaagcgcgagggctacgagcgtctcctgaagatgcaaaaccagcgtggcggccgcgctctcttccaggacatcaagaagccagctgaaagatgagtggggtaaaacccccagacgccatgaaaagcttgccattggccctggagaaaaaagctgaaccaggcccttgtggatcttcatgccctgggttctgcccgcacggacccccatctctgtgacttcctggagactcacttcctagatgaggaagtgaagcttatcaagaagatgggtgaccacctgaccaacctccacaggctgggtggcccggaggctgggctgggcgagtatctcttcgaaaggctcactctcaagcacgactaagagccttctgagcccagcgactttctgaagggccccttgcaaagtaatagggcttctgcctaagcctctccctccagcccataggcagcttttttaactatcctaacaagccttgggcccaatggaaataaagctttttgatgcaaaaaaa

SEQ ID NO: 512330 - DNA, 189 bp, Homo sapiens
atccctgagttatggtgctataggagtaattgtcggacacgaatttacacatggatttgataataatgaaaatatgataaaaatggaaatcttgatccttggtggtctgtggactcagaagaaagttaaggaaaaacaagtgcatgattaaccagtatagcaacttatattggaggaagctggcttaac

SEQ ID NO: 512331 - DNA, 956 bp, Homo sapiens
  misc_feature (33)..(34): n is a, c, g, or t
acaacttacaggctaagtagcgaggccaggtgnntaatggagcagttcggcggtcccgcgggtctgtctcttgcttcaacagtgttgggacggaacagatccggggactctcttccagcctccgaccgccctccgatttcctctccgcttgcaacctccgggaccatcttctcggccatctcctgcttctgggacctgccagcaccgttttgtggttagctccttcttgccaaccaaccatgagctcccagattcgtcagaattattccaccgacgtggaggcagccgtcaacagcctggtcaatttgtacctgcaggcctcctacacctacctctctctgggcttctatttcgaccgcgatgatgtggctctggaaggcgtgagccacttcttccgcgaatgtggccgaggagaagcgcgagggctacgagcgtctcctgaagatgcaaaaccagcgtggcggccgcgctctcttccaggacatcaagaagccagctgaaagatgagtggggtaaaacccccagacgccatgaaaagcttgccattggccctggagaaaaaagctgaaccaggcccttgtggatcttcatgccctgggttctgcccgcacggacccccatctctgtgacttcctggagactcacttcctagatgaggaagtgaagcttatcaagaagatgggtgaccacctgaccaacctccacaggctgggtggcccggaggctgggctgggcgagtatctcttcgaaaggctcactctcaagcacgactaagagccttctgagcccagcgactttctgaagggccccttgcaaagtaatagggcttctgcctaagcctctccctccagcccataggcagcttttttaactatcctaacaagccttgggcccaatggaaataaagctttttgatgcaaaaaaaccaaaaagaaactccgagactagttctctcc

SEQ ID NO: 512332 - DNA, 273 bp, Homo sapiens
gccgggggggcccccccccccttttttttcccccttttaagaccccgggggcggttccccccccgggtttttgctttgggcccggggggggttacctttttcccccgggggcccctttttccctttggccctttttgggggcccttttgacccagttttttccaaaaacccggggggggccgggtcgggttttccggggtttttttgccccccggggccccccccggggccggggttgtttccaatttaaggggggttcccttttttttccca

SEQ ID NO: 512333 - DNA, 951 bp, Homo sapiens
  misc_feature (33)..(34): n is a, c, g, or t
  misc_feature (763)..(763): n is a, c, g, or t
  misc_feature (821)..(821): n is a, c, g, or t
  misc_feature (915)..(915): n is a, c, g, or t
acaacttacaggctaagtagcgaggccaggtgnntaatggagcagttcggcggtcccgcgggtctgtctcttgcttcaacagtgttgggacggaacagatccggggactctcttccagcctccgaccgccctccgatttcctctccgcttgcaacctccgggaccatcttctcggccatctcctgcttctgggacctgccagcaccgttttgtggttagctccttcttgccaaccaaccatgagctcccagattcgtcagaattattccaccgacgtggaggcagccgtcaacagcctggtcaatttgtacctgcaggcctcctacacctacctctctctgggcttctatttcgaccgcgatgatgtggctctggaaggcgtgagccacttcttccgcgaatgtggccgaggagaagcgcgagggctacgagcgtctcctgaagatgcaaaaccagcgtggcggccgcgctctcttccaggacatcaagaagccagctgaaagatgagtggggtaaaacccccagacgccatgaaaagcttgccattggccctggagaaaaaagctgaaccaggcccttgtggatcttcatgccctgggttctgcccgcacggacccccatctctgtgacttcctggagactcacttcctagatgaggaagtgaagcttatcaagaagatgggtgaccacctgaccaacctccacaggctgggtggcccggaggctgggctgggcgagtatctcttccgccagggtttttccnattccagaacctatgagcatctacgagccacagcgacgtctgaagggcctccttgctnaagctaatagagggatcctgccataagcttctccctccagccaaaaggcagctttcgttaactatcctaatttctctcggagccaatggcgatncttagatcacctgcaggatgcagctgcatgccctcg

SEQ ID NO: 512334 - DNA, 155 bp, Homo sapiens
tcatatacaatcagcctgtaccgtgctagctacaatagaattaaggtgacaaaaatcaaatcaataataaaagtttagtgctaccaataacattaccgaagagggtaaacagactttggggcgtaccatctttagaaggagagaagagcaagcag

SEQ ID NO: 512335 - DNA, 757 bp, Homo sapiens
  misc_feature (33)..(34): n is a, c, g, or t
acaacttacaggctaagtagcgaggccaggtgnntaatggagcagttcggcggtcccgcgggtctgtctcttgcttcaacagtgttgggacggaacagatccggggactctcttccagcctccgaccgccctccgatttcctctccgcttgcaacctccgggaccatcttctcggccatctcctgcttctgggacctgccagcaccgttttgtggttagctccttcttgccaaccaaccatgagctcccagattcgtcagaattattccaccgacgtggaggcagccgtcaacagcctggtcaatttgtacctgcaggcctcctacacctacctctctctgggcttctatttcgaccgcgatgatgtggctctggaaggcgtgagccacttcttccgcgaatgtggccgaggagaagcgcgagggctacgagcgtctcctgaagatgcaaaaccagcgtggcggccgcgctctcttccaggacatcaagaagccagctgaaagatgagtggggtaaaacccccagacgccatgaaaagcttgccattggccctggagaaaaaagctgaaccaggcccttgtggatcttcatgccctgggttctgcccgcacggacccccatctctgtgacttcctggagactcacttcctagatgaggaagtgaagcttatcaagaagatgggtgaccacctgacaaactctcaacaatgcgcctggtgggtacccgaagctctgaatatcgtaaatacataggtca

SEQ ID NO: 512336 - DNA, 966 bp, Homo sapiens
agagtgccccccaagaaggggtgccccatgctccgcgctctcacgatgttgtcccccctttcgcgggtttttccccccttgggagagagtttcgaagcgcttgaaaatccaaggtaagggcgttgcttcacattcccgggtcgccccagccatgtcgtggatgtccacgcacggagccggtcctgggcacgcgcctgttttttcagcggttctattcgtactcctctcctcggaaagtctcttgtgccgggagtcttagccatgtatctagccccgcctccccttttcgtgggacgtccaggttcaccggggggacatattgtacacaatagtatggacaaaacagcgcatttaaaaaccgaggtcttgtagaaaccagagagtgggcagacaaaatgcccgcggggtggtcattgcagataaaaaccagggagggcttataaaacagcggtagttctccccagcgggattcccccgacaggagtcccctcactgcgctcgggggtcttccgacagcagcccagggactagaccccgtgcgggtgaaacaccgcgcgagcaggttgtgaacgagcacccgccgaatgtggggcacacaccccgccagctccactcgagcaagccacacacccggccggggtggccaaaaaatacgttgctaccatcctagtgcgccccaggtaataaggaaacgctgcacacacccgggggagcaacgccccgccgagttcggcaagaaatgcgagacaccacacaagaggggggacatactgcggagaggaaacccatgctgccccacatatacaggagagagcaggatgacccgaagtaggcgtggttctggtaagacagacccccaggcatcagacaccgcgcggtggaggctgtgcgggactccggagtcaactgggactcctcctgggggcttttttttttcaaaaaaagaacccgcagcaaacaaaaaca

SEQ ID NO: 512337 - DNA, 918 bp, Homo sapiens
  misc_feature (33)..(34): n is a, c, g, or t
acaacttacaggctaagtagcgaggccaggtgnntaatggagcagttcggcggtcccgcgggtctgtctcttgcttcaacagtgttgggacggaacagatccggggactctcttccagcctccgaccgccctccgatttcctctccgcttgcaacctccgggaccatcttctcggccatctcctgcttctgggacctgccagcaccgttttgtggttagctccttcttgccaaccaaccatgagctcccagattcgtcagaattattccaccgacgtggaggcagccgtcaacagcctggtcaatttgtacctgcaggcctcctacacctacctctctctgggcttctatttcgaccgcgatgatgtggctctggaaggcgtgagccacttcttccgcgaatgtggccgaggagaagcgcgagggctacgagcgtctcctgaagatgcaaaaccagcgtggcggccgcgctctcttccaggacatcaagaagccagctgaagatgagtggggtaaaaccccagacgccatgaaagctgccatggccctggagaaaaagctgaaccaggccctttggatcttcatgccctgggttctgcccgcacggacccccatctctgtgacttcctggagactcacttcctagatgaggaagtgaagcttatcaagaagatgggtgaccacctgaccaacctccacaggctgggtggcccggaggctgggctgggcgagtatctcttcgaaaggctcactctcaagcacgactaagagccttctgagcccagcgactttctgaagggccccttgcaaagtaatagggcttctgcctaagcctctccctccagcccataggcagcttttttaactatcctaacaagccttgggcccaatggaaataaagctttttgatgcaaaaaaa

SEQ ID NO: 512338 - DNA, 983 bp, Homo sapiens
  misc_feature (983)..(983): n is a, c, g, or t
atgacccacacaatcacatgcctatcatatagtaaaacccagcccatgaaccctaacagtgtgccctctcagccctcctaatgacctctcgtgctatccatgtgattccacttgcattccattacgctcctcatatcgaggcctactaaccaatcacatgtaatccaatctcccaagtgattggcgcggatgtatcatcgagaaagcacaataccaaggccatcacacaccacctgtccaatagaaggcgcttcagactagccggggatgaaaccctagtttattacctcagaaggttttttcccttcgcagggattctgctgatgcggttgtacgccatcttccagacgtaggcccttaccaccccaatataaggtgagggtatttggatcttaactggttggtattaccaggtaaaaatgcccttagaaagtcccatgccttaaatcgacatccgcatttaatcgcatagggaggtatcgaatgcgcctgaggctcaccataagtctaatacgagtgacatactcggagtatcgccatgatgcatgcgatgtttactactcattttactgtgtctctactttttacctctctctgacttgcctccgaggtagttcgctggtctccctttctgcatttgccggtcggcgtctcacgggtcagcatttcttgtcagcctagggtttccgcgtgcttcacgttctttttgggttcaaattgcctcatatttggttgatccggcattagtattacattacgtccatcacatttgtttcgaaccggcgctgaactggctttggcacatgtgtgaccattttgggttctcccccttttgaggaggctcacaacaccaagagagcgcacaaaaattttttgcgccgcgcccaagattaacacatgtgggcggggcagaaaaaaaaaggggcagagaccaccaggggttcacaaaaccggcgccgtcgactgtggtatagcgcacacgn

SEQ ID NO: 512339 - DNA, 949 bp, Homo sapiens
  misc_feature (33)..(34): n is a, c, g, or t
acaacttacaggctaagtagcgaggccaggtgnntaatggagcagttcggcggtcccgcgggtctgtctcttgcttcaacagtgttgggacggaacagatccggggactctcttccagcctccgaccgccctccgatttcctctccgcttgcaacctccgggaccatcttctcggccatctcctgcttctgggacctgccagcaccgttttgtggttagctccttcttgccaaccaaccatgagctcccagattcgtcagaattattccaccgacgtggaggcagccgtcaacagcctggtcaatttgtacctgcaggcctcctacacctacctctctctgggcttctatttcgaccgcgatgatgtggctctggaaggcgtgagccacttcttccgcgaatgtggccgaggagaagcgcgagggctacgagcgtctcctgaagatgcaaaaccagcgtggcggccgcgctctcttccaggacatcaagaagccagctgaagatgagtggggtaaaaccccagacgccatgaaagctgccatggccctggagaaaaagctgaaccaggccctttggatcttcatgccctgggttctgcccgcacggacccccatctctgtgacttcctggagactcacttcctagatgaggaagtgaagcttatcaagaagatgggtgaccacctgaccaacctccacaggctgggtggcccggaggctgggctgggcgagtatctcttcgaaaggctcactctcaagcacgactaagagccttctgagcccagcgactttctgaagggccccttgcaaagtaatagggcttctgcctaagcctctccctccagcccataggcagcttttttaactatcctaacaagccttgggcccaatggaaataaagctttttgatgcaaaaaaaccaaaaagaaactccgagactagttctctcc

SEQ ID NO: 512340 - DNA, 944 bp, Homo sapiens
  misc_feature (33)..(34): n is a, c, g, or t
  misc_feature (756)..(756): n is a, c, g, or t
  misc_feature (814)..(814): n is a, c, g, or t
  misc_feature (908)..(908): n is a, c, g, or t
acaacttacaggctaagtagcgaggccaggtgnntaatggagcagttcggcggtcccgcgggtctgtctcttgcttcaacagtgttgggacggaacagatccggggactctcttccagcctccgaccgccctccgatttcctctccgcttgcaacctccgggaccatcttctcggccatctcctgcttctgggacctgccagcaccgttttgtggttagctccttcttgccaaccaaccatgagctcccagattcgtcagaattattccaccgacgtggaggcagccgtcaacagcctggtcaatttgtacctgcaggcctcctacacctacctctctctgggcttctatttcgaccgcgatgatgtggctctggaaggcgtgagccacttcttccgcgaatgtggccgaggagaagcgcgagggctacgagcgtctcctgaagatgcaaaaccagcgtggcggccgcgctctcttccaggacatcaagaagccagctgaagatgagtggggtaaaaccccagacgccatgaaagctgccatggccctggagaaaaagctgaaccaggccctttggatcttcatgccctgggttctgcccgcacggacccccatctctgtgacttcctggagactcacttcctagatgaggaagtgaagcttatcaagaagatgggtgaccacctgaccaacctccacaggctgggtggcccggaggctgggctgggcgagtatctcttccgccagggtttttccnattccagaacctatgagcatctacgagccacagcgacgtctgaagggcctccttgctnaagctaatagagggatcctgccataagcttctccctccagccaaaaggcagctttcgttaactatcctaatttctctcggagccaatggcgatncttagatcacctgcaggatgcagctgcatgccctcg

SEQ ID NO: 512341 - DNA, 866 bp, Homo sapiens
  misc_feature (33)..(34): n is a, c, g, or t
  misc_feature (548)..(548): n is a, c, g, or t
acaacttacaggctaagtagcgaggccaggtgnntaatggagcagttcggcggtcccgcgggtctgtctcttgcttcaacagtgttgggacggaacagatccggggactctcttccagcctccgaccgccctccgatttcctctccgcttgcaacctccgggaccatcttctcggccatctcctgcttctgggacctgccagcaccgttttgtggttagctccttcttgccaaccaaccatgagctcccagattcgtcagaattattccaccgacgtggaggcagccgtcaacagcctggtcaatttgtacctgcaggcctcctacacctacctctctctgggcttctatttcgaccgcgatgatgtggctctggaaggcgtgagccacttcttccgcgaatgtggccgaggagaagcgcgagggctacgagcgtctcctgaagatgcaaaaccagcgtggcggccgcgctctcttccaggacatcaagaagccagctgaaagatgagtggggtaaaacccccagacggccatggcgtggcatggccntggagaacccccatctctgtgacttcctggagactcacttcctagatgaggaagtgaagcttatcaagaagatgggtgaccacctgaccaacctccacaggctgggtggcccggaggctgggctgggcgagtatctcttcgaaaggctcactctcaagcacgactaagagccttctgagcccagcgactttctgaagggccccttgcaaagtaatagggcttctgcctaagcctctccctccagcccataggcagcttttttaactatcctaacaagccttgggcccaatggaaataaagctttttgatgcaaaaaaa

SEQ ID NO: 512342 - DNA, 753 bp, Homo sapiens
gagcgggctggggttcctccccgagccgccccagtgcccaagcttcctgcggctccgccgacaggtgccgcgccgactgggaactcgccaggtgcgtagtcccctgcaaggccatggtggtgcctggcgaggccgcagaaggcgggatgggcctgagacccgggcgccagagggggagtacagctgctcctgactccctaggattcccccaaacccatcacccagaacaccgactacgacgaacctgccggataaccagggagcccaaggagccgcaggacgcagcactgacgctcagcgaccgtatcaggagtagatagccacacagctacagaacggactccgctgggactactgcaggcgatggcgaccagacaacccccagcccccagccaacgacctccgaacagggggacacacattagcacaccagggcacgaacgccatccacgccaacggggacgcacgggcctgctagaccacgccctacgccagaaccaacaaccccaaggcccagacaagagccaggcacctgcgcagctacccacccacgaccacagcaagcgccccatcgaacgaaccgtcgacccgggcaccacgtcaaactacccacgacacaccgaccagcgtcgaacggcggacaacaccacagccgaccacccgcacgacccctagggaagaacgcccaagacgcaggcccaactagccgaaccgacacaatagcgcacccaaccatacaccaaccctggcaca

SEQ ID NO: 512343 - DNA, 307 bp, Homo sapiens
  misc_feature (16)..(16): n is a, c, g, or t
  misc_feature (46)..(46): n is a, c, g, or t
  misc_feature (123)..(123): n is a, c, g, or t
  misc_feature (265)..(265): n is a, c, g, or t
  misc_feature (287)..(287): n is a, c, g, or t
  misc_feature (303)..(303): n is a, c, g, or t
caccttcccgcatggnccccttccggccagaccgggccccttcagnatgaggaggctgcacccagggccaggcaccagttcgcttcaggccaccagcagcgggcacccccatctgcagttggnctcttctgctgctgcgccccggcagccagggtctgatgggcccagatgggcaaccactgcagctgggcgtggctgtgggctctgctgtggggcacacatttggtcacgccattacttggggcttcagtggaggaagtaattntaagcttcaaggcttaaaatantttccagggggcttanggga

SEQ ID NO: 512344 - DNA, 1234 bp, Homo sapiens
  misc_feature (221)..(221): n is a, c, g, or t
  misc_feature (639)..(639): n is a, c, g, or t
  misc_feature (1198)..(1198): n is a, c, g, or t
agcggaatcaacaacagtgtgcgaaaggcccaggcgcatcttatgcggattggaccaaagaggaaacacatagttgcacaatgatatcatactcttgcttggtaccaattgctcactacgtaagggaacctcccaccagcaaagtgccataacagagccagttccagggtcagtctggtgggcgggcgtcagttgctgtggtggccatgggtagttggagncaagatgtctcatgtgccccgtccctagaacttagcagatggagtaccattgcaacgtcccgcgatgaccagcgttccagcctgagacgcctcctcgggccttccgttaccagtgagctgcgcggagggtcggcgtggaggcacagacccagggatggcttccctctagtgggcgtcgccagccgtccaatgcgcaggatgcggcggggggatgcgcacgacattcattcgcaccgtggttctctttgccaccccaaccgtccggaacggcgttggcgccgacccccccgtggggacggcgatcctctgggagggtttcgtaggcacaggaacagcaggcgctcccccgttaactttaacgtggcctgtggaatagtggaggtaaaagtgcacaatcgcgatttgacatgaaattacnttcaaaagcagaaacctgacacttggtccctacactaagcactaggggatgtataagggttttctgcttgctcccctggagaagtggaggtgtccgaatcagttgaagaatgccttgggacacatggcacgacgaattctctcggataaatatgggcgacgcaagacaaggaaagcaagaatttcgcgttgggcacgtttagagcgaaaacgcacttttagttttcgcgccaagataatttgaacgggaaaaaaagaacaaattcaaaaaacaagcacgttgtgcaagggaaagataagaattggcgtcgtggacttggggctaaacggaattggaacgcaaaaatgtgggttacctagggcaattttgaatttacgtggtccttccaagttttgagagccaaacgtgggcccccaagggaaattgggcgccggttgggggaatttgaagctggttcccaaaacccccttcccacaagccttgcttggaaaacgattttgaaattcgagacttccttttgttaccacaggaaatcacgggaaccttcggggaggaccantctggaaaggtttgcggaagagcgagccccgtcccg

SEQ ID NO: 512345 - DNA, 189 bp, Homo sapiens
ccttcttttctctgcctaaacatcttcccacatcagatgaagtgattagatttaatgggtacagcacaccaacatggcacatgtatacatatgtaacaaacctgcacgtgtggcgcgtgtaccctagaacttaaagtatatattaagaaagaacttcaacaattataatatgtcaaaagttaatctagg

SEQ ID NO: 512346 - DNA, 660 bp, Homo sapiens
  misc_feature (14)..(14): n is a, c, g, or t
  misc_feature (75)..(75): n is a, c, g, or t
  misc_feature (349)..(349): n is a, c, g, or t
  misc_feature (456)..(456): n is a, c, g, or t
  misc_feature (530)..(530): n is a, c, g, or t
  misc_feature (555)..(555): n is a, c, g, or t
  misc_feature (596)..(596): n is a, c, g, or t
  misc_feature (608)..(608): n is a, c, g, or t
cagccctggccccncccctgccgccatgggtggcgcctccccctactgcctgcccagggccctgtccaggttgcncttgacggtgtcgaggaagtccgtggtgtccaggaagtgctcgtccagcttcacattgctgaggccgtgaatcccgcccgccaggcccttggtcatggctcccctctccaccgtctccccgcacacctcctccagcatctgggccaacctgatgaggtcttggttcccatccagcttcccccggtgctccaggccacgtgtcccggcaaagatgccggcgatggggttggtgctggtgggccggcccttctggtgctcccgacagttgcgggtnacggttccatgagcggcctcagcctcaatcgtcttcccatcagggcagaacaggacggacgttatcaggccaagggagccaaagccctgggccaggatgtttgattncacaactccgttatagttcttgcaggcccacacaaagccacccgaagacttgaggacctgagccaccatgttancaatgagccggtgctcaaaccagancttattcttgttgagttggtcttatagtgcttgttaaagancttctgggagangttcttgaaacgcccatcgtaggctttcagtttggtgttcttggtgctcatg

SEQ ID NO: 512347 - DNA, 445 bp, Homo sapiens
acccccactgggttcgagttcctgcttgtgtgagtgagagcggtctttttgtcacatggcagagacagcctgactgggcacattgaaatccgtatcgtttccccacctggcctgactggaaggaaaggcaataggggaacaatgtaacaaattgctgaggctcctactgactcaggtttacacatttagagagtccacaaggagaacagaaaagaatggtgggctataaggtactaggtacagggtgtgtttaccatgacatttcacttaaaagtaacacgaggacagctttttggtggaaaagaaggactgaactggtgaccttcatcgctgttcttttaagaagaaaagtgaagcatttcttgaggcctagagctgcagaaggacattccccatcgccaaggagaagaagaagcaatctgctagaacatttgcatgcagaaat

SEQ ID NO: 512348 - DNA, 360 bp, Homo sapiens
  misc_feature (22)..(22): n is a, c, g, or t
  misc_feature (329)..(329): n is a, c, g, or t
ccacgcgtcgcgacccacgcgntcgaaaaaaaaaaaaaaaaaaaaaaaaaaaaaaaaaaaaaggggggagacaaaaaaaaaatccaacaggggggacacacaattaagaggaccccagattttatgtgcaaaaaaggggtacccataatggcgagagcacgattattatgacgcatagaagacagggagctacgacgagtttatcaacacacgctgttcgaaggtggagaaacacgcgtggtagcggtagtgagacaactattggagtgatacagcagcccccttctaattctcgatggggtggtggccacaaatcatgcggggcacanacaacttactcatcatacagcagcgatttgt

SEQ ID NO: 512349 - DNA, 243 bp, Homo sapiens
gttcaccactgtctgcaccagtcttgtgcttttgcatatcagtctttgccgcctgcgcaacagggtgggcctagccctactagtctcaatctccaacaccatatggcctcagtactacgtacataacctaaccctcactccaatgctaacactaatcgtcccaacaattatattactaccactgacatgactttccagaaaacacataatttgaatccacacaacgggtcacgagctcgaatt

SEQ ID NO: 512350 - DNA, 165 bp, Homo sapiens
tgtgtcacttctataggatcccccgtaagtggaattcctccgcgcaaattcacgtccatgttgactttggattcggaaattgcggaactcttcggagcgggaactgctctggtgctgtctgccgcgaaagagcagatcccctccggaggcatcttccactatagg

SEQ ID NO: 512351 - DNA, 402 bp, Homo sapiens
  misc_feature (121)..(121): n is a, c, g, or t
  misc_feature (151)..(151): n is a, c, g, or t
  misc_feature (195)..(195): n is a, c, g, or t
  misc_feature (230)..(230): n is a, c, g, or t
  misc_feature (279)..(279): n is a, c, g, or t
  misc_feature (337)..(337): n is a, c, g, or t
  misc_feature (341)..(341): n is a, c, g, or t
aagagaacagtttggaagttcctgaaaaaactaaaaatagagctatcatatgatccagcaatcccactgctaggtatatgcccaaaagaaaagaaatcagtacatcaatgagatatctctnctcccatgtttactgcagcactgttcacangagctaagatttggaatcaacctaagtgtccattcacagataancagataaagaaaatgtggtacatatacacaatggngtaccattcagccataaaaacgaatgagagatcctgtcatatgcaacancctagacggaaatggaagcagaatgttaaattttgcatgtcctcacttatttgtgaangctnaaaaattaccataacttgaactcatgggaggtgaggtagaaagtaaaaagggacggttacc

SEQ ID NO: 512352 - DNA, 380 bp, Homo sapiens
tcagcacttggaggcaagacaggtgatcacctgaggtcaggagttgtagaccatgcctgaccaacatggtgaaaccgccgtctctactaaaaatagaaaattagctgggtgtggtggcacatgcctgtaatcccagctacttgggagactgaggcaggagaatcgtttgaacccaggatgcagaggttgcagtgagctgagatcgtgccactgcactccagcctgggtgacagagtgagatcccatctcaaaaaaaaaaagggaattgtaaataatactgctttgggcccctagtgtaaggtcagtgtctctaaaccttggggctattgacttcttggactagcattggtcgggggggtcaatccttctccccattatag

SEQ ID NO: 512353 - DNA, 496 bp, Homo sapiens
  misc_feature (117)..(117): n is a, c, g, or t
gctactttaagcctctcctcctgagcgggagaggctgtcaatgacccgcccattgcgttaagtgattggccttcttttctgcgcgcgcgtcggcaggctgcccagacagcctgcccncggcgcaggagagcgaacgcggaacagagacaaaaacggagatcgcagtcacggacaagacgaacgaccagcaagacagaaagaacgaaagacagacaacaggcagcaaaacagaacagccaaaaacagaagagacatgagcacaatatacgccacagaaaacgacacagaaccaaccacacagccccgctaacacaacggcatcccaagcgagcaacaaactgcgcgagccacccagcaaaaaacacacagttagacgagagggagacaagaacgcagcaacaccaaatggcggcgaccagccacgaccgaaacaacggcaaccgaagacaatcacacacagacaatgaggacaacacgactcgccacaacacaacac

SEQ ID NO: 512354 - DNA, 336 bp, Homo sapiens
ttgaccacgcgtcgccaggatggtctccttttggacctaactatgggacctgtacagacagtctacttggaaagaacagtaagcccagcctgcccggcagattttggtgctggacaatgctgccattgtctgcaactttggcagtgagctcagcctagtgtatgtgccctctgtgctggagaaactggactgaaggcaggtcaactgcactatgcctttcccccatcccaaggtggggcactggggattgcaactctttggacctagactggaggcaataggtaggcatctttgcagctgactcagaactgttgtctcctgactgtaataataaac

SEQ ID NO: 512355 - DNA, 887 bp, Homo sapiens
tccagaaagattcatcatctactaactggaatcaaggacactagttagatgttgtgcaccatggggaccattacatatgaccatacaagcactgaattgacaggttaatcataagacatggaaagagaagtgtctaaaagcttcaaaatgttccacttttttttccttcatggagacggttgttggctttcttccatgtgtgtttgtagcatttatttcagaaatgtgtatttccataatccagaggtgtaaaaccactagtgtatgagtggttacagcaacattgaaatggaaagctaaaagttaggattttatggagtatggagatagggtccagtatctatttacccgtgtaatgtttaggattaaacagtgttaagaagtttgtgaccatgaattagctttgcttttataaatttgctcatttagaaaatcaaaaatctggcaaaaagaaaaaccatgtttctttttgcttgtataactgtgttgtccttgcagcaacataaattgattcttggagctggcagacaagaatatccatataagattgttaccatttcagagagttgggaatttttaaacaggactactacggcaatccttttgccaacgtactggaaaaattaggaatattgcgctggtgggggcacaataaagtttggcatgaggtacggtttacgaatactgtatcggcggaaaggcggcggtgccgaatattccctaaccctatgacagctaaccataggatttcggggcccctcacgagaattactttgggccccaaacccttctctggggcgagcacaacggaacttgcgaccgggctcacagacacgcgcgttggcagtctccaaaacccgaaaggcgcccaaatatacctcaccggc

SEQ ID NO: 512356 - DNA, 346 bp, Homo sapiens
  misc_feature (341)..(341): n is a, c, g, or t
tagggcaaagctgccctcccattctattcaaagtcacccctgtgctcactgagatagatgcatatctgattgcctcctttggaaaggctaacagaatctcaaaagaatgtaaccatttgtgtatcacctatctgtgacctggaagcctcctccccacttcaagtcttcctgcctttccagactgaaccaatgtacttcttacatatattgattgatgtctcatgcctccctaaaatgtataaaactaagctgtaccccaaccaccttgggcacaggtcttcaggacttcctgaggctgtcacggacacatgtccccaacctaggcaaccataacccttttnctgag

SEQ ID NO: 512357 - DNA, 163 bp, Homo sapiens
  misc_feature (40)..(40): n is a, c, g, or t
  misc_feature (105)..(105): n is a, c, g, or t
  misc_feature (117)..(117): n is a, c, g, or t
gcacagagagcctggtgggttccttccacaccacactctntaccccaccacactggctgccacactaacagggatgctcagagagaccttccacaatggtctttnttccctgatttnaagccctctgaaacagtttttaaaatagtattttggctcggatatc

SEQ ID NO: 512358 - DNA, 107 bp, Homo sapiens
ggtcccacaggtgctgctacacaaccataacaatcttaaagagggaaaactgccagaccagatgttttagctacagccccgtgtcagggttgcacggggaatctcgc

SEQ ID NO: 512359 - DNA, 806 bp, Homo sapiens
ggacggacggagcgcccccgcccccgaccggccgcccgcccgccgccgccatgcccttctccaacagccacaacgcactgaagctgcgcttccctggccgaggacgagttccccgacctgagctgcccacaacaaccacatggccaaggtgctgacccccgagctgtactgcggatgctgcgctgccaatgagcactgcctgagctggcttcactgctggacagacagtcatccagaacagtgcgtgtgacaaccctggtgccaccctgtacatccatgacccgtgggctagcgtggccggtgctgactgaggcagtcctgacgcaagtgttcaatggatctcttcgaccccgatcatacgagggacctggcacaggctgtgctacaatgcccaagcgactgcagcacaatgacctgacctcaacccccggacaacctgcacgggcctggctgacagaccttggaacccacagactaccgtgcatgacgctacgcgagcgttgcagcgacaggagcctgccacgcataccagtaggctttcatgcactcccccacacggcgcacatcgcaacgcccgcgggtgagacagcagcccagaggcgcacaatcagacgaaagcctcaggcgggatgggacagccccttgatccaaggccttgcgacctggcgcgaacccttgcgcgagtgcccccggacgtacctaacgaccggcctcaaaggaagacaatggacccgggaagcgccgggagagccaaggcaggcacggctcaatccgacacgagcgcagctttccctaccttccgacca

SEQ ID NO: 512360 - DNA, 129 bp, Homo sapiens
  misc_feature (102)..(102): n is a, c, g, or t
tagagctctgttttgaagccatggatggatttccttgttaaaagctgttgccaagcttccctgatagaggaggagacagctgttgactacatgatttcttanctgtgttgccgtgggcacgcgatgacc

SEQ ID NO: 512361 - DNA, 987 bp, Homo sapiens
gtgcccctcatctgaaatacaatatggtagcgtagcagttccactgatactcagttatctcaggaatacattgaggatgaggatctgctcaaggactcctcatcatgccttgcctctaattaatagccgggaggcatcggaagtacatgacgttagtctcgtctggtcaattaatcacgattattccttattaggccatcaaacaaccgctccccttgtaatgtcccatatcagtgtagtctcattggccggacatgggttctttggcactggtcgtgcggattgactagatggggatgtggctcgtaggtcgctcttagcataaggtcatccagactcattctcgaacctacattattggtgaacgtcaaacgtagcggatacctagtagaggcgtaagataactactccaagagtgcgtaagaacctaggtcggtcgccagatcgagagttgactactttacgtatcgcatctcgagcattagtacggttgtccacacagaacacaagataaccatagagagatgttacacacacaaaacttatggtgcagtcgaagtggcgaccagagaaacacaaaagaagggccatcttgacgaaactgcaaaagggaggaggaggtgacaggcgaaaaatttacatggggggagcatgtactgggcaagtgggcgttaacatgtgggagatgaaccgcaaggggaacgatttatatcctggggtgggcggatggacaccaggagggtggacgagtatagtggcttgagccattccaacaaaggataggttcctagcgaggcgcatgtgaataagggcagggggttccttacttgagaggcccaaggggtttccctaaaggaagagcggcgtataccatttttgacgcgggcgccaaagggccctgtgggcgacccaaagttaacccaaaacgcgaaacgtggagattaccctgcaacacttggcaagtttaaaaccataggtaccccacgg

SEQ ID NO: 512362 - DNA, 122 bp, Homo sapiens
ggatggccaaaagcacctggagatcaaccctgaccaccccatttgttggagacgcttcgcagaggcttaagccacaaggattataggcaggtaggacctgtggcctctgtttaaacccccct

SEQ ID NO: 512363 - DNA, 120 bp, Homo sapiens
gcagatgggcacaggtaggagggggcaggtcatggaagggcacagttgtttacaaagccattaaaggagaatgaatagatctagtcctggttcccaaacaggcaaagaatatgtgtaatt

SEQ ID NO: 512364 - DNA, 598 bp, Homo sapiens
agaatccaggacatgaagccaggagctctccacagtcaacatgatggacgagttggccagatatgccaggctgggaaacgaaacgatcaacaagatgaccggataagctcaaaagccatgtgaaacgctcggacagctcaattagccaagatacaaatggggtgataagtgtcgctttctacgtattggcaggctgccctgatgatctcactcatttggaagtataattctgtccctgtggctgtcgtagcccgagtaaatggataacccctctagaccggcctggtaccctttcctactagagtagcaggtaggtagtggaattacctgtgggattacagtctggtaacaaaagtatgtcgccaattgtgctccatcccgttccaacctgaacaggaaggcatgcgcatatacaggcccgagtagggcttaaaaaaaggagaatttcccttttatacctaagctttaaaaaatctgcgatttaaccacggggtcgcgggacatctcgtaagagaacacaccacagggtgtgccatatcgcactagagcaacactcttccacagagtgcgcagaacaaaatactgaggccacttatga

SEQ ID NO: 512365 - DNA, 283 bp, Homo sapiens
gcctactactactaaattcgcggccgcgtcgacaagaatgtatcctatagattctccttcacaagtttataagggcttatggaaaaagggttcatcccaggattgtttataatcatgaaaaatgtggccaggtgcagtggctcactcttgtaatcccagcactatgggaggccaaggtgggtgacccacgaggtcaagagatggagaccatcctggccaacatggtgaaaccctgtctctactaaaaatacaaaaattaactgggcgtgatggtgcacgcctg

SEQ ID NO: 512366 - DNA, 460 bp, Homo sapiens
agaaatcagtgcgccattggatcgagtaaggatttaattacaagctcacaagtcaccattacaagcatagaggtgagtcaatagatgctaaagataaaaatgaatgaaaatatcgtggaaagtgggcaaaaaaagggaatttacgttcgggggtgtcaaaagtaaagtagaggctcctcttaaaaaactttttgccccatgtaatcaggaataaatagtaacttctctcagaagcgaaatttatgcagagacctgtgctaacatacttaaatatttgctagccatgattggtaaatcaatgtgcgcgatgtacttagctcccacaattaagcctaaatattcgccctggcatgcttattcggctccaagcaagcattaggtcatagctcgttccgtgtgccttatctacaggtgtaccataattaccttccccagcataccacaggttactttctccttc

SEQ ID NO: 512367 - DNA, 357 bp, Homo sapiens
caccgccctatcatacctaccttgagcccacaacaccgcccttggatttgtttacttgggggaagtgacgcccatcatccgcctgctggtatagggtctcatggaagaggatgacacccccaatgcaggagctcacgcggtcgtcagctgtcagcagcagctggcgacagaagcgcggattctcctcggtgttctcggctccaatggactgcagccgattggcaatgctcccagaggactcatctgcagccagtatgcccttgccaggagccacgatgcggtgagcgatgtcagacagctcatgtttctgctccggggtcagtgctggatattgagaggtatgatgaaggacggatg

SEQ ID NO: 512368 - DNA, 132 bp, Homo sapiens
tccctcaccagacagatgtggattagaagcatttgcggtggacgatggaggggcccgactcgtcgtactcctgcttgctaatccacatctgctggtggagggaggctgtggaaggaggctggtggaagggag

SEQ ID NO: 512369 - DNA, 127 bp, Homo sapiens
gattcctgttgcttgtctttagagtttcccggaacagcgcaacctgccgccaccgtggtgaccgtgattgccagtcctctgccggtgcgcccagagccgccagtgaggtgcccggccgggggccagg

SEQ ID NO: 512370 - DNA, 583 bp, Homo sapiens
  misc_feature (45)..(45): n is a, c, g, or t
  misc_feature (184)..(184): n is a, c, g, or t
  misc_feature (189)..(189): n is a, c, g, or t
  misc_feature (196)..(196): n is a, c, g, or t
cctttagctccatcttagttcgggggggtgaaacataatctcatntcctccacccgagaccccttaagcaccaaccctattcccccgcgcggccccttattcgctccgacaagatgaaagaaacaatcatgaaccaggaaaaactccccaaactgtaatcacattttctcagtgggggggaagnaactnctcgcanaacgaagaaagaggttcataaaacatccacagtatgtgacaaaaaacttcatttctccttaaagaagctaggggcaaacaatatctcttgtattgaagaggttaatatgttcacaaaccaaggaacagggatccactttaacaaccctaaaggtcaggcattctctgacaacgaacaccttcaccattacaggccatgcttatactaagcaccttttataaatgctaccaatcatcttaaaccaacttgctccaaaatagttttactagcttaagcaaaactgaccaaagacttcgccaaacaatcttgggtttgaaaatacactacttgcttctttaaagttttatttatcataaacttccagatctctcgaaactcttaacatct

SEQ ID NO: 512371 - DNA, 601 bp, Homo sapiens
  misc_feature (334)..(334): n is a, c, g, or t
aaacccaagcccatgacccctaacaggggccctctcagccctcctaatgacctccggcctagccatgtgatttcacttccactccataacgctcctcatactaggcctactaaccaacacactaaccatatacccaatgatggcgcgatgtaacacgagaaagcacataccaagggccaccatacaccaccttgttccaaaaaaggcctttcgactacgggactaatccttatttaattaccctcaagaagtttttttctatcgcagagatttttcatgagaccttttaccaactccaagcctagccccataacccccaaattaggagggcacntggaccccaaacaggcatcaccgccgctaaatcccgctagaagtcccactcctaacacaccaattccgtattactctgcatcaggagtatcaactcacctgcagctcaccactagtctacatagacaacacaaccggaaacccaacatacattcacagcactgcgttattaacaacttttacctgggcgtctcctacttttaccccatccttacaaagctctcaagagctaccttcgcagctcatcccattccaccaatcttcccga

SEQ ID NO: 512372 - DNA, 188 bp, Homo sapiens
  misc_feature (58)..(58): n is a, c, g, or t
catggctcaggcggctagtgcagagcccaggtgctggatgtagtccaaaatcgtccanggagggtgcccgccgttgatgtagaggacataggtgaagccatctttgaggacccctcgaatggagacctaattgggctgatttgcctgctgctgctaggaggaggcctaatagtggggtgaggcttgga

SEQ ID NO: 512373 - DNA, 1516 bp, Homo sapiens
  misc_feature (577)..(577): n is a, c, g, or t
  misc_feature (998)..(998): n is a, c, g, or t
tcctgtattgatagctgcgtctggtgtcggtccgttacgtgttgtgacactcctgcttttgttgtattatatctacttttgttatgttgttatcgttgttggcgtccgctcttctgtgtggttgtgctgatccacgctatcatgtgtcgtgcagtctccgcttgttcggcggtcgggtgcacaaatggttggtattgttctttctgtctggcttcagggtgtgctgttttttcaccccgcgtggttgtgttatccctttttagcaccgtctgctcgtatccccggggtgtaacttctttgcgtatggcgccccacgcatcgttctgtggtgaccttctttcctccgggggacacaatgtggggctgctactaatcttaacaaaagtggttggctctcctctaagggttgttcttcgctctagggcagaaccactgctcgtgggtggtccacccaccagattgtgctcctcccccccccttgtgagctaccacggctgggggtgttttaccttcgctaccaacggggtggtgttttctcccttggtgtcaccttctccgcggcgcctcatttttgcgntgcctcgctgctaatttgtcccccctccttaattgtttggggttttgccaccacccccggggtcttcaccacctgtgggcacagtgagccaggggttgtgcttcggaggcgctcgacagggggagaaggggtgtgtgtttccccccgcttttttggtttacaaacgcctgtgagagagtggcgccccctccgtaatgtttctcttgcgagtgttctcgtgtgggatccctcgcgccccccccttgttgggatatagggtgttccccctggcgcacaggcccccactcgtggtgtttttgagagagagcctttttttcaccagactcagtgtcccccctcttggggggttcactctctgttgggtcgtgtttccgtggtgagatagtggagggacgcacacacgcactctgtctctcgggtntgggttcacactctcaaacgccccgttggaccacacagagaggggcgctgctctgtagaggaccttcgcacacgggctctcccccaaagttctgttcccccccagaaaagcctccacagaagaggcgtataaaagtggagatatttatactcccttatatatcctcgtccaccccccacttttttaaatccactctgtggtggaagaaccgcgttttcacgaatcctctgtttgtgttctccaattgtgcccatcattaagagtttatggtaggtaaaaagaaactgtggttaaatggaataacccacagtgcactcttgttaacccttcacgaaggaaaaggaggagaatgttcttggtggagcccccttgtgtttttttttttggcgctgtggccacttttaagttatattatggtttttgtaaaaccacgcgatacttttttaatgggaacccaccttgaccccacaaatttgtccccgaaattttgggaccccctttaaaaaatttaaaggaga

SEQ ID NO: 512374 - DNA, 348 bp, Homo sapiens
acactacataattattcattctaaccttcgcagaggtacatgattctgtctaccagatattaattttacagtgaccactaaaggttatttggttgttacaacgactacaattctgaatatactacattgtgctaaattttgccattattaatatcaaccaatcacagaagatacaacagatgtgtttctaatgcacgatttactttctagattcccttgatattcaatgctatttcacttcgttcattattttcaatcatctagacacctgttacaaatgaggaacaaatccagaagagcctatctgatctcgtctgaagtggtcccttatatactattggagcctac

SEQ ID NO: 512375 - DNA, 952 bp, Homo sapiens
  misc_feature (59)..(59): n is a, c, g, or t
  misc_feature (95)..(95): n is a, c, g, or t
  misc_feature (108)..(108): n is a, c, g, or t
  misc_feature (127)..(127): n is a, c, g, or t
  misc_feature (129)..(130): n is a, c, g, or t
  misc_feature (132)..(132): n is a, c, g, or t
  misc_feature (136)..(137): n is a, c, g, or t
  misc_feature (139)..(139): n is a, c, g, or t
  misc_feature (141)..(141): n is a, c, g, or t
  misc_feature (146)..(146): n is a, c, g, or t
  misc_feature (153)..(154): n is a, c, g, or t
  misc_feature (166)..(166): n is a, c, g, or t
  misc_feature (173)..(173): n is a, c, g, or t
  misc_feature (188)..(188): n is a, c, g, or t
  misc_feature (211)..(212): n is a, c, g, or t
  misc_feature (234)..(235): n is a, c, g, or t
  misc_feature (286)..(286): n is a, c, g, or t
  misc_feature (292)..(292): n is a, c, g, or t
  misc_feature (296)..(297): n is a, c, g, or t
  misc_feature (313)..(313): n is a, c, g, or t
  misc_feature (316)..(316): n is a, c, g, or t
  misc_feature (325)..(325): n is a, c, g, or t
  misc_feature (336)..(336): n is a, c, g, or t
  misc_feature (340)..(340): n is a, c, g, or t
  misc_feature (342)..(344): n is a, c, g, or t
  misc_feature (346)..(346): n is a, c, g, or t
  misc_feature (351)..(351): n is a, c, g, or t
  misc_feature (360)..(360): n is a, c, g, or t
  misc_feature (364)..(364): n is a, c, g, or t
  misc_feature (373)..(373): n is a, c, g, or t
  misc_feature (383)..(383): n is a, c, g, or t
  misc_feature (385)..(385): n is a, c, g, or t
  misc_feature (409)..(409): n is a, c, g, or t
  misc_feature (415)..(415): n is a, c, g, or t
  misc_feature (417)..(417): n is a, c, g, or t
  misc_feature (421)..(421): n is a, c, g, or t
  misc_feature (423)..(424): n is a, c, g, or t
  misc_feature (446)..(449): n is a, c, g, or t
  misc_feature (459)..(459): n is a, c, g, or t
  misc_feature (506)..(506): n is a, c, g, or t
  misc_feature (528)..(528): n is a, c, g, or t
  misc_feature (866)..(866): n is a, c, g, or t
  misc_feature (883)..(883): n is a, c, g, or t
  misc_feature (887)..(887): n is a, c, g, or t
  misc_feature (930)..(930): n is a, c, g, or t
ttggcccatgagactgatctatagtaaaacactctaagaaatgcagtccaattaaaaanacttccaagaatccctagaaaagaaagtcacaatgnacaatgaggaaanaaaggaatcactactacantnnanatannangnaagtntcaatannctttagacagtngtaaatncacctgtcccttaanatttgggtttgcttttttttctnngccatggtaaatggttttttanntgttctttttttttttgttactctgctgttacatggggcatagctttttcncggggntttnngggggctgcggtcaanggntggcgacgnacaatgggggnccancnnncnaaatngcggtcacngggngggcggggngccctctcgngngggcgcaaatctgcatgggggggngctagngngttngnnttgggcttgtgtactttagttnnnntcccctttcnagtgtattaagagatggcatgcactttaatttgccaaaagcgatgcntgtgttctggcagcgacatgcnacttctatcacatagtaaagtgaataccagaactacaaaggcaggaggtgtaagtgaatttttattgggaggggaggttggcaacttaaacagcagcaaataaagagtgaataaggaaactccctgttgccacagatacacaagacctccgtatgtgatacaggagccatttcaatttgtgacccctagacagagatggcaagtgctttttccattcaatctaatacttccggattcctactaaaaaggaatacattaagagcatggaaaagttgcttactgaaaggaaacccccgaagagtaagggagggaatgtagaaattaagaagttatgtggnatactctttaaattgtnattnactacatttttcttattttcacagtaatactaaacacagtcanttgcagaacttggttcagatac

SEQ ID NO: 512376 - DNA, 153 bp, Homo sapiens
cgaggcccctacccgacaataaatagtcaaggtcggggaagataggtgaccccatagtacgcagccggtgagaaaccaggggagggaccggcacactaggggatgaatggctagtcagcctccctcttcccccgcaggaagaggtcagcgtag

SEQ ID NO: 512377 - DNA, 148 bp, Homo sapiens
gtggtgaaggtgaagcctaacgacaaggatgctaagatgaagtaccaagagtgtagcaagattgtgaaacagaaggcctttgagcgggccatcgcgggcgacgagcaccggcgttctgttgtggactctctggacatcgagagcatga

SEQ ID NO: 512378 - DNA, 171 bp, Homo sapiens
caatggcattcattcagttccatcaggtcatccacctttttttcaaccagcacatgtcttgttccctctgcacatccatcacttgtgcacagcgtcgtgccacattgtccatgcagcacagcatgcattcctgtgtcatgcttcttccatcccatgtggtttcattcacac

SEQ ID NO: 512379 - DNA, 137 bp, Homo sapiens
cccgagatccccatacagagtagataaagagttgttattctagaaaatagactactgaaggagaaaggctttaataatattaaaatagggcagtaatgcttttcatagtatagtaagatttggctaataccatctta

SEQ ID NO: 512380 - DNA, 441 bp, Homo sapiens
  misc_feature (256)..(256): n is a, c, g, or t
gtctcttactttcatgcagtgaaatgatctgaccgctgaagaggacgggcataacacagaaagacgagaagaccctatggagcttgaatgttacttgaatgcacagacaggtaccgtatacgaaaccgcgacagggtccgtaagacataccgaaaccgtgctaattgatgaagacttctccgggttgcgggcggacgctcggcagacgaaggaacccgaacgcttcgcgcaggcgagtaagcatgactagagcagntttcgactcagggtcagagagacagatacatacatgatgagctctacattctgaatcctaactgagacattgacgcaagcggcagactagagttagccgcctaggtgataagctagcgcaatcctgattctagagtaccatgatcgagacaataagggtttgactgaccttcgatgtagaataca

SEQ ID NO: 512381 - DNA, 273 bp, Homo sapiens
aatgtataacgtggaaatccccgggaccaaatttttgcaaaggccctgccggatggttccataactgtagagtctaattgctatcccttccagaaattaatcgttcagttgaaaaaaggactgatgccttttcaaaacaaatgaacccccgtagctgacaaaaaaccgtatcgtaaaggtttgtagttagggcttatttttgcatgttgatgttgcctagctaataaactgtaaatgtaaaccctgcgaataaaatggttttttttttcccca

SEQ ID NO: 512382 - DNA, 362 bp, Homo sapiens
gcccgagtagttgctatctgtggtaggttaagtgtttgaattaaaaaaaaaaaaacccgtaattccttgtgaaacttcccaaggccctgttccccttttaagttggagaccgattattcccagaaataggaaagataatcctaaatcttagtcaattttttttctccacacagattttaaaaagtgactagtaagggagaattttaaaaatttagaaaacctggagggaaagaaaaaagagggaaggaaggagagaaaaaaggaaggaaagaaggaagaaaggaaaaaaaagaggaagggagggaggagataaaggaaagaaaaggaaaagaaaaaaggccgaaagaaaagagaaagaaaga

SEQ ID NO: 512383 - DNA, 102 bp, Homo sapiens
  misc_feature (71)..(71): n is a, c, g, or t
ccactgcagttctgactcaggtggggaccccttcctcactctgctcttggttctaagttgtgttttctctnttccccaatctttgggagtcatattttcata

SEQ ID NO: 512384 - DNA, 379 bp, Homo sapiens
gccattctcatcccccttataatattctcagcacagccagcttacccttctttctcttgtgctatattcttcttggaagtggtgtaagacttcttctcccttttctaagcaccaccacgaagtctcaccacaagatgaagagtagcctccttttgaatatggtagtcagccaaagtacgtccttcttccaggtgcttgccaccaaagctcagtctctgctgatcagagaggaattcctcccatatcgtgtatcttggcctttacattctctatggtatcagagggttcaacctagagggtaatggtcttccctgtaagggttctcacgaatatgcgcattgtggtggcggctccagcacagctcgtgccgtattcgtac

SEQ ID NO: 512385 - DNA, 1000 bp, Homo sapiens
  misc_feature (1)..(1): n is a, c, g, or t
  misc_feature (86)..(86): n is a, c, g, or t
  misc_feature (90)..(91): n is a, c, g, or t
  misc_feature (133)..(134): n is a, c, g, or t
  misc_feature (137)..(137): n is a, c, g, or t
  misc_feature (141)..(141): n is a, c, g, or t
  misc_feature (145)..(145): n is a, c, g, or t
  misc_feature (154)..(154): n is a, c, g, or t
  misc_feature (156)..(157): n is a, c, g, or t
  misc_feature (159)..(159): n is a, c, g, or t
  misc_feature (162)..(162): n is a, c, g, or t
  misc_feature (170)..(172): n is a, c, g, or t
  misc_feature (177)..(177): n is a, c, g, or t
  misc_feature (188)..(188): n is a, c, g, or t
  misc_feature (202)..(202): n is a, c, g, or t
  misc_feature (207)..(207): n is a, c, g, or t
  misc_feature (209)..(209): n is a, c, g, or t
  misc_feature (212)..(212): n is a, c, g, or t
  misc_feature (214)..(214): n is a, c, g, or t
  misc_feature (222)..(222): n is a, c, g, or t
  misc_feature (225)..(225): n is a, c, g, or t
  misc_feature (237)..(239): n is a, c, g, or t
  misc_feature (243)..(246): n is a, c, g, or t
  misc_feature (425)..(425): n is a, c, g, or t
  misc_feature (485)..(485): n is a, c, g, or t
  misc_feature (529)..(529): n is a, c, g, or t
  misc_feature (717)..(717): n is a, c, g, or t
  misc_feature (750)..(750): n is a, c, g, or t
  misc_feature (843)..(843): n is a, c, g, or t
  misc_feature (899)..(899): n is a, c, g, or t
  misc_feature (918)..(918): n is a, c, g, or t
  misc_feature (971)..(971): n is a, c, g, or t
nttatggtcttaaaaaattctccactgtaacttgaattttcccaagaaactggcttgtgctttggcagcttcaccttcatacttgntctnntcactcacacaatcaatagagcaccaaacctacacagcaaanntanattntttntttatatanannantanaatttgtnnnatatnttttgttttgnttattttgtttttngttantntantnatgtatcnttnaatttaaaaaannncttnnnnttctcaatacttcaaaaaggcctggaaatttggcataaccttgtttgactgtgtgctttgaaagtaagtgatcaaaaaaagaaactctaaaaaaaaaatagaagtaggtggtcatggtcagtgccagtggggctgggaggcaggagcaagtggcggaactcaaaaagaagaagttagcntgaagtacatggcaggataggggtggggggcctcgctgcctggcaccccaaaggaaagcngtgagtgaaaataggaacctcggcttaaaaggctaaatggagtncagttcagctgtagcgggggaatactattcagtacacagccatggattatttttcttctctttgtctcttttcagagtttgttagcctccagcctgggagctctgggactggagcagctcagccgccgtctttctttgcttgaaagcattcacttcatcatccagggatttcttcttatcctccagtntcttcttctcgtcctggtgcagtttcttcaganggtcaaacttctcgtgcagctctttctctgcctctttgagctccgcttctttctctttgactcgctggacgaacatctgtttcatctcctctncttttttctggagtcccctaggaactcgttccttttggcctcatatgtttactgtnaactgaagggtttgctgtnagggtcggtgttcttgaagcccatttcctccagcttacagcggcgatacagcncatagtgccgggtgtgggtgttctcccgc

SEQ ID NO: 512386 - DNA, 126 bp, Homo sapiens
ttgtacggtgtacgcacttgtcacacgcggtacgacacttatatgttgttcatgttatgtaacacgtctaaatctgacccgccgtaggaacttggctgaagtaaattgtgatatgttcacaccagc

SEQ ID NO: 512387 - DNA, 406 bp, Homo sapiens
  misc_feature (400)..(400): n is a, c, g, or t
  misc_feature (406)..(406): n is a, c, g, or t
tttgctcagactatggaagtgaggttttttaaaggcaagtgtattaacgtggtggtattctgaaggcaatgattcagcacagagggaaagatgattatgaccatctaatgtccaaagattatgatcatctaatttcaaagatgaaatctttgccttgtgcttcattttattttttcttttaatttgttttgtgcttcattttagacgagcagctttatacttactacagactttatcctaccctaaatgtaataaatctaatacttttctggggatatcttacaactagtggaaataaggtcattcttcatatacatgatgcattgccttaaattcagatactgccctcctacttaaacataactattgtatgttgtgtatgtcacttatggtaattggnaatcan

SEQ ID NO: 512388 - DNA, 290 bp, Homo sapiens
aaagagtgttcactgaatgcatcatgtgtaaaaatgcaattatcatttcacaaccacattaaaagggaaaatacctaagaggtgaacttttaataaaattatttgaaacaatctcaccctgcacataaaaatacattacttgtatatacatgtagatctctacatgaaagaaaagattcagcttcaaatagaaaaaggctgacccttgataaagacatattagattgccaaactgatgtgattaccactgtaagaactaaaaacataaagataaaaagattaatttaaac

SEQ ID NO: 512389 - DNA, 217 bp, Homo sapiens
aggtcagaatgtaacttccttgtcctcacctcctcaccctaacatcagcaacaagagttccatcctactttgtattcacctttactataatcactcatcacactgtcccacaatcattgtggatcatttaactgcccctctatgacctgactactttgatggcagtgactatgtcttatgcatttccatatacctaatgcctcaataactgtaaagt

SEQ ID NO: 512390 - DNA, 865 bp, Homo sapiens
tgtccggataataaccgatgagtggggagtgaggagtcgatggacgtcgcgactgaccactttgtcagagtgtcacctcccatgtgcagtgaaaccaaccgtgttgggcacagcccctgttcgctgcgcgtttgtcacaccttccggggccccatgtctcggtgccccgtaccaaggttgagacgcaccgaccgtgccggggctttctccataagacggtgttcaccaaactcttgtttgcgccaaaccaccgcgcattttgtcaagttctaacgcggtcctattcttcccctcggggggtcgttcacgattttcccaacgccgcttagtgcatgctgttcgttgatgcaccccccccaggcgtgtgggcgtccaaaagtcgcccctgtgtgtcgcggccccgtatcaaaagtgctgcttgtttaatacgccgctggtaagtgagttctccctctctgcagacagttgtgtggatatggtctccccccaacggggcgcatgtctgcattccctcccggggcaccaccacgtttcatttcgagcaaactcaaaaaacacaccccactattgggtcggagaaccacaccctctttgtggcgaacccttgtgttgaatctgaccaagaaccaatcacaggttccgtgcgccagatcctcccccgcttcaaggggctccccaacgcctcatcactcatggtgagtggtctaaaagcaatacaagcctttctggggcacagcttctcccagaatattttctggagactcgttgtaagagggctcccagccttaagatctatgaacaggcgggggaagagggtgtacccattcttcctgggccccaaacggcaaatttcccccacaatgac

SEQ ID NO: 512391 - DNA, 892 bp, Homo sapiens
gaagatggtacatgcggtctgcggccgatccgtccaatgagtcttatagtaatggactggtaacagatctctgtgtcggagtgcattgttcggaccggcggtataagcatctctggcaagcagggccctcgagaggagcgaagatcgggacttggctgtgcataaaggacattctgcggccatgcatgggagacacaatgacgaactgagttgcagatacccttcagttgcacgcattgaacttacctgtggacaaaagaatgaaattaccaatcagagaggccatcagtaacgggagacagcaatgtgcctccattggatctatggaagactacctacgatggcacatggtcttacctagcaaattgacatgagcgtcggtgagctttagaaaccttttaccacgagacgtgcgatcgattaacaataactatggtcccaacgcgcatgacttacacgcgatcgcacattgtgaacgccgcgatgaggctaggctttgaacaagggctgcgaccttgtatgaacactgcaaaggagaacctgtcggaaccccttagtatttagggacaaatttggacacggcacgggcgagtctcacgcaccgatccactgcctaaagtgtagcatcgttcgagatcaagagagcatcccccaattgttggcacgttccatcgccgcatcactggccaatggtggtttgtcaacagttgcggaaacaggccacataattccaaacgtaagaccacatgttgtggttgtcgttcataaggacgtgtaccaatcctcaaaaaaatgggcgcgagctgtggcatgccaaggtccttggaaccgcatccgtcaacagagttccaacacattaaaaactcttgatgccaccctggcaacacaatac

SEQ ID NO: 512392 - DNA, 132 bp, Homo sapiens
taatcaaaaccacaaattatgtcagcaatatgcactaagaggctggagaaacctacgcgtccagaattgttggcctcagttctcttatatgtcagatttagtccttcacgggttttgcaggggtttattcta

SEQ ID NO: 512393 - DNA, 187 bp, Homo sapiens
cataccccagttatgggacacacacacagatgcacacacacaccatgctgcgtactgacaaacacagcctcacatcacaaacacctcacatcacacactaagcacaattacacaccacacactcacatccataaccacacacacaccatgcacgtagacacacacatcacacatatacacacacaca

SEQ ID NO: 512394 - DNA, 336 bp, Homo sapiens
  misc_feature (14)..(14): n is a, c, g, or t
  misc_feature (31)..(31): n is a, c, g, or t
  misc_feature (68)..(68): n is a, c, g, or t
ccattcgaatggcnatcgaaatggaatcatncgactggaaaaagaatggaatcatcatcgaatggaantgaatagaatcacagaatgaaatcgaatggaatcatcatcgaatggagtctaatggaataatcatcgaatggaatagaatggaatcatcgagtggacacgaatggaatcatcattgaatggaatcgaatagaatcattaaatggacttgaatggaaacaacatcgaatggaatcgaatttagtcattgattggcattgagtggaatcatcattgaatggaatctaaggaaatcatcgaatggactggagtggaatcatcgaatggact

SEQ ID NO: 512395 - DNA, 451 bp, Homo sapiens
gtcccagttatagagactttcaggcttctaactcctgttctaatacatgatctgaggattctgctggtaaaggagacagcaagatactgctcttattccacatagtccaaaatcttaacagaaagaatctttgattagattgagacattagacaagtagcaagcgacagatgttcatcatcttagagcaatttcaaagaaagaggtgaaaaacaagagcaccttaatgtcgaagactggtcctaatactgaaagcaaacatgtcacttatttatcagtaacttaatatgcaaaaatgtgagttgcatcaaacatgttattgtatcaagagaaagactttgcttacatacaaaacagaatcttggctggagatgaggcaatctgtgagtcagttattggcattttctgggagaacagggaacaacagttctctcctaccaaacaaactgatc

SEQ ID NO: 512396 - DNA, 163 bp, Homo sapiens
  misc_feature (8)..(8): n is a, c, g, or t
  misc_feature (68)..(68): n is a, c, g, or t
gctgtgtnttggacaggtggagcccagccacattgcggagataagaactcttactaagaccatcgcanggtacccgccgcagtcctccgctggacccaatggctaatccctgaaggatgaggatgttctgcagaagctgcccgtgtgcaccacgggcacactg

SEQ ID NO: 512397 - DNA, 523 bp, Homo sapiens
  misc_feature (6)..(6): n is a, c, g, or t
  misc_feature (52)..(52): n is a, c, g, or t
  misc_feature (54)..(54): n is a, c, g, or t
  misc_feature (65)..(65): n is a, c, g, or t
  misc_feature (74)..(74): n is a, c, g, or t
ggcaantaaggggcatctaagaagatggccgcatattgtgaagccagtcgcntngctggaaagcntgaacctgntcattgacggctttagtcatgtttgaaaccgtggctttggagtagtgagcaccgtacattttctcaatgagttcggcaatttcagcagtggtaattcccttggtatacaactgaatgaccgttgtttctaaattatcactgtgccgaccgtagctggcaaggatgattttcaaccagccattgcgatctcgaggaatggttaagttaagttggccgtatttcgtatcaaacgagcgctcataactgccgttgcggttataaccagtgttaatcccagcgtatgagtagcgttcgtaacccaaaactctgccacttcgatttgaagcagctggttaatcgcaatttcgaggtggtgacgaaaaacttcgtccacatcttgcttttgggctagtgcagcgataatttctgtggtagttcattcatggggatgcctcctgtgatgttttttg

SEQ ID NO: 512398 - DNA, 155 bp, Homo sapiens
  misc_feature (144)..(144): n is a, c, g, or t
  misc_feature (154)..(154): n is a, c, g, or t
ctacttctcacgcttatacttctcaacgcttatacttctcaacgcttatacttctcaacgctttatacttctcaacgctttatacttcctctacgctttatacttcctatacttcctcaaccgcttctcattttcactttcccnggtatgaagnt

SEQ ID NO: 512399 - DNA, 136 bp, Homo sapiens
ctcatatcctcagagagcggcccacatcccctcacaactaccaaagtcactgggggatgcagctcttccccagaacagtccatggaactgactccagctccagggatcccaccgagaagattacattcattctcca

SEQ ID NO: 512400 - DNA, 223 bp, Homo sapiens
ctgggaacgacagctttgaccatcatgagtttccttgtctgacatgggccgtcgctgccgggttcagtaggatctcctcattgtagtcatctcctttgaaggtgtcatagatagtaatctcggtcctccaccactatcctacccctatctatcctcatcctacatcatacctgcataccagcagctagcttctagtgaagatcttccatgatcttgcttcagt

SEQ ID NO: 512401 - DNA, 191 bp, Homo sapiens
  misc_feature (36)..(36): n is a, c, g, or t
tcggccctggttaagtcggctcatgtggactcacgntcggctcttatagtccacgtatgacagaggctgagacaaacaggtttttttgggggggttttttttgtttgtttgtttttgttctttttttagacagagtttcactcttgtcacccaggctggaatgcaatggtggaatcttggcccaccacaac

SEQ ID NO: 512402 - DNA, 247 bp, Homo sapiens
cgatcacagcgttgcgccctgtgacatggtgcatgacggctgtggacctcgctgcgaatacatctccctcatctacaccaagctattcaggcgggcatggatgactattgaaggcactccggctgccactgaagccttttgagaccctactgtccctcaaccagggaggtcagaccttcattgttggagaccaaatctccttcgctgactaccacctgctggactttctagctactcctgtaataga

SEQ ID NO: 512403 - DNA, 113 bp, Homo sapiens
tctagagtatcccctcgaatcgacggttctcattgacctcacaacgaatgaggcacggtggagacgctaacagagaccacgatcattgtgagactgatgagaaagactttcta

SEQ ID NO: 512404 - DNA, 1394 bp, Homo sapiens
ataggtatcgctcttcaacaatatagtctccggacaatgaaccataagcgaatcagtaccagatcaatactcgatcatctaagtaatcataatggctcatcgcaactgaaatacgaggcaatagccccctttcacttctgagtcccagaggtaacccaaggcagccccttctgacatcgcggcctgcttcttgtcaggatgagcaagagagactcagccccacatcttacgatattcataatatcctatacattctcatccacatgctactaagatacgaaaatgccgttgctacctgcaagcatctgcttcgaagtgcttttattcacaagtacgagtaagctaggcaatgttgaagggtcgcgtattaatataacccgaaagaggcccaaggcgttacggccatagaatcttgtcgagccatcacgtccatcccaatctcaccgctaacaagtgaggcatgcacactacatccagcaccagagtacgtaaccgggttagcagatctctctagacggagtgacaggcagatgtcttatacacatcatttgagaccctcatggtaaattaattgcaatcgcgctcatactgttacttcacccgtgaattctcgccttaacagtaatcagttcggaaagctttggtaacataggctatgctcggagggcaattcactaactggagccctccggtaagcgataaaccctaacttcttgcaggaccaatctcgttggacaatatcaataaggtcaataaggagcgacgttggcagtcctataccgataataacccagttttaggaagtatccgccaatgtcacaaacacctgggtcagttcataccctcatacggggaagtgggcctgttgccgtcacccggccaattaaacgccgagtgttccttaatgtgggcctccaacacattgggagctccactatatattcgggcacacgaaacacttttctaacagaaatacgacagatctcaagagtttaccggcaccgtccaatttaacattcctcggccaaattgcatatggcacttagggcccaaccgcaagtagacacgcgcggatccctatgtcaatacccatttcataagtttgtgtgtagccactcaacggccccttaaaattcctcaaggtccgcgagcccttccaaagtcaacgcgccagttaaggtacccccgtcaagtgagtgcgtaaaagcagactcggctagacaggaacacttatctccaatgggcaccacgcctgttggaagtcggattgacgccagagacaccgcccacagacccagcacagttacatggtcccaggcgaagcagccgtccaatgttggccgcccgattttagatgccgacaggtctgtgatctcacccgtaagccgcggaaa

SEQ ID NO: 512405 - DNA, 915 bp, Homo sapiens
tggtggctcatggctgtaatcccagcactttgggaggcgaggcgggtgaatcacctaaggtcataagttcgagatcagccccgacatggtgaaaccccgtctttactaaaaatacaaaaaattagctgggcgtggtggcgggctcctgtaatcccagctactctagatagagcccgaggcaggagaattgcttgaactcgggaagcagaggctgcagtgagccaagatcgcgccattgcactccagcctgggcaataagaacaaaactctgtctcaaaaaaaaaaagtgtgcgtgtgggtgtgtgggtgtgtgtgtgtgtgtgtgtgtaaacggggctgtgtcaaaattacacttgggtgctctcagaaagacatttctcaaaatcagtgaacaaagtagcccacaaaatagaacgatatcgcccatcatatctactacgggggtaatatccagaatatgtaacagacatccttagaactcaacaacaacacaacactctaactccaaccacgtgtacaactgacttggaatagaccagttctccacagaagatgtgcacgtggtcaacctcattactcatcagggcaccctggtccctcactctcgggtatcctccaccagcgaagattatcacttctcacccaataaggtggcttctaatcaaacaccaacaaaccgcaacccacgttggcgaggtgcgcccacaccggcaccctgtcgctgccgacggcagggcaacggggcccgctgggaaacagctcgcgctctccaccagcaccgagtccaggggccgcacctctggtttccaacatggacgcatcaacacaccggccgcgcacgcctcaaccacaggggacactgcgtcacaatcaaggtccgaccacagaaacagcgcgcgcccgcggacccgcaag

SEQ ID NO: 512406 - DNA, 276 bp, Homo sapiens
cttcccttcccagatggagtctcgctgtaacgcccaggctggagtgcaatggggccattttggttccctgcaacttctgcctccccgattccagcgattttcctgtttcagactcccgagtggctgggattacccggggtgggccctcatgcccggcccagtaaaatgttttttaaaatgggtatgggccttattcataaaaaataatggggtcccgtcttttttaacctgtaaagacccctcttattgaataaaaagatgagagcttaagtttga

SEQ ID NO: 512407 - DNA, 3515 bp, Homo sapiens
taaaccaggaagccaggtcttgcctgggtcagggcaggcactgggcccgaaggaggagggccacttcctgccagccctccaccgagcccacctatggcgcctccccaggaagtgctccggccagcccagggtaaacacgctagccctgcccctctgggaccatagcccggggacccagactcttggccacgctcattcccacccctacccaggaccggcagccggagccttgggtccctgcatgggcctggggcgccctgtgccccttcacctcgtcctcgtccagttgactgctgtggcagccggtgctacccgctgtgtccactgcaccctggccctgttctgagcggtcacagcagctggggagaagggccatcctggaagccgggcagatgaggacggaaccagacagtcccactgtggtgggcagaggttcctcctctcccggccccgccccggcccggccccgccgagcgtcccacccgcccgcgggagacctggcgccccggccgaggcgcgaacagacggacgcaccggcgagcgccgaggggacaggccgagcgcggggcgccggaggcagcaggaccctcccgagggcctgaccgtggaggtagcactgcacacccactccctgtgggccggagccaggaggcacttcctgggtgtcggagcccagaaggaaaccagtggccgggaagcaccagctgggtgtgggacaggcactggcctcagaccggggccacactgaggtctgcccttctcccgctggccgccacccaagacaccatgagccagtccggggccgtgagctgctgcccgggtgccaccaatggcagcctgggccggtccgacggtgtggccaagatgagccccaaggacctgtttgagcagaggaagaagtattccaactccaacgtcatcatgcacgagacctcgcagtaccacgtccagcacctggccacattcatcatggacaagagcgaagccatcacgtctgtggacgacgccatccggaagctggtgcagctgagctccaaggagaagatctggacccaggagatgctgctgcaggtgaacgaccagtcgttgcggctgctggacatcgagtcacaggaggagctggaagacttcccgctgcccacggtgcagcgcagccagacggtcctcaaccagctgcgctacccgtctgtgctgctgctcgtgtgccaggactcggagcagagcaagccggatgtccacttcttccactgcgatgaggtggaggcagagctggtgcacgaggacatcgagagcgcgttggccgactgccggctgggcaagaagatgcggccgcagaccctgaagggacaccaggagaagattcggcagcggcagtccatcctgcctcctccccagggcccggcgcccatccccttccagcaccgcggcggggattccccggaggccaagaatcgcgtgggcccgcaggtgccactcagcgagccaggtttccgccgtcgggagtcgcaggaggagccgcgggccgtgctggctcagaagatagagaaggagacgcaaatcctcaactgcgccctggacgacatcgagtggtttgtggcccggctgcagaaggcagccgaggctttcaagcagctgaaccagcggaaaaaggggaagaagaagggcaagaaggcgccagcgatcgtcaacacctgcagtggcccagacatcgcacgctccgtctcctgcccactgctctcccgagatgccgtggacttcctgcgcggccacctggtccctaaggagatgtcgctgtgggagtcactgggagagagctggatgcggccccgttccgagtggccgcgggagccacaggtgcccctctacgtgcccaagttccacagcggctgggagcctcctgtggatgtgctgcaggaggccccctgggaggtggaggggctggcgtctgcccccatcgaggaggtgagtccagtgagccgacagtccataagaaactcccagaagcacagccccacttcagagcccacccccccgggggatgccctaccaccagtcagctccccacatactcacaggggctaccagccaacaccagccatggccaagtacgtcaagatcctgtatgacttcacagcccgaaatgccaacgagctatcggtgctcaaggatgaggtcctagaggtgctggaggacggccggcagtggtggaagctgcgcagccgcagcggccaggcggggtacgtgccctgcaacatcctaggcgaggcgcgaccggaggacgccggcgccccgttcgagcaggccggtcagaagtactggggccccgccagcccgacccacaagctacccccaagcttcccggggaacaaagacgagctcatgcagcacatggacgaggtcaacgacgagctcatccggaaaatcagcaacatcagggcgcagccacagaggcacttccgcgtggagcgcagccagcccgtgagccagccgctcacctacgagtcgggtccggacgaggtccgcgcctggctggaagccaaggccttcagcccgcggatcgtggagaacctgggcatcctgaccgggccgcagctcttctccctcaacaaggaggagctgaagaaagtgtgcggcgaggagggcgtccgcgtgtacagccagctcaccatgcagaaggccttcctggagaagcagcaaagtgggtcggagctggaagaactcatgaacaagtttcattccatgaatcagaggaggggggaggacagctaggcccagctgccttgggctggggcctgcggaggggaagcccacccacaatgcatggagtattatttttatatgtgtatgtattttgtatcaaggacacggagggggtgtggtgctggctagaggtccctgcccctgtctggaggcacaacgcccatccttaggccaaacagtacccaaggcctcagcccacaccaagactaatctcagccaaacctgctgcttggtggtgccagccccttgtccaccttctcttgaggccacagaactccctggggctggggcctctttctctggcctcccctgtgcacctggggggtcctggcccctgtgatgctcccccatccccacccacttctacatccatccacaccccagggtgagctggagctccaggctggccaggctgaacctcgcacacacgcagagttctgctccctgaggggggcccgggaggggctccagcaggaggccgtgggtgccattcgggggaaagtgggggaacgacacacacttcacctgcaagggccgacaacgcaggggacaccgtgccggcttcagacactcccagcgcccactcttacaggcccaggactggagctttctctggccaagtttcaggccaatgatccccgcatggtgttgggggtgctggtgtgtcttggtgcctggacttgagtctcaccctacagatgagaggtggctgaggcaccagggctaagcaattaaaccagttaagtctcccagga

SEQ ID NO: 512408 - DNA, 363 bp, Homo sapiens
  misc_feature (349)..(349): n is a, c, g, or t
tggatctccactggtgcgggggcttgtctactatgggcgttgactacgtactacttactggttgcaacatgttgtggtgtcatcatcttgtaattcagcaggcggcgggggcaatcaggttcatgtgcatcaggcagtcagggttcaggcatgcagtgggcaagcaagcaaagcagcaggcaagtcacagtttcacattcatgccctcttttgggttgcaggtgcatgcatggcaggtaggcagcatttggtgctagtgcaacattgtttccagagtacatcagctgggggctcagtccagagttacaggtactcaggcatcaccagtcagggcagcaggcggcatccntcctcagcagtcgc

SEQ ID NO: 512409 - DNA, 3764 bp, Homo sapiens
taaaccaggaagccaggtcttgcctgggtcagggcaggcactgggcccgaaggaggagggccacttcctgccagccctccaccgagcccacctatggcgcctccccaggaagtgctccggccagcccagggtaaacacgctagccctgcccctctgggaccatagcccggggacccagactcttggccacgctcattcccacccctacccaggaccggcagccggagccttgggtccctgcatgggcctggggcgccctgtgccccttcacctcgtcctcgtccagttgactgctgtggcagccggtgctacccgctgtgtccactgcaccctggccctgttctgagcggtcacagcagctggggagaagggccatcctggaagccgggcagatgaggacggaaccagacagtcccactgtggtgggcagaggttcctcctctcccggccccgccccggcccggccccgccgagcgtcccacccgcccgcgggagacctggcgccccggccgaggcgcgaacagacggacgcaccggcgagcgccgaggggacaggccgagcgcggggcgccggaggcagcaggaccctcccgagggcctgaccgtggaggtagcactgcacacccactccctgtgggccggagccaggaggcacttcctgggtgtcggagcccagaaggaaaccagtggccgggaagcaccagctgggtgtgggacaggcactggcctcagaccggggccacactgaggtctgcccttctcccgctggccgccacccaagacaccatgagccagtccggggccgtgagctgctgcccgggtgccaccaatggcagcctgggccggtccgacggtgtggccaagatgagccccaaggacctgtttgagcagaggaagaagtattccaactccaacgtcatcatgcacgagacctcgcagtaccacgtccagcacctggccacattcatcatggacaagagcgaagccatcacgtctgtggacgacgccatccggaagctggtgcagctgagctccaaggagaagatctggacccaggagatgctgctgcaggtgaacgaccagtcgttgcggctgctggacatcgagtcacaggaggagctggaagacttcccgctgcccacggtgcagcgcagccagacggtcctcaaccagctgcgctacccgtctgtgctgctgctcgtgtgccaggactcggagcagagcaagccggatgtccacttcttccactgcgatgaggtggaggcagagctggtgcacgaggacatcgagagcgcgttggccgactgccggctgggcaagaagatgcggccgcagaccctgaagggacaccaggagaagattcggcagcggcagtccatcctgcctcctccccagggcccggcgcccatccccttccagcaccgcggcggggattccccggaggccaagaatcgcgtgggcccgcaggtgccactcagcgagccaggtttccgccgtcgggagtcgcaggaggagccgcgggccgtgctggctcagaagatagagaaggagacgcaaatcctcaactgcgccctggacgacatcgagtggtttgtggcccggctgcagaaggcagccgaggctttcaagcagctgaaccagcggaaaaaggggaagaagaagggcaagaaggcgccagcagagggcgtcctcacactgcgggcacggcccccctctgagggcgagttcatcgactgcttccagaaaatcaagctggcgattaacttgctggcaaagctgcagaagcacatccagaaccccagcgccgcggagctcgtgcacttcctcttcgggcctctggacctgatcgtcaacacctgcagtggcccagacatcgcacgctccgtctcctgcccactgctctcccgagatgccgtggacttcctgcgcggccacctggtccctaaggagatgtcgctgtgggagtcactgggagagagctggatgcggccccgttccgagtggccgcgggagccacaggtgcccctctacgtgcccaagttccacagcggctgggagcctcctgtggatgtgctgcaggaggccccctgggaggtggaggggctggcgtctgcccccatcgaggaggtgagtccagtgagccgacagtccataagaaactcccagaagcacagccccacttcagagcccacccccccgggggatgccctaccaccagtcagctccccacatactcacaggggctaccagccaacaccagccatggccaagtacgtcaagatcctgtatgacttcacagcccgaaatgccaacgagctatcggtgctcaaggatgaggtcctagaggtgctggaggacggccggcagtggtggaagctgcgcagccgcagcggccaggcggggtacgtgccctgcaacatcctaggcgaggcgcgaccggaggacgccggcgccccgttcgagcaggccggtcagaagtactggggccccgccagcccgacccacaagctacccccaagcttcccggggaacaaagacgagctcatgcagcacatggacgaggtcaacgacgagctcatccggaaaatcagcaacatcagggcgcagccacagaggcacttccgcgtggagcgcagccagcccgtgagccagccgctcacctacgagtcgggtccggacgaggtccgcgcctggctggaagccaaggccttcagcccgcggatcgtggagaacctgggcatcctgaccgggccgcagctcttctccctcaacaaggaggagctgaagaaagtgtgcggcgaggagggcgtccgcgtgtacagccagctcaccatgcagaaggccttcctggagaagcagcaaagtgggtcggagctggaagaactcatgaacaagtttcattccatgaatcagaggaggggggaggacagctaggcccagctgccttgggctggggcctgcggaggggaagcccacccacaatgcatggagtattatttttatatgtgtatgtattttgtatcaaggacacggagggggtgtggtgctggctagaggtccctgcccctgtctggaggcacaacgcccatccttaggccaaacagtacccaaggcctcagcccacaccaagactaatctcagccaaacctgctgcttggtggtgccagccccttgtccaccttctcttgaggccacagaactccctggggctggggcctctttctctggcctcccctgtgcacctggggggtcctggcccctgtgatgctcccccatccccacccacttctacatccatccacaccccagggtgagctggagctccaggctggccaggctgaacctcgcacacacgcagagttctgctccctgaggggggcccgggaggggctccagcaggaggccgtgggtgccattcgggggaaagtgggggaacgacacacacttcacctgcaagggccgacaacgcaggggacaccgtgccggcttcagacactcccagcgcccactcttacaggcccaggactggagctttctctggccaagtttcaggccaatgatccccgcatggtgttgggggtgctggtgtgtcttggtgcctggacttgagtctcaccctacagatgagaggtggctgaggcaccagggctaagcaattaaaccagttaagtctcccaggagccgtgtgtctcagttctctgggagtcggagtgggtcctggagcccccggaaactgcaccttttctaagcagtgccgggcagag

SEQ ID NO: 512410 - DNA, 645 bp, Homo sapiens
ggggtagaaaccgtagctaacagtgttagttatctaagcaatcagatgttacagggccagccctttagctgctgtggtgtattctgttggtagtgaggtagtaggaccttatagacttttaaattttggaaatggttacaatccttaagcatgtattcttgagaaaggaaatctgtgaaattctgtgtgtgcagtatgccctacaattagtaggcaacgtgtattaaaaacactagtgtggattataaagatatccattaaaagaggacccggaaaacttggtatttcagggcacaaaaagcatgtaaaacacacaaaagcacagtgttacttttgaaagttccaattggtaaaacaccccgatttttcaacattgggcgtgtcgccaacaagggttacctgattgctctgttgaatatgctttaacaaaaaaaagaattttgaccccccacaatattttaaaaaaacttttaattaaatcgggatttaaaaaattttggaaaattttttgagatttacccccaaaagatttccacttgtttaaaaaaatttttagcttttttaaagccccctttaaaaatgtaaaatttaataatggagaataaaaaacctttgtttgtataaaacattttccccatttttgtt

SEQ ID NO: 512411 - DNA, 4113 bp, Homo sapiens
taaaccaggaagccaggtcttgcctgggtcagggcaggcactgggcccgaaggaggagggccacttcctgccagccctccaccgagcccacctatggcgcctccccaggaagtgctccggccagcccagggtaaacacgctagccctgcccctctgggaccatagcccggggacccagactcttggccacgctcattcccacccctacccaggaccggcagccggagccttgggtccctgcatgggcctggggcgccctgtgccccttcacctcgtcctcgtccagttgactgctgtggcagccggtgctacccgctgtgtccactgcaccctggccctgttctgagcggtcacagcagctggggagaagggccatcctggaagccgggcagatgaggacggaaccagacagtcccactgtggtgggcagaggttcctcctctcccggccccgccccggcccggccccgccgagcgtcccacccgcccgcgggagacctggcgccccggccgaggcgcgaacagacggacgcaccggcgagcgccgaggggacaggccgagcgcggggcgccggaggcagcaggaccctcccgagggcctgaccgtggaggtagcactgcacacccactccctgtgggccggagccaggaggcacttcctgggtgtcggagcccagaaggaaaccagtggccgggaagcaccagctgggtgtgggacaggcactggcctcagaccggggccacactgaggtctgcccttctcccgctggccgccacccaagacaccatgagccagtccggggccgtgagctgctgcccgggtgccaccaatggcagcctgggccggtccgacggtgtggccaagatgagccccaaggacctgtttgagcagaggaagaagtattccaactccaacgtcatcatgcacgagacctcgcagtaccacgtccagcacctggccacattcatcatggacaagagcgaagccatcacgtctgtggacgacgccatccggaagctggtgcagctgagctccaaggagaagatctggacccaggagatgctgctgcaggtgaacgaccagtcgttgcggctgctggacatcgagtcacaggaggagctggaagacttcccgctgcccacggtgcagcgcagccagacggtcctcaaccagctgcgctacccgtctgtgctgctgctcgtgtgccaggactcggagcagagcaagccggatgtccacttcttccactgcgatgaggtggaggcagagctggtgcacgaggacatcgagagcgcgttggccgactgccggctgggcaagaagatgcggccgcagaccctgaagggacaccaggagaagattcggcagcggcagtccatcctgcctcctccccagggcccggcgcccatccccttccagcaccgcggcggggattccccggaggccaagaatcgcgtgggcccgcaggtgccactcagcgagccaggtttccgccgtcgggagtcgcaggaggagccgcgggccgtgctggctcagaagatagagaaggagacgcaaatcctcaactgcgccctggacgacatcgagtggtttgtggcccggctgcagaaggcagccgaggctttcaagcagctgaaccagcggaaaaaggggaagaagaagggcaagaaggcgccagcagagggcgtcctcacactgcgggcacggcccccctctgagggcgagttcatcgactgcttccagaaaatcaagctggcgattaacttgctggcaaagctgcagaagcacatccagaaccccagcgccgcggagctcgtgcacttcctcttcgggcctctggacctgatcgtcaacacctgcagtggcccagacatcgcacgctccgtctcctgcccactgctctcccgagatgccgtggacttcctgcgcggccacctggtccctaaggagatgtcgctgtgggagtcactgggagagagctggatgcggccccgttccgagtggccgcgggagccacaggtgcccctctacgtgcccaagttccacagcggctgggagcctcctgtggatgtgctgcaggaggccccctgggaggtggaggggctggcgtctgcccccatcgaggaggtgagtccagtgagccgacagtccataagaaactcccagaagcacagccccacttcagagcccacccccccgggggatgccctaccaccagtcagctccccacatactcacaggggctaccagccaacaccagccatggccaagtacgtcaagatcctgtatgacttcacagcccgaaatgccaacgagctatcggtgctcaaggatgaggtcctagaggtgctggaggacggccggcagtggtggaagctgcgcagccgcagcggccaggcggggtacgtgccctgcaacatcctaggcgaggcgcgaccggaggacgccggcgccccgttcgagcaggccggtcagaagtactggggccccgccagcccgacccacaagctacccccaagcttcccggggaacaaagacgagctcatgcagcacatggacgaggtcaacgacgagctcatccggaaaatcagcaacatcagggcgcagccacagaggcacttccgcgtggagcgcagccagcccgtgagccagccgctcacctacgagtcgggtccggacgaggtccgcgcctggctggaagccaaggccttcagcccgcggatcgtggagaacctgggcatcctgaccgggccgcagctcttctccctcaacaaggaggagctgaagaaagtgtgcggcgaggagggcgtccgcgtgtacagccagctcaccatgcagaaggccttcctggagaagcagcaaagtgggtcggagctggaagaactcatgaacaagtttcattccatgaatcagaggaggggggaggacagctaggcccagctgccttgggctggggcctgcggaggggaagcccacccacaatgcatggagtattatttttatatgtgtatgtattttgtatcaaggacacggagggggtgtggtgctggctagaggtccctgcccctgtctggaggcacaacgcccatccttaggccaaacagtacccaaggcctcagcccacaccaagactaatctcagccaaacctgctgcttggtggtgccagccccttgtccaccttctcttgaggccacagaactccctggggctggggcctctttctctggcctcccctgtgcacctggggggtcctggcccctgtgatgctcccccatccccacccacttctacatccatccacaccccagggtgagctggagctccaggctggccaggctgaacctcgcacacacgcagagttctgctccctgaggggggcccgggaggggctccagcaggaggccgtgggtgccattcgggggaaagtgggggaacgacacacacttcacctgcaagggccgacaacgcaggggacaccgtgccggcttcagacactcccagcgcccactcttacaggcccaggactggagctttctctggccaagtttcaggccaatgatccccgcatggtgttgggggtgctggtgtgtcttggtgcctggacttgagtctcaccctacagatgagaggtggctgaggcaccagggctaagcaattaaaccagttaagtctcccaggaaaaaaaaaaaaacaacaaaaacaaaaaaaaaaaaaaacaaaagaaaacatgtgtgtgcgcggcgcgcgcccgcgcggcccctggagagaaaggcttttaagaaaccacactgcgcggtggggcgcgcgcgggggcccacggggcggtaagggcaaacagtgggcgccagagagggggtgttccacatgagaggagaaaccggggcgccagagagaacaagagggcgcgggggattctctccaccaaactataaaaagagcccgcgggggcgaaaacgcgcgagaggcgtctggcggaacaaaatatccgcagaagaggcgaggactcgcgagagaggccctacagagagggggctctcttcataagagaggggggagtctccagaggaagagcggaaaaatactcaaactagcccccacgggcgggggcacgg

SEQ ID NO: 512412 - DNA, 124 bp, Homo sapiens
aaaaaattatatgcgctttcatttaaagccaaccactagtgcacaatacacaaaatagctacttggagttccattgtgctgaagcacaaatgaatctgactagtaaccacaggcgttgcaggtt

SEQ ID NO: 512413 - DNA, 142 bp, Homo sapiens
  misc_feature (41)..(41): n is a, c, g, or t
  misc_feature (113)..(113): n is a, c, g, or t
aaactaacacagtatgttctagtcagatgtcatacatgaanggatgtacatcagggagagaaataaacacgtctatcaccatccttttggtctgttttaaatccaacgtcttnaagaaacttctgctgcttaagcaagtctt

SEQ ID NO: 512414 - DNA, 2587 bp, Homo sapiens
gcggccgcagaccctgaagtagggcagcgggcggagcggggtcgcagggggcggggaggggaggagcccggcaggggaggggaggagccggcaggggaggggaggagcccggcagggagggagggtcaggtgcgttcccggcggggctgagcaggaccccctcgccctccaggggacaccaggagaagattcggcagcggcagtccatcctgcctcctccccagggcccggcgcccatccccttccagcaccgcggcggggattccccggaggccaagaatcgcgtgggcccgcaggtgccactcagcgagccaggtgggccgaggggctggagggggctccacagggctcgttgtggggggctcggtgagcagccgccgtgtcccccatcaggtttccgccgtcgggagtcgcaggaggagccgcgggccgtgctggctcagaagatagagaaggagacgcaaatcctcaactgcgccctggacgacatcgagtggtttgtggcccggctgcagaaggcagccgaggctttcaagcagctgaaccagcggaaaaaggggaagaagaagggcaagaaggcgccagcagagggcgtcctcacactgcgggcacggcccccctctgagggcgagttcatcgactgcttccagaaaatcaagctggcgattaacttgctggcaaagctgcagaagcacatccagaaccccagcgccgcggagctcgtgcacttcctcttcgggcctctggacctgatcgtcaacacctgcagtggcccagacatcgcacgctccgtctcctgcccactgctctcccgagatgccgtggacttcctgcgcggccacctggtccctaaggagatgtcgctgtgggagtcactgggagagagctggatgcggccccgttccgagtggccgcgggagccacaggtgcccctctacgtgcccaagttccacagcggctgggagcctcctgtggatgtgctgcaggaggccccctgggaggtggaggggctggcgtctgcccccatcgaggaggtgagtccagtgagccgacagtccataagaaactcccagaagcacagccccacttcagagcccacccccccgggggatgccctaccaccagtcagctccccacatactcacaggggctaccagccaacaccagccatggccaagtacgtcaagatcctgtatgacttcacagcccgaaatgccaacgagctatcggtgctcaaggatgaggtcctagaggtgctggaggacggccggcagtggtggaagctgcgcagccgcagcggccaggcggggtacgtgccctgcaacatcctaggcgaggcgcgaccggaggacgccggcgccccgttcgagcaggccggtcagaagtactggggccccgccagcccgacccacaagctacccccaagcttcccggggaacaaagacgagctcatgcagcacatggacgaggtcaacgacgagctcatccggaaaatcagcaacatcagggcgcagccacagaggcacttccgcgtggagcgcagccagcccgtgagccagccgctcacctacgagtcgggtccggacgaggtccgcgcctggctggaagccaaggccttcagcccgcggatcgtggagaacctgggcatcctgaccgggccgcagctcttctccctcaacaaggaggagctgaagaaagtgtgcggcgaggagggcgtccgcgtgtacagccagctcaccatgcagaaggccttcctggagaagcagcaaagtgggtcggagctggaagaactcatgaacaagtttcattccatgaatcagaggaggggggaggacagctaggcccagctgccttgggctggggcctgcggaggggaagcccacccacaatgcatggagtattatttttatatgtgtatgtattttgtatcaaggacacggagggggtgtggtgctggctagaggtccctgcccctgtctggaggcacaacgcccatccttaggccaaacagtacccaaggcctcagcccacaccaagactaatctcagccaaacctgctgcttggtggtgccagccccttgtccaccttctcttgaggccacagaactccctggggctggggcctctttctctggcctcccctgtgcacctggggggtcctggcccctgtgatgctcccccatccccacccacttctacatccatccacaccccagggtgagctggagctccaggctggccaggctgaacctcgcacacacgcagagttctgctccctgaggggggcccgggaggggctccagcaggaggccgtgggtgccattcgggggaaagtgggggaacgacacacacttcacctgcaagggccgacaacgcaggggacaccgtgccggcttcagacactcccagcgcccactcttacaggcccaggactggagctttctctggccaagtttcaggccaatgatccccgcatggtgttgggggtgctggtgtgtcttggtgcctggacttgagtctcaccctacagatgagaggtggctgaggcaccagggctaagcaattaaaccagttaagtctcccagga

SEQ ID NO: 512415 - DNA, 1078 bp, Homo sapiens
tacgccaaattctagtccacctcaatcacactactccccatatctaacaacgtaaaaataaaatgtacagagttgacagagtacaagaaccacacgcccagttcctccccacactcatcgacccttagcaggctactcctagcctatgctccccttccagtactgtaataatcgtatgacataaaaacaaggaaatcatatacaaacaggaagatccaaggtgcgggcgccgactagtgcgacattgagagaaccaccgtccctctagtaggacccaactgggcgtggaggacgccgcgcgggcacccacacactaggactacacgggaacacccgtgggcccacagaagcgtgtacccaaaagaaagaaaaaccgggggacccaggagcaacagaggcggggcgggtattccccccccacaataaaaaaagccgcccggggggggcaacccgaaggcgtcctggaaccacaacctcccaaggaggggctctcgcgggagggcacacaacggcgggctcctaccacaaccgggggcggcccacacgagaaggacaaaacatacaattaaacccccggccgccgggggacggctaccaacagtcacacgtacgacgacgcagcagacacaccacccacagacaaaccatgcgacaccaaccacagcagcaaccgcagccacgccagcacaagagacagcagcacagcgaacaccaagggacggagaagccgcagcaagcggcgcagccgagacagagacaacgcgagacaacggcccagcgaaaggcgccaggacacgccgccgcaccgacccgcggacgacgaccccagagccgcgacagcacgaaccacgaaaacagccaccgagcgagcgcggccgcgcagccgcgagcagcgcgcaccaccaccgacgcgcccggcgccacgaaccagtacacgccggcgcagggaacggaagagacggagagagacaccccgaacgcgacagacgagcgaaaacgataggccaacgacgccgaccgactaggcgcacctgacacgcgcggaggcagggacacgacaacagaggtgtatgaacaa

SEQ ID NO: 512416 - DNA, 1589 bp, Homo sapiens
gctgcctgcagcctctctccacggtgacctccagaacagaaaagaggcagccagtcgtgcacctgggaagctgctgccccccagccactgcccaggtctcagaggagacccccaccagactgggcctcagcccctcctgttcctcacaggggctaccagccaacaccagccatggccaagtacgtcaagatcctgtatgacttcacagcccgaaatgccaacgagctatcggtgctcaaggatgaggtcctagaggtgctggaggacggccggcagtggtggaagctgcgcagccgcagcggccaggcggggtacgtgccctgcaacatcctaggcgaggcgcgaccggaggacgccggcgccccgttcgagcaggccggtcagaagtactggggccccgccagcccgacccacaagctacccccaagcttcccggggaacaaagacgagctcatgcagcacatggacgaggtcaacgacgagctcatccggaaaatcagcaacatcagggcgcagccacagaggcacttccgcgtggagcgcagccagcccgtgagccagccgctcacctacgagtcgggtccggacgaggtccgcgcctggctggaagccaaggccttcagcccgcggatcgtggagaacctgggcatcctgaccgggccgcagctcttctccctcaacaaggaggagctgaagaaagtgtgcggcgaggagggcgtccgcgtgtacagccagctcaccatgcagaaggccttcctggagaagcagcaaagtgggtcggagctggaagaactcatgaacaagtttcattccatgaatcagaggaggggggaggacagctaggcccagctgccttgggctggggcctgcggaggggaagcccacccacaatgcatggagtattatttttatatgtgtatgtattttgtatcaaggacacggagggggtgtggtgctggctagaggtccctgcccctgtctggaggcacaacgcccatccttaggccaaacagtacccaaggcctcagcccacaccaagactaatctcagccaaacctgctgcttggtggtgccagccccttgtccaccttctcttgaggccacagaactccctggggctggggcctctttctctggcctcccctgtgcacctggggggtcctggcccctgtgatgctcccccatccccacccacttctacatccatccacaccccagggtgagctggagctccaggctggccaggctgaacctcgcacacacgcagagttctgctccctgaggggggcccgggaggggctccagcaggaggccgtgggtgccattcgggggaaagtgggggaacgacacacacttcacctgcaagggccgacaacgcaggggacaccgtgccggcttcagacactcccagcgcccactcttacaggcccaggactggagctttctctggccaagtttcaggccaatgatccccgcatggtgttgggggtgctggtgtgtcttggtgcctggacttgagtctcaccctacagatgagaggtggctgaggcaccagggctaagcaattaaaccagttaagtctcccagga

SEQ ID NO: 512417 - DNA, 1602 bp, Homo sapiens
ggcgtccggagagcgctggtggtagggaggcttctcccggttctgtgagcagcaggaccctcccgagggcctgaccgtggaggtagcactgcacagccccacttcagagcccacccccccgggggatgccctaccaccagtcagctccccacatactcacaggggctaccagccaacaccagccatggccaagtacgtcaagatcctgtatgacttcacagcccgaaatgccaacgagctatcggtgctcaaggatgaggtcctagaggtgctggaggacggccggcagtggtggaagctgcgcagccgcagcggccaggcggggtacgtgccctgcaacatcctaggcgaggcgcgaccggaggacgccggcgccccgttcgagcaggccggtcagaagtactggggccccgccagcccgacccacaagctacccccaagcttcccggggaacaaagacgagctcatgcagcacatggacgaggtcaacgacgagctcatccggaaaatcagcaacatcagggcgcagccacagaggcacttccgcgtggagcgcagccagcccgtgagccagccgctcacctacgagtcgggtccggacgaggtccgcgcctggctggaagccaaggccttcagcccgcggatcgtggagaacctgggcatcctgaccgggccgcagctcttctccctcaacaaggaggagctgaagaaagtgtgcggcgaggagggcgtccgcgtgtacagccagctcaccatgcagaaggccttcctggagaagcagcaaagtgggtcggagctggaagaactcatgaacaagtttcattccatgaatcagaggaggggggaggacagctaggcccagctgccttgggctggggcctgcggaggggaagcccacccacaatgcatggagtattatttttatatgtgtatgtattttgtatcaaggacacggagggggtgtggtgctggctagaggtccctgcccctgtctggaggcacaacgcccatccttaggccaaacagtacccaaggcctcagcccacaccaagactaatctcagccaaacctgctgcttggtggtgccagccccttgtccaccttctcttgaggccacagaactccctggggctggggcctctttctctggcctcccctgtgcacctggggggtcctggcccctgtgatgctcccccatccccacccacttctacatccatccacaccccagggtgagctggagctccaggctggccaggctgaacctcgcacacacgcagagttctgctccctgaggggggcccgggaggggctccagcaggaggccgtgggtgccattcgggggaaagtgggggaacgacacacacttcacctgcaagggccgacaacgcaggggacaccgtgccggcttcagacactcccagcgcccactcttacaggcccaggactggagctttctctggccaagtttcaggccaatgatccccgcatggtgttgggggtgctggtgtgtcttggtgcctggacttgagtctcaccctacagatgagaggtggctgaggcaccagggctaagcaattaaaccagttaagtctcccagga

SEQ ID NO: 512418 - DNA, 455 bp, Homo sapiens
  misc_feature (55)..(55): n is a, c, g, or t
  misc_feature (58)..(58): n is a, c, g, or t
  misc_feature (74)..(74): n is a, c, g, or t
  misc_feature (95)..(95): n is a, c, g, or t
  misc_feature (185)..(185): n is a, c, g, or t
  misc_feature (221)..(221): n is a, c, g, or t
  misc_feature (224)..(224): n is a, c, g, or t
  misc_feature (234)..(234): n is a, c, g, or t
  misc_feature (246)..(246): n is a, c, g, or t
  misc_feature (250)..(250): n is a, c, g, or t
  misc_feature (257)..(257): n is a, c, g, or t
  misc_feature (271)..(271): n is a, c, g, or t
  misc_feature (278)..(278): n is a, c, g, or t
  misc_feature (290)..(290): n is a, c, g, or t
  misc_feature (294)..(294): n is a, c, g, or t
  misc_feature (299)..(299): n is a, c, g, or t
  misc_feature (306)..(306): n is a, c, g, or t
  misc_feature (310)..(310): n is a, c, g, or t
  misc_feature (315)..(315): n is a, c, g, or t
  misc_feature (333)..(333): n is a, c, g, or t
tgatggggcacagggcccaatgtccgcaaggcaccctgaggaaggcgcgctcaantgntcagtgcaggagaccntcggggtcaccaagccttgcncccccaaggccaaagcaaaggccaaagccaaaaaagggaagggaaaggtttatccgccaagcttggatgccaaggagcccctggtgtcanatggggcttggcccacgccctccctttcccaggccnganatgtgacccnccagggcctttngttngctggtnagctttaatcaatnaggcccngccttgtccctntcantcccnagccccncccntaagngcccaaagtggggagggncaagggattttgggaagcttgagcctcccccaaagcaatgtgagtcccagagcccgcttttgtttttccccccaattccattattaagaaacacatcaaataaactgactttttccccccca

SEQ ID NO: 512419 - DNA, 218 bp, Homo sapiens
tatcgattagcttgatcagctgtacaggatgccggctacttggctcatcttggagcgcaggtaagtgtgtaggctctggcgccattcagataaagacaccagacgactggagaagctctcgatgtatatcaatgtcagtggcagatatgtccatgcccagtgcaggacctgtgaggcatccagcaatagccttatgcatttggcccaatccttgtcca

SEQ ID NO: 512420 - DNA, 237 bp, Homo sapiens
cctttttaaatctttcctctctttcttgaagccttaaatgttaagactaatgtgtaaaaaccccgtttgagcttgcttttccctttggaccctttgcttttgattgcctatccctataaggggctccttttactgttttttgatcctgggggccttatttttgctatgttaaggttgtgttttttaaaacttggattttttttcatatacttccataacccgtggtgtttgcccata

SEQ ID NO: 512421 - DNA, 1793 bp, Homo sapiens
  misc_feature (1757)..(1757): n is a, c, g, or t
taaaccaggaagccaggtcttgcctgggtcagggcaggcactgggcccgaaggaggagggccacttcctgccagccctccaccgagcccacctatggcgcctccccaggaagtgctccggccagcccagggtaaacacgctagccctgcccctctgggaccatagcccggggacccagactcttggccacgctcattcccacccctacccaggaccggcagccggagccttgggtccctgcatgggcctggggcgccctgtgccccttcacctcgtcctcgtccagttgactgctgtggcagccggtgctacccgctgtgtccactgcaccctggccctgttctgagcggtcacagcagctggggagaagggccatcctggaagccgggcagatgaggacggaaccagacagtcccactgtggtgggcagaggttcctcctctcccggccccgccccggcccggccccgccgagcgtcccacccgcccgcgggagacctggcgccccggccgaggcgcgaacagacggacgcaccggcgagcgccgaggggacaggccgagcgcggggcgccggaggcagcaggaccctcccgagggcctgaccgtggaggtagcactgcacacccactccctgtgggccggagccaggaggcacttcctgggtgtcggagcccagaaggaaaccagtggccgggaagcaccagctgggtgtgggacaggcactggcctcagaccggggccacactgaggtctgcccttctcccgctggccgccacccaagacaccatgagccagtccggggccgtgagctgctgcccgggtgccaccaatggcagcctgggccggtccgacggtgtggccaagatgagccccaaggacctgtttgagcagaggaagaagtattccaactccaacgtcatcatgcacgagacctcgcagtaccacgtccagcacctggccacattcatcatggacaagagcgaagccatcacgtctgtggacgacgccatccggaagctggtgcagctgagctccaaggagaagatctggacccaggagatgctgctgcaggtgaacgaccagtcgttgcggctgctggacatcgagtcacaggaggagctggaagacttcccgctgcccacggtgcagcgcagccagacggtcctcaaccagctgcgctacccgtctgtgctgctgctcgtgtgccaggactcggagcagagcaagccggatgtccacttcttccactgcgatgaggtggaggcagagctggtgcacgaggacatcgagagcgcgttggccgactgccggctgggcaagaagatgcggccgcagaccctgaagggacaccaggagaagattcggcagcggcagtccatcctgcctcctccccagggcccggcgcccatccccttccagcaccgcggcggggattccccggaggccaagaatcgcgtgggcccgcaggtgccactcagcgagccaggtttccgccgtcgggagtcgcaggaggagccgcgggccgtgctggctcagaagatagagaaggagacgcaaatcctcaactgcgccctggacgacatcgagtggtttgtggcccggctgcagaaggcagccgaggctttcaagcagctgaaccagcggaaaaaggggaagaagaagggcaagaaggcgccagcaggtgcaggggacagggacggggccggcaggtgcaggggacggggccagcaggtgcaggggacagggacggggacggngccagggacatccatgggggctactcatggaggctg

SEQ ID NO: 512422 - DNA, 1457 bp, Homo sapiens
taaaccaggaagccaggtcttgcctgggtcagggcaggcactgggcccgaaggaggagggccacttcctgccagccctccaccgagcccacctatggcgcctccccaggaagtgctccggccagcccagggtaaacacgctagccctgcccctctgggaccatagcccggggacccagactcttggccacgctcattcccacccctacccaggaccggcagccggagccttgggtccctgcatgggcctggggcgccctgtgccccttcacctcgtcctcgtccagttgactgctgtggcagccggtgctacccgctgtgtccactgcaccctggccctgttctgagcggtcacagcagctggggagaagggccatcctggaagccgggcagatgaggacggaaccagacagtcccactgtggtgggcagaggttcctcctctcccggccccgccccggcccggccccgccgagcgtcccacccgcccgcgggagacctggcgccccggccgaggcgcgaacagacggacgcaccggcgagcgccgaggggacaggccgagcgcggggcgccggaggcagcaggaccctcccgagggcctgaccgtggaggtagcactgcacacccactccctgtgggccggagccaggaggcacttcctgggtgtcggagcccagaaggaaaccagtggccgggaagcaccagctgggtgtgggacaggcactggcctcagaccggggccacactgaggtctgcccttctcccgctggccgccacccaagacaccatgagccagtccggggccgtgagctgctgcccgggtgccaccaatggcagcctgggccggtccgacggtgtggccaagatgagccccaaggacctgtttgagcagaggaagaagtattccaactccaacgtcatcatgcacgagacctcgcagtaccacgtccagcacctggccacattcatcatggacaagagcgaagccatcacgtctgtggacgacgccatccggaagctggtgcagctgagctccaaggagaagatctggacccaggagatgctgctgcaggtgaacgaccagtcgttgcggctgctggacatcgagtcacaggaggagctggaagacttcccgctgcccacggtgcagcgcagccagacggtcctcaaccagctgcgctacccgtctgtgctgctgctcgtgtgccaggactcggagcagagcaagccggatgtccacttcttccactgcgatgaggtggaggcagagctggtgcacgaggacatcgagagcgcgttggccgactgccggctgggcaagaagatgcggccgcagaccctgaagggacaccaggagaagattcggcagcggcagtccatcctgcctcctccccagggcccggcacgacatactcttcccagaattcccctttggaaaggggatcactctagagtcaa

SEQ ID NO: 512423 - DNA, 294 bp, Homo sapiens
aggcaacactaacattaagaaatacatgcagacatgggcttcaggagtaactcaccaatgactgtagactcatttataagcagagaaaatagccaatctctttccctccaaccccactagctggagaattaatctatcataacgctaaagaaatcactatctttgggagaaaggtaggttgcctttaaataaatcagttgaccactgagtaaagggggaaagtccttgactatctggatgtttcggggactagacttcaggtaagcgtaatggaaagggaggtgtgttaggcca

SEQ ID NO: 512424 - DNA, 637 bp, Homo sapiens
  misc_feature (1)..(1): n is a, c, g, or t
  misc_feature (79)..(79): n is a, c, g, or t
  misc_feature (92)..(92): n is a, c, g, or t
  misc_feature (154)..(154): n is a, c, g, or t
  misc_feature (161)..(161): n is a, c, g, or t
  misc_feature (168)..(168): n is a, c, g, or t
  misc_feature (203)..(203): n is a, c, g, or t
  misc_feature (228)..(228): n is a, c, g, or t
  misc_feature (290)..(290): n is a, c, g, or t
  misc_feature (377)..(377): n is a, c, g, or t
  misc_feature (455)..(455): n is a, c, g, or t
ncctcttccccgggcggcaagggtgagagtgggagccagtgggggaaatgccaggcacttttaacaccatcagttctcntgaaagctcactntcatgagaatagcatgagggaaactgcccccatgtttcattttcctaccacaacacctgggnattttgnggttttnctttcaagatgagacttgggtgggggtacatccanaccatttcattccatttttggctgnaatttacttcaggcaatggttattttctttgttcaaagtccattgatgctttgagattctgngcttttttctggtttggaaaacagactttgcatctccatctccattggatgtttgctgcctcctgtgatgttccaggaatgccatgnttctcccaagtccacagtgcacatttgccttaaagtgcctgctgcaattttctggtcgtcggctcccaccctggctangccaacacaaagtgtctcctcggtaactgctggttcttctcctcgtattctttgattttgaacaatctccgggggctgctgggctgcttggtttacactcatataccgtggaggttcatagatcttccttcccttgattagattttccaaagactgctcctttactttgatgtctagtaaac

SEQ ID NO: 512425 - DNA, 1303 bp, Homo sapiens
  misc_feature (1114)..(1114): n is a, c, g, or t
taaaccaggaagccaggtcttgcctgggtcagggcaggcactgggcccgaaggaggagggccacttcctgccagccctccaccgagcccacctatggcgcctccccaggaagtgctccggccagcccagggtaaacacgctagccctgcccctctgggaccatagcccggggacccagactcttggccacgctcattcccacccctacccaggaccggcagccggagccttgggtccctgcatgggcctggggcgccctgtgccccttcacctcgtcctcgtccagttgactgctgtggcagccggtgctacccgctgtgtccactgcaccctggccctgttctgagcggtcacagcagctggggagaagggccatcctggaagccgggcagatgaggacggaaccagacagtcccactgtggtgggcagaggttcctcctctcccggccccgccccggcccggccccgccgagcgtcccacccgcccgcgggagacctggcgccccggccgaggcgcgaacagacggacgcaccggcgagcgccgaggggacaggccgagcgcggggcgccggaggcaggtgtgggacaggcactggcctcagaccggggccacactgaggtctgcccttctcccgctggccgccacccaagacaccatgagccagtccggggccgtgagctgctgcccgggtgccaccaatggcagcctgggccggtccgacggtgtggccaagatgagccccaaggacctgtttggtgagtgaggtttgagaacgggctggacgtcacaggggagaaatgggcactgcatccaggtgggggacagctgctcctgccccacagctgtgcctggtctggcccaggggatctccgggtgcccagggaggcctctggaccctaatcaaccttccgaaagctcctggccactggatcccctcccccacacccgtaaggggagaggcctttactaataattcagggagcatcaatattgattccgctgcactcattgctgtaacctgatcacagcgaggttcaggcaggataagccgccaggtgtctgctccaggaggggggtcccagcccggcttcttcccactctgagagcttgncagcttcactctccctgccctcccaggtcttctcgctttccagactaggcaccttgtccaaagacataagtgaagggtgcatctagctagcgagagggcaggtcgtctctggggaagggcagagtggggggagtgtggtggctgccaggcaccctcctggaggggtacgaggcccgaattcgtatcatg

SEQ ID NO: 512426 - DNA, 959 bp, Homo sapiens
taaaccaggaagccaggtcttgcctgggtcagggcaggcactgggcccgaaggaggagggccacttcctgccagccctccaccgagcccacctatggcgcctccccaggaagtgctccggccagcccagggtaaacacgctagccctgcccctctgggaccatagcccggggacccagactcttggccacgctcattcccacccctacccaggaccggcagccggagccttgggtccctgcatgggcctggggcgccctgtgccccttcacctcgtcctcgtccagttgactgctgtggcagccggtgctacccgctgtgtccactgcaccctggccctgttctgagcggtcacagcagctggggagaagggccatcctggaagccgggcagatgaggacggaaccagacagtcccactgtggtgggcagaggttcctcctctcccggccccgccccggcccggccccgccgagcgtcccacccgcccgcgggagacctggcgccccggccgaggcgcgaacagacggacgcaccggcgagcgccgaggggacaggccgagcgcggggcgccggaggcagcaggaccctcccgagggcctgaccgtggaggtagcactgcacacccactccctgtgggccggagccaggaggcacttcctgggtgtcggagcccagaaggaaaccagtggccgggaagcaccagctgggtgtgggacaggcactggcctcagaccggggccacactgaggtctgcccttctcccgctggccgccacccaagacaccatgagccagtccggggccgtgagctgctgcccgggtgccaccaatggcagcctgggccggtccgacggtgtggccaagatgagccccaaggacctgtttcccccacagagagagcgtcaccccacagaagagcgtcaccccacagagagagctcgggatcctctagatcaccg

SEQ ID NO: 512427 - DNA, 352 bp, Homo sapiens
  misc_feature (124)..(124): n is a, c, g, or t
gacaaacctcatctatttcactgctttgtccacatcgacaatgacccactactcggaacagttccctactccccaccgccctctatggtgcgtctcccccgaccccttggtttgcatggccccncgtgtgccagtctggtccaagctcacctggtcaccatcaccactctcagcaccctagtcacccaaattctcagagcctcagtttcttcatcttaatgatcctacaagtcctgtcagtctcacaggactcagtgaggttgtgttcttgaaaaccttccgtgggctgcctcatgccacatgggtgaaatggtcaccttgagaggatgagtggaagggcctgctgtgttct

SEQ ID NO: 512428 - DNA, 629 bp, Homo sapiens
tgtccggactgagatgtctgagatagggcaggagctgagaggctgggactaaatattttatttttatcaaaggtggagtctatgccttgtcgcccagggtggagttgcagcagtgcgatctctgctcactgcaacctccgcctcctgattcccagcaattctcccacctcatcctcctgagtagccgggattaccggcgcgtaccaccaggcggtggaaatgttgggaatcattgaggagagacagggtttcaccatgtatcgcaggctagtcctcgaactctggacctcaaagtgatctgcctgcttcggactcccaaagtacggggataacaggccttagctactgagcccggcccaatactcaattccaaccattgccatcttgtcccctggcactgctttgggggcagctgtgacctcggtggcttgaagctcaagcatccttcttagtcataatctcacttgagtctcctagcagatttgaaccccattgattcctccctcctcaaaaccatctttccttggcttctggtggcatcttaaatactttaacttgccttcctccctctggttgcccctcatagcctctctgtcatctcctctggtgtctgtgatgtttgtgccctc

SEQ ID NO: 512429 - DNA, 1533 bp, Homo sapiens
taaaaaaggttatgcctcaaagtttacagggggggaaggtgcacctacaaataaagaaagccaaaaaaaaggggggggaaaaagatcagggggggaaaaaccgaagggtccgatatatagacgaggcatgtattcccagagctcgaacgcacatcgggagccgcaataaggcgcaaaagaacgaaaccagtgagagggcacacaacggaggagaaaagaaaaaacagggtgagacaccccgaaaaataaaaaatgggcgcaaagagccagacaggccgaaaaacagagagaacaaacaaacaaaggcagaacaagaaaaacaacaacaaaaaacatcagagcgacaaacacacaaacacacgcccgaggagagatacaacagcgaacactagggcgcactgagccacctgattccaccacacaccaacttacaccgtgcacagcacccacgacagagcacacgagaaacacaaacaggcaacaacaacaaatagagcgcggactcacaaacacaacagagaccaaccacagagaccagaaacacggaaatgcaaaaaataaaccaccccacgagagaaaaacagataagcaaggaagataaacaacaagcagacacagaagctcacaagccacacaaacatcacaggcaaccacaacatctcacaacagacacactacaatcacacgaccaaaaccgcgagaaccaacaggccacacaggcccagccggccagcagacaactactcagccagcccgcgcaactacaaaacagcccgcgaccacgacaccacccagtacgagcagcaccacgcgagtgtcgcacgacaacccacaaccgaacgagagaacgactacgattccaacccagataaatgatagacagcactgccaacaagacaagccacaacatcagcagagacacaaaaaagcgagaaaagcaggagagggcagccaaagacaacaagacgagacatgcaaaccaacgacaggaacagaacaccaaccacgagaagatatcagacactacaaacaccgtaaaacgcctcaagaccaaggcacgaccagaagaaacaaacaacaccggcagggagaacacaaacaagcacgaacacacaagcagacaaacacgaacgaagactcgaacaccaagaccgacaaacacacaaaaaaaaaaacgaaagaaagagagagaacgaacaatagagaagaaaaacacagacgaaagcgcacgagtgcgacaaacaacacacgacaagaagaacagcgagcacagagacaaagagcgacgaaagcaggcaactagaagaagataaaagcaagcagaaaacaacgagaaacgagactaggcgagcagacgcgaatgagagacgacggagagcgcaacacaacgatgcagaacgtacacgacaagcagaggaacgaaggagaacaccaacaaaaccaagacaacgaaacagaagcacagagcgacgaaaccgaggcagcgcagcgacgagcctaacaccaacgctgcacaccgcccgacctccgcct

SEQ ID NO: 512430 - DNA, 1004 bp, Homo sapiens
  misc_feature (25)..(25): n is a, c, g, or t
  misc_feature (64)..(64): n is a, c, g, or t
  misc_feature (96)..(96): n is a, c, g, or t
  misc_feature (107)..(107): n is a, c, g, or t
  misc_feature (116)..(117): n is a, c, g, or t
  misc_feature (170)..(170): n is a, c, g, or t
  misc_feature (196)..(197): n is a, c, g, or t
  misc_feature (200)..(200): n is a, c, g, or t
  misc_feature (203)..(203): n is a, c, g, or t
  misc_feature (207)..(207): n is a, c, g, or t
  misc_feature (226)..(226): n is a, c, g, or t
  misc_feature (229)..(229): n is a, c, g, or t
  misc_feature (253)..(253): n is a, c, g, or t
  misc_feature (258)..(258): n is a, c, g, or t
  misc_feature (261)..(262): n is a, c, g, or t
  misc_feature (321)..(321): n is a, c, g, or t
  misc_feature (327)..(327): n is a, c, g, or t
  misc_feature (337)..(337): n is a, c, g, or t
  misc_feature (356)..(356): n is a, c, g, or t
  misc_feature (372)..(372): n is a, c, g, or t
  misc_feature (375)..(375): n is a, c, g, or t
  misc_feature (385)..(385): n is a, c, g, or t
  misc_feature (417)..(417): n is a, c, g, or t
  misc_feature (427)..(427): n is a, c, g, or t
  misc_feature (434)..(434): n is a, c, g, or t
  misc_feature (455)..(456): n is a, c, g, or t
  misc_feature (465)..(465): n is a, c, g, or t
  misc_feature (475)..(475): n is a, c, g, or t
  misc_feature (480)..(480): n is a, c, g, or t
  misc_feature (482)..(482): n is a, c, g, or t
  misc_feature (504)..(504): n is a, c, g, or t
  misc_feature (513)..(514): n is a, c, g, or t
  misc_feature (547)..(547): n is a, c, g, or t
  misc_feature (557)..(557): n is a, c, g, or t
  misc_feature (593)..(593): n is a, c, g, or t
  misc_feature (796)..(796): n is a, c, g, or t
  misc_feature (884)..(884): n is a, c, g, or t
  misc_feature (896)..(896): n is a, c, g, or t
  misc_feature (932)..(932): n is a, c, g, or t
  misc_feature (1004)..(1004): n is a, c, g, or t
ttgaaatagtcaaaagatgagaganaatttgtatcatttctattcccttttctgtaaccaagangaaggccaaagtggtcttaggaaccttttgtnttcctgatganttcttctanngagtcccactgctccttggagacctttctcaggtcgttgaattcccctgaaanaagtacttcctctccaccgtcaaaannaangantgcnccattaatccaagaagcanaancactacaaaggaaagcagcaaganttgcnagnncttctacagtccccaggcgaccacagggaattctgccaatcatttctttctcaaatgtnccagtngggtccaganggctaaaggcacctttggnttttataggccctggntgngtcacattgnatcgcattccatatttaccccattcagctgcnggggggttgntcatggnttccacacctgctttgggagnngcacttggnactacaaaanctgancnagtttcagcatagatagtagtnatagggagnnatgctgctcctttctgtgctttaattagttgtnttccaatttntagtgttacgaaggctgtgccatttagaactatgtnagttatggttttccaagcattaggagaaagtttttcagtaggagaaataaaattccctgctgcattgtttatcacaatattaggatgtcctgcaactttgatcagttctgacacagtgttttgaaccatatcaggatccctcacatcacactgaattgcatgaaccttatttccagtttgagaagaaatttgttctgcggtantttcaaaacatccatcttccggctggctatcacgcactgagcacctaggctggacagaagagttgtcattcctttaccaaggccagtncctcccccagtnatgaatgccacttttccttgaaaactattaggtggnagcatcgctttttgaagaggtgaaagaattaagattgcaaagcttcagtgttttgatatatatttttgtccn

SEQ ID NO: 512431 - DNA, 340 bp, Homo sapiens
acagtttttttaagctttataacgcactctctgcccttgacatactccaaccttcacacattgactattgtgaagaaatatattgtgggcacagacccatgcgcgtctgcacctacatcaatgaattgtctactttaatgcacttatcttttatacactttccctccaagtcttcattttgcacgagctgttgagcagttatctttagcataatatgaacaaacgttgctgtcactgccttgtgacagagcacaacatgtttagtagattattcggtgtaggattttcttttaatgtactttttttctttgggggcttttctttattattaaattatttc

SEQ ID NO: 512432 - DNA, 932 bp, Homo sapiens
taactatgcactagacgttacgctattgggggacgacttgcaaaggtgtgggttgttgcgacaggtggttctgcgacaccgtgtggggatctactgttacagcgcctgtgcgtcataccgggtggtcaagctggtgtacgacgcgcgtgcatggacctgatcgagggggacaaagtggggtgcccgtaataaagcgctttcctggggggatcgcggggaccccctgtggtgtggttcggcgatcccgggggacggctgtgtccacccccctaggtgactaccattgttctcaacgggccaatccactccccataaaagtgttgttgaagaggccctcccgtcgaagaacaaggatggttccgggtgcagggtgggatagaaaccaaatggggggtgaacggggggcattacccaacgtggcgtgatcattgatccgacggggggtgcgttgtaagtccagagatggctagtcaattatgcttgaatggggggggatgaatgacaggcacggatttatgggccccgcctgggaagaacccccggggccggtctctcctcgacagtagagacccccattgttaagcaaacttcatcgtccagacagagtcctccccgaatggagtggaagaccctcagacccacccccggtggggagaccccacacaaggtgatgaaccttttgcacaacgacctttttctgaacaaataacttacctgtatcaaacgatgcttatatgcacgcaagaaagaatataatatcttccactagtctgaccacaatgaccgcttcgcagagctctctcccttcgcctgctttaataacctcacgaagaaccccactttctgtgagaactcctagacccatttatgatggtgaatccctttcaaccatcttcaaaaacccacttttttcatccaaacacaaacataac

SEQ ID NO: 512433 - DNA, 581 bp, Homo sapiens
ggagaaccagtaccacatacccgttaggtaataaggtgtccatgcagaggatgacggtcagcggagataagcagggccagtctcagtggcccgtgagtacgaacactgtgggacaattgtcaaaggagcgggggacgggcaaattcacctagcaggttgctaggaagtttagaaatatatactgtaattcagacactcagcttctgatctgagtatagggtgaattgatggaggggcatacgctagtgatgacagagctcgcctcctacaaggaggagaatgttgcaaaccgtttgtccccttcccatacctgggactatatgatttcttagccctccaggggacttatgagtagaaatacttgaagccaccaagtctagacttgatggtgtccaagaataaataatactgattgcctcccgtaggtccttggtccagctaactcagctgttgtataattgaagggattcaacaaaattatctctagcatcaggtgctagacatggttcgaatctcaccagtggtttagtgacttggtagatacgctataacggtaaggtagataagtacaatgactgcta

SEQ ID NO: 512434 - DNA, 337 bp, Homo sapiens
atgactacggaggaggttctatgccacttctgtgaccctggactactttaggaaattcacgcactgagacgatcatgggctggagaaaatgtacgctgacactgacaccactttcgcaggtacaggattaatctctcctaaaaagtaactgggccattcctttcagtgacatataaatcgttacaggcgctatgtacagattgattttacaaatcaaacctttactcaattatttaaaacgagcaaaaagagagtggaagaatgcgcgagactgctacccaccaccatttgtatgtgagtgacagcaactgaatacttctttactgagacgaatcct

SEQ ID NO: 512435 - DNA, 449 bp, Homo sapiens
gctcacttccattatccctttatcttttttttactctatgtatttatttgtatgtgggttcacgaatgccatagaacccgtggtcagagcatgcatggttgggcatcagttatcctctaccatgtagatcctaaagatcaaactacatcactaggagtggcaacaagctgtctccctcacggcccctcagtctcactttgaaggacccgacagcagcgtagctcggggttattggataagaagatattttcattgaagaatgaaacagaagagttgttttaatccctctgaaagtcacttctccagagcttggggggcaactctatggtaaagtgcttgcttagcatctgcaagacacagggttcaattcccagcaccacaaacaacaacaaaacaaaacaacaaaaagcagaaagtcacccctgtctatttttatactgggtcgacgc

SEQ ID NO: 512436 - DNA, 700 bp, Homo sapiens
tctggagatggagtctcactctgtcgaccaggctggagcgctgtggtgcgatatcggctcacggcagtctccacttccggggttcaagcgatcctcctgcctcagcctcccgagtagctgggactacaggcgaggcgtcaccataattttggtattttaagtagagacattgtttcgccatgtgggctgggctggtctcgaactcctgacctcaagtgatctgtccgggcctcccaaagtgtggggataacaggcgaaagccaagcgctcccggccaggaacaactttagaatgaaggaaatatgcaaaagaacatcacatcaagggatcaatataataaccatctataaatgactatatgtgggctcattatgactatttcccaagcattctacgtgtgacggcttgaaaagagttgttggtccttgcatggtggagaggggagaagggccaggactctctaaggtggactcaatctgggggtaatgacttcccaaattagccaccccgggccccaccaggtcctttaatggggctcgtggattggaaaattctttacccatgtgattgtccctggtctctccaatagtgggccaacagttgcccaacaggtatgctcacaggttaagtatatcccacgacgagaaccgggggctggattctacaaagggggggctgcctattctccgaggaacaaatg

SEQ ID NO: 512437 - DNA, 310 bp, Homo sapiens
  misc_feature (120)..(120): n is a, c, g, or t
  misc_feature (255)..(255): n is a, c, g, or t
  misc_feature (283)..(283): n is a, c, g, or t
  misc_feature (299)..(299): n is a, c, g, or t
cttcaatgggtaaaggctttaacagcttgttttattcatactggggattaattacttgccacaaaacaaactgtctcgataattttcctcttgggtttggcagtgctgtagccttgcagncctttaggagggagcgctcccatccgtccttccctttgctttgtgtgaccacatgctttctgtaccattcacttacttgggaaagaagtggacttatctcctaattgttttagaattttgcttgtctatttagcnttcctttttggatctcatgatttatggnacaataaatgtcatgnaaatgctgaaa

SEQ ID NO: 512438 - DNA, 318 bp, Homo sapiens
tgggccatagctgattcctgagggtaaacctacgtcagcgagagcggaaagcatgctcgaagttgttaccaaccttaaaaacagcgtcacagaattcgtattatggctgcaaagtcaaatcatttcatctcctatgttgagctttttacaatttacagtagcatttacaataatatgagacgttttacctgtgacaaaataaacttccacaagctttattttgatcccatgagataaatgaaaaaaaatattatttgaattaattgattttctgtttaaaacacctggtaatactaacataaaactggaataatttat

SEQ ID NO: 512439 - DNA, 327 bp, Homo sapiens
ctctctgaaacacctgtctgtgtttgtcctctttcctttttgggggtgtgtttttcttgttaacatttattaagtaggcactcggctgggagcagtggtcacacctgtaatcccagcactttgggaagccacggtgggtcagtcgcttgaggccaggagtttcagaccagcctggccacaacagtgaaaccgcatctctactacaattacaaaaaattagctgggcatgtttggctcatgcctgtcatcccagctactcaggaggcctacggcgggagaatcacttgcaacctgggaggcagaggttgccggtacgcagggcatcat

SEQ ID NO: 512440 - DNA, 806 bp, Homo sapiens
tggaaaaagtctggggggccagggggtgggttggaaaccagcttgggggggttcgatcccttccttttgggtctaaatttaatgtataggggttcttcgaaggtgtgggtaggggggggggatccatatagtcactccggggttatagggagggttcttcatacatattaggacttttcgcttcgaagcgaaggcttctcaaattcagtgaacacttttcaatatctacggcgtggtagagaaagtgaagtgagcctacagatgactaaggagtgtcacagggttgggtgtagttgcatcggggtagtccgagttaacggtcggggcatcccggaatagggccgaaaaaggtgtggcgggcaaacaacgcggtttagcagtctccccccgagtccaattagtgattacggtgcacacgggactcttcggggcgatagcgcttgggccctaggggtgctacgccggtgacgaatatacggggcgaacactccagcatgaactgggaaccccgtcccatactgacgttggccaaccaccaagcgcgcaaaccggatgaggggcaacatcagtgggcaacggtcgacgcatcaacaaagggacacagcaacgtgagtccagcgcgtagcacacagcagcgtccccaccgcgatagcacgccacgggcaaatcacaccaagggcccagtcacgagggccccccaacacgtggcgaccaccgccacaacagggacacccccagcggggaccaagaagccacggccaggcaccaatcccctccactccacggctacccccggcccattccgc

SEQ ID NO: 512441 - DNA, 515 bp, Homo sapiens
  misc_feature (10)..(10): n is a, c, g, or t
  misc_feature (36)..(36): n is a, c, g, or t
  misc_feature (105)..(105): n is a, c, g, or t
  misc_feature (110)..(110): n is a, c, g, or t
  misc_feature (118)..(118): n is a, c, g, or t
  misc_feature (154)..(154): n is a, c, g, or t
  misc_feature (156)..(156): n is a, c, g, or t
  misc_feature (160)..(160): n is a, c, g, or t
  misc_feature (166)..(166): n is a, c, g, or t
  misc_feature (183)..(183): n is a, c, g, or t
  misc_feature (193)..(193): n is a, c, g, or t
  misc_feature (200)..(200): n is a, c, g, or t
  misc_feature (231)..(231): n is a, c, g, or t
  misc_feature (306)..(306): n is a, c, g, or t
atacgatcanaggcgaaggttacggccccccttgantcgacggtatcgatagcttgttatcgaattcgcggccgcttcgaccggctgcgagaagacgacagaggnaggantggccgcntggccaattcatcgacacggggccggttgtccatcncngagnttgccnaagccagcaactcctcntcgcttgggnccgggantccctgcccaagccccagcttgaccccatcnttcctcttggactcagagttggtgtggcttacctggctatactcttcatcctccccacctcctggggaatgatgntgtggccaggcagttatagattaaaggcctgtgagtactgctgagcttggtgtggcttggtgtggcagaaggcctggcctaggatcctagataagcaggtgaaatttaggcttcagaatatatccgagaggtggggagggtcccttggaagctggtgaagtcctgttcttattatgaatccattcattcaagaaaatagcctgttgcac

SEQ ID NO: 512442 - DNA, 201 bp, Homo sapiens
ggttgacagcatctggaaggagaaggcagttgtacttcgggcagtggagtgaactgtgtgcgtgcctgaggaagagggccgggagcgtgaggtcgggccctgtcactgacacgggcactggaggaggagcaggaggcacgtgaggagctggagcggcagaaccgggccctgcgtgctgagctggaggcacttgctgagcag

SEQ ID NO: 512443 - DNA, 176 bp, Homo sapiens
gccggtcgacagtctgagtactatggtttagaaatttgtttgaaatcaagtaaccaagcttggaaacaactcttgggagcgggtagaagactacagtccagaattctagaaattttctcccatgcagacctgtggacacctagtgaaaacggagctggcttcctgtatgtctcagg

SEQ ID NO: 512444 - DNA, 159 bp, Homo sapiens
gaggtgacactactgcgtgctctactaggggaggctggcacattagatgtttgtgataatttcataatttggaccatttttgccttaagaaatatgaggattcttctgcttgggcaacaaggttgttgtaaaacataaaagcattaaaacaaaaaaaca

SEQ ID NO: 512445 - DNA, 329 bp, Homo sapiens
ctactactactatattcacgggcggcggacgaaagaatttcccccttatagcctaggctggagtgcaatggcgcgatcctggcccacggaaaacgccaactcctgggttcaagcagattctcccatcccagcctcacaagtagctgggattacaggcacgcaccaccatgcccagccaatttttgtatttttagtagagacgggatttcaccatgttgggccaggctcgtcttgacctcctgacctcaggtgatccacccacctcggcatctcaaagttctgggattacaggcatgagcaccacgcctggcgaggtcgacgcggccggc

SEQ ID NO: 512446 - DNA, 148 bp, Homo sapiens
actgttggagtgtgtcgtgtgtgtctgtgcatgtgcacatacgtggtgcacaggagaattgcagttaacactgttttatgcccttccctttcccatccctgtggaacctatgggactgtgccaggttacagatgctcttcctgcaaat

SEQ ID NO: 512447 - DNA, 872 bp, Homo sapiens
  misc_feature (26)..(26): n is a, c, g, or t
gggcccacacgccttaagggggtgtntgataaacaagttatcgcaagtgcggtgtctgacgtgaggtgccaaagccgcttaagtaatcaggtgaacgcacactcgtttgaatgggaaaggtattgaggactgacatggatgtatgataatggacggtgtactcgcatgagggagtttgatgggccggcacaacattggcccatcgcttgccgctggcgtggtccgtttgtactgtactcgcactcgcgactcacacgacactctcgcacgtagtaagtttgaatgtgttggccaccgcgcacggtatacagacacatacgctctgaacgcagtgttgttgtgatatacccggccttcgtaagttgggtgctgtcgacgcccttcgccgtgcgctgtcttcgctctctctcttggtggagggcgttcgtatcgtctccgcgccggtcatgtatccggggagttgtttcatggccgcgcgcaatgggcggctcgcggttttttcgctgagctagtgtgtgctcccccgagaagattgcacacactggcggctgtctactcttcgcttcgccctcgttctctttttcgtactccgcccagttcgcaccgcctgtctctttaatcgcactcgacgcttctgtgcactctgcgtcccgctcattggtattatcccctcccttctcacacagattaccccactagtgtagacaggactatgattattagaaggactccatttgaacaacaacccacacatgccccccgccactattctcctccacgacacacttcttgccccctctactcgacgccgtttacttattccttgtttcccccctgtaataataagaatcttgaaacatccatatccaaaa

SEQ ID NO: 512448 - DNA, 384 bp, Homo sapiens
atgagatcaggagctggatggttttcctttgtcgagaagactgaggaagatggtaagtgaacaacaacagaatatgccgtattgagtgagggacgtgatcaggctctggcctgtctgacagaactcattctcaccaataatagtctcgtggaagtgggtgatctggaccctctggcctctctcaagtcgcggacttacctaagtatcctaagaaatccggtaaccaataagaagcattacggatggtctgtgatctataaagttccgcaagtcatagtactggatttccagaaagtgatactaaaagagcgtcaggaagcagagaagatgttcaagggcaaacggggtgcacagcgtgcaaaggatattgtcaggggcagatga

SEQ ID NO: 512449 - DNA, 662 bp, Homo sapiens
attggcacgcgcaccggcatgtacggcaaccagggcccggagagcagggaccggctggggagcatcaagcatgctgtgaggggcatccaggtctaggccgtgtggtacccagaagtgtcccagcccaccacaccgtttacctccctcgccctgccccgcaccgtggggatgcccaactcacagtgacttcccgtttggggcccggtgtggccgcgggcgggtttatccaaagggatggctggaaattggccgctcccacgaggctccctccatgcttggggccgaggtggccctatctgtgtgcatatgggcactgaagaattacaaagtgatttattttttatttcaaaagaaatctcaagagcagctcaaagtcttcatttggaagtttaatggacaaggtttttaggtaatatttcggattttaaaccatattattctctaatcttttaaggcttgttagggtattccatatcttttttgcttgttgtctttatattattttattttttttctcaattatttgacatttttttttttatgttatctattgactctccatactttatttatttattatattctaatatctttattaatagtttattttattaataatatatcattcttatatttattattttttataacataatctttca

SEQ ID NO: 512450 - DNA, 111 bp, Homo sapiens
atcttactatgaatccaagagttctaataggatactgggccctctggagaaatggccctgctgatcccattagttaggactctagttagctgctgtggctcatcgctgcag

SEQ ID NO: 512451 - DNA, 568 bp, Homo sapiens
agcggagagttccgctgttgtcgtccaggctggagtgcaatggtgcgatcttggctcactgcaacctccgcttcccaggttcaagtgattcttctgcctcagcctcctgagtatctctgggattatgacacccatcatcacggctggctaattttgttttttttgtttgtctgttctgtttgtttgttgttgttgttgtttgtatttttactagagaccgggtttcaccacactggccaggctggtctcaaactcctgacctcaaaagatctgcctgccttggtctcccaaagtgctgggattacaggtatgagccacacacctgaccacacaacatacgagcaaacgagtgacgtaaagctaggtcgtaaggcaggggtaagaactgcgcacgagacgcagacgcgctcaagaccagtcgacgcgaaagcgaccagctacacggaacgacaagacgacgaaaacagcactgaagcactcatccatgcacgacacagtactactcacaaaacagcactcgaacacatgcgaacactaagcacacaaaaagtcatgaaccaaacctggg

SEQ ID NO: 512452 - DNA, 115 bp, Homo sapiens
agacccgaatggacgacagagcctcagaaataggtctcacatctatcaacctctgatcttgagcaacttgacacaaacaagaagtgggggaaggttccctatataatacataggg

SEQ ID NO: 512453 - DNA, 412 bp, Homo sapiens
  misc_feature (24)..(24): n is a, c, g, or t
  misc_feature (407)..(407): n is a, c, g, or t
  misc_feature (409)..(409): n is a, c, g, or t
  misc_feature (412)..(412): n is a, c, g, or t
caacatccctgttgatttccatcnaaattcctgtgcagccagcctttttaatttgaagtaatcctgaagtcatcctattttttcctttgctttcccggggtttgagtttaaatcataaagtcactgcccagctgggtgtggtgattcatgcctgcaatcccagcattttgggaggccgaggcaggtggatcacttgaggccagtttgagaacagcctggccagcatggtgaagccccgtctctactaaaaatacaaaaattagccagacttgatggcacacacctgtggtcccggctgcttgggaggctgaggcaggagaattgcttgagcccgggagatggaggttgcagtgagctgaggttgcaccaatgcactccagcctgtgcaaaagaacgagactctatcncnacn

SEQ ID NO: 512454 - DNA, 170 bp, Homo sapiens
agtatagcagcagagtctgtgcattagtctccaacagatctcaggttgaggggcggcagagagcacatgctgctaccacgcttttcacacagtcatgtcaggctcccgggcatgaggctgagggctccctgctggatctgaggtgctctccaggtgggtggtgagagcgc

SEQ ID NO: 512455 - DNA, 644 bp, Homo sapiens
ttgctggctccaccagacgatggagggtcgacccagcttctgatgagcatggtcattgctgtgtcttactgccaatcctgtccctgattagttgcttgcttcagtcaccaataacagaaggcgtggcggccacccgagcgtgcttgaacaaataccagagggagggtgctgaggctcacttagtggatctatcagacatgtgcgttccaagcgagctccaggatcagaatttacacgactgcgctgggtcaatgttcaccattgataaggttgtgcgccagtgtttgaggatagcccaaggaatcaaggttcgtagtagccgtacataaagatatcccacaggcttgtcttgggaaagtccgatgtacactcagtgtcacgggaaccagcttgctatccaaaacaatattattcacgcaaccaccgtcacactattcgttgtaagcgaacaccaaaggtgacgacactggattcaatatcacaacggacgcacgactgctgtggccattacacagaacacacactcagccagcacgttagacaaaaggaccctgcgaagcccagtgagggacccaggttacttccaaaggcctaatatgggactcccatggccttactaccacacgctggttgtgcgtgtctaa

SEQ ID NO: 512456 - DNA, 477 bp, Homo sapiens
ggactaccgtggtagctttggcgcttggcgctttcagcataggtactgctattcttacaagtgctctacctcagtaaaggttgaggggatccaggccttctcatggaactctggtatttagctggattgtagctggaaggagaatgcacattgccaacataacaaaacaggcgctgggcttactgagttccttcgccaaaacccaggaatgtagacttgttctcatttcctcattttatactcctgtgaggaattcttggggctgcataaagtgattaacccaggagccagctccttggcgtgtcgggtagagaggccaggcttaatgagtgtactttctcctgccttgatctcaaggagctcagcaaagtcgtttgtgcaaataaagtatacagtggaaaccactgtttactccattggattaggctaaaccagattgtaaaaggcagatgggaaaaataaaaaataaataaatct

SEQ ID NO: 512457 - DNA, 256 bp, Homo sapiens
gtatgatatgagcggagtagtagatactgcattcatggagtgggggggggtaacagtattttaattttaaaacaaataacaagtaatggttgtcaagattcccatctccccaactttatttgtcgcattggttttcagaaattttaattttttaaaaatcagatgccttttggaagttgtatgtttatctgagcaataactaaattttatttcttcttcggttgtggaggtgtgttaaatttgaagaagataatat

SEQ ID NO: 512458 - DNA, 380 bp, Homo sapiens
tttttactcaaaccttgtggggcctatagactctcctgtgaagtatctggattcagcatcgatgcttacaaattgaattgtgtgtcctgtcagcctcgagggaagggactggagtgggtcgcatccatctatagtcgcaggggttatgtaaactacgcagagcgcttttaagggcagtgttcaccgtctccggaggcttccccgaggcgtcagtttatctcccaatgaacttcctgagagacgacgacacagcggtctattattgtgtgcgacaaggaatacaacattatgactatcgtttggacgcctggtgccaaagggaacaaccggtcgtcgtctcgtcaggaataccccgaccagccccaaggtcttccccgctg

SEQ ID NO: 512459 - DNA, 170 bp, Homo sapiens
ccttctacgtctcatcactgaagtctcaccacctttaaccaacagacatgacctgctggaacaattatcttgtactgatcccatgtggtggcaggctcgggctgcagggcatgggagggtggtcgtctggacagtgctcatggatgcccgcagtgatgagacgtagaagg

SEQ ID NO: 512460 - DNA, 106 bp, Homo sapiens
  misc_feature (1)..(1): n is a, c, g, or t
ngccggtaccgacacatgcaggtgccttgcagaaacaaagtcaggttcttcaagtcacaaagggaagggcaggaacaaatcttgcctctcagtcccacacaaggca

SEQ ID NO: 512461 - DNA, 263 bp, Homo sapiens
ggtgggcgacgaccctttacaacccctacaagtctctgacgacaacccttattacagactactacgatacttatgaaaggcccagtacctgggggcaggtaccggcccggagtacggcactggcttacttccagctacggatctcccacgacctggatggccagacccactactatcatccagcgcttccacgctacgtgcacgaagatgtccatgatacaacctgcagtatgcgcggcgtgagcgagaacgtgtctgggcca

SEQ ID NO: 512462 - DNA, 305 bp, Homo sapiens
ccaccctaaaattaggttttaaaaggctttttaaaaatcacaaacactggggccgggcgtagtggatcacacctgtaatcccagcactttgggaggccgaggcgggcggatcatgaggtcaggagatcgagaccatcctgactaacaaggtgaaactccgtctctactaaaaatacaaaaaattagctgggcgtggtggcgggcacctgtagtcccagctactcaggaggctgaggcaggagaatggcgtgaacccgggaggtggagcttgcagtgagccaagatcgcgccactgcactccagcc

SEQ ID NO: 512463 - DNA, 312 bp, Homo sapiens
  misc_feature (11)..(11): n is a, c, g, or t
gacgactgacnccccgggtggctgcgtgtatgtgggttagcgtggtctgcatggttctagagtgaaacaggtgtcaggcggtcactggttcacacaaatttttcataagaaacatttaccaggggagcatcttgggactctcggtttttaaaaccttctgaaccatgactgggagccggcagagtaggctgtggctgtggccttcagcacaaccatcaacttggcggttcaagaaattacaggtttccgtccattccaaggtggtaaatgctagtctttttttttttttttttttttttttttttttttttt

SEQ ID NO: 512464 - DNA, 977 bp, Homo sapiens
gcttcgcaatgcttgcataaatggttctgtgagccataagtttcaattcaggaacttggatacaatcggatgtagcctgtagcacttgtgactctcttctgtttcgtgaactgcgagtggaacaggaatctctgttgacagcttttcgctgtgagcctgcagttttataggcatcattgcctcacggaattgaaaattcccagatctatctgttaggtctgcatgcttttcccgagaactgttttcgtcatcgcttaagtcatccggcacaagaaaccattgttgcactactctctctaactggatgtcttggttgttacgatcccctttaatcgatgcaaagaatgaaagatctggaggagaacctcaatattgcaattgatgtcatagatgcttaccaagaaagcatcctgaatcagagtgggcgtttcttgattattactgacctctttgcgtgaaaaagtcccgagtacatcggtactgggccatgtttcccaaactgaaccaatcaagaccagagttaccctgttgagaccttatgatagtccaagtataacgagtgatgagccactcatccatggatgacgactccctgtgtttattcgcggcatgctgagttgacttgcatagcaccttcgtggatcagtgcaagactgtgctcaagctggcctctgaggagcctcctgatgatgagagaggcgctggctacaccttaggctgtctcaagcgtcctgttgcgaaaatgaattgtgagtactagagctgctcggtatctggcaggttttccctggcttgctggaaagagtgattgatctttttgcagggtgattcatgtagctcggaagaaaggaaaccgaaacccttctccagttgaatggtggttgcgatgacacccgacagtgccatctccaatgttgccaaaggtgttaagattctcatgcctcaccgttggatcgggaactctggtcccagaatta

SEQ ID NO: 512465 - DNA, 472 bp, Homo sapiens
  misc_feature (158)..(158): n is a, c, g, or t
  misc_feature (160)..(160): n is a, c, g, or t
  misc_feature (266)..(266): n is a, c, g, or t
  misc_feature (268)..(268): n is a, c, g, or t
  misc_feature (307)..(307): n is a, c, g, or t
  misc_feature (328)..(328): n is a, c, g, or t
  misc_feature (394)..(394): n is a, c, g, or t
agcccaggacccagctgctgaatgactctcgcctgcctgccccccaaactctgatgactggagatgactttcttcgtggctgagagcgtagggagccatgtgtggggcccccggagcctttgcttctgtggggagcgggcacacagccccctctgcananccagtccgggctggcagggtgtctcagacaggctgctgacaggcatgaagcagagctgtgggacaggtgtccaggggtggccccagggtccatgtgtgtcttcaancnatctgcgctcttcaccgcaggcttcataccttttgtacntttatacgtggactgcagacnactttgtgggagggcagtgacatatcagcacacagactcgatggctcgtgatattcctggtgacancctggaggctctcacactcgaggggaagagctgttagttcataaaacctgctggaaaaaaagttccgaaaaactgtta

SEQ ID NO: 512466 - DNA, 140 bp, Homo sapiens
caggatacgacgcttgatgttgtgctgtgtacttgctgtatgttctccatgtgagcaagattgaaatgtaagcttttatttattattttagaatgtgacataatgagcagccacactcgggggaggggaaggttaggtag

SEQ ID NO: 512467 - DNA, 320 bp, Homo sapiens
caaggactaaagcctttgttcatagaaatttgaacatgtaggccaggcacggtggcttacacctgtaatcccagcactttgggaggccgaggtgggtggatcacttgagtccaggagtttgagaccagcctggccaacacggtgaaaccccatctctactaaaaacacaaaaattagctaggcgtggtggcgcatgcttgtaatcccagctactggggaggctgaagcagaaggatcacttgaacccaggatggggaggctgcagtgagccaagatcatggcactgcactccagcctgggcgacaaagctgactctgtcc

SEQ ID NO: 512468 - DNA, 703 bp, Homo sapiens
cctatgccgcagacctgatttaggccaggcctgcgagaattagaggatgacggccaccaagatggaccgattgctcaaggtcatgaggatcacagttactgacggataactatctcttgtccctgcctatcaaggaatcaacgagcattgctatcatgctactagactctataaaggatgaccgactgacgatcatgccagtgcagaagcagagccgagcctgacagctaaccaggttcatggcatctgttgctatcagctacaacaatgttcacgtgcctctggtacacaagggctgctaggatgtggacatctgcatccctaaggacatgatcctgcccaagctctacatcgtcatgcgcgcagagatatactagagcaacagagcgtaaagtccgacactagcccttgcaagatgacgggctactacaggatctacgctgctaacgatcagccatgccatcaattgtaacagcaattggcttccccaaattgccctaagatacttatcaaacagtctgacactcaaaactgattcaacctatcactgatctcactcgtcattatggcaaacttagcaaagcccccttgcaaccatgtctaaacccacatctacaagctcctaggccctagaagcacccggattcaactttactcttacaagtcaatcccctcttagatcactatcgccgtctcctccccg

SEQ ID NO: 512469 - DNA, 248 bp, Homo sapiens
  misc_feature (28)..(28): n is a, c, g, or t
tcactcttggtcttgtccattctatggntcttaacaaccaaatgatgacatgtattcaccattatggtatcatgcagaatagtttcactgacctaaaaatccactgtgcttcactcattcatccttcctctcccttctaacctatggagatagtaaaaaattgatctttttactgtctctatagttttgccttttccagaatgtcatatagttgaaattgtatagtaactagcctttttcagattggg

SEQ ID NO: 512470 - DNA, 168 bp, Homo sapiens
  misc_feature (13)..(13): n is a, c, g, or t
  misc_feature (44)..(44): n is a, c, g, or t
  misc_feature (51)..(51): n is a, c, g, or t
  misc_feature (65)..(65): n is a, c, g, or t
  misc_feature (68)..(68): n is a, c, g, or t
  misc_feature (90)..(90): n is a, c, g, or t
  misc_feature (95)..(95): n is a, c, g, or t
  misc_feature (137)..(137): n is a, c, g, or t
  misc_feature (149)..(149): n is a, c, g, or t
gggctttggcccncccatttttactattggccaaaccctttttntaggaangggctttttttggnacncatttttacccattttacattntaaancagggtaagttgtaaattactgttttttatgtccaaggaccnccaataaatcanatggaaatttatatttata

SEQ ID NO: 512471 - DNA, 165 bp, Homo sapiens
tccactcttctgctcaaaaccttcccaaagcttgttccctcactcagagtaaaaaaaaaaagaactcagccaggcacggtggctcacgcctgtaatccgagcactttgggagtccaaggcgggcaggtcgcctgagttcaggagttcaagaccaacatggccaac

SEQ ID NO: 512472 - DNA, 126 bp, Homo sapiens
aaggttgagtctcagcaggcatcccggcacaggcaagtcagcaatttcattggtgcagtcattcaagcagcgggtgccagccgtccatggtgggtcacggcagctcggcaattcggtcaatccatg

SEQ ID NO: 512473 - DNA, 1372 bp, Homo sapiens
gccgtgggcagcctgctcctgcatggcccaggccagacagcgtggtcctggagtaggctgtcctgggctccacagcgcagatcctgtacggacctggacctgacgtcacagcagggaggtgcctggtggaagcgcgtcaacacccttatgacactacaatgtcctgggatggagccaccctcatcctgtccaaggtgggggtctcccagcagccggacggacagacatgcaggacctgactggaggagcgccatgccctcctggacggacgtgagaaccgtggtgtggcacctggtgcggacgaccgacgaggtggacgagtggccagtccaatgacgctggtctgcgtcgacaagacgaacgtgacgcggaccgaacgtgccatcaccgacgatctacgctgacgcggctgctctcagctcaaggcgcccactgcagacagtcatatgtaggacaacatctctatccacgaggcgctgctaggccgccatgtggccacagctgcgtgcacaccttgacaagtacaaagtacacttcttcggaactatcctggggaccgagcagtgcagacgaagcaccaaaatcacacaggcatgacagcacacccatcccaccttcttgcgacacacaccgacaccaagtattaccgactcccggtacttgggctagaacatacctcccaagaacacacaccaacttccatcctattagacagtgcactgtaccaagacggcagggtaaggcacggctacgccatggtcacagtacacaaccgaacgcaaggcaacatacccgtggcaatgccatcgtgaccagccgccaacgggtagccactcacaccctgagagcccgccagaacaccgtcccagagacacgcaagcactggctgacacacgccagagagacactttcacaacgctatacaacaaacgaatggatgagagcgaccacctacgaacagaggcactaccggcgccacacatgagctgacagcgaaacaggacccaccggacgacgaccaccgacacgacgagggacagcgaaaatacagagcaagaccagaagctactacgtaaacaccaagcacgcaaccaccccaccacaccaacaccaaattagcctcaagaacacaaaaataatcggaatacaccacttgtctgaaaccactccactccacacaaaccgaccatatacacaaaaccattgctgtcgctcacacatccaaacaaaaaagctcaaagaataattactttcaatacaaaccacaagccaacgcatgcaccacaacacacaccaactaccacacaccactcaccgtcatcatctctaccatcgcgttcatatcacatgcatacctctacaacccaacctg

SEQ ID NO: 512474 - DNA, 293 bp, Homo sapiens
tcaatgacttccttaattgtaggtcaatgaaatactttgcttactttatatttaagagatgtaccatgttaaagaggcgtcttgtattttcttccatttgtaatgtatctgatttatatatgaagtaagtcttgaaactgtccatggtatcctgcgtgcatttgtgagccaaagagaaaagattaaacttagtgagacctgtatttatattagagtgcccttaaaataatgactttaagacctttactgtctgtaagagaattctaagattgtacataaagtcatatatattg

SEQ ID NO: 512475 - DNA, 377 bp, Homo sapiens
gcgatccccagattacgtcacctagacggcaggcccatcgtatcatctctctcaggatcaacatagattcatgtgttcattcatctcaacgacagcatggcccatgttttcattccgtttctgacttggaaagagccctggcgttcattcatctcaagacagcatggcccaggtgttcattcatctcaagacagcatggccaatgtgttcattcatctcaggatggcatggccgatgtgttcattcatctcaagacggcgtggccgatgtgttcattcatctcagaacggcatggctgatgtgttcattcatctcaagacagcatggccgatgtgttcattcatctcagaacggcatggcccaggtgttcactcatc

SEQ ID NO: 512476 - DNA, 221 bp, Homo sapiens
ctgaggtgactctagaggttccgctgatccgcttagaatatatgcttccttaatgtcccgcttacgtcctggtcgatgcgctggatgtgctcagatgacctcttgccttctccttcatgatctggtatcttccgcgggtttttcaactatcatttccctcagtgttccaggaggactgaccacatacgggcccccggatgttcatgtggcatttcccttgt

SEQ ID NO: 512477 - DNA, 331 bp, Homo sapiens
  misc_feature (16)..(16): n is a, c, g, or t
  misc_feature (46)..(46): n is a, c, g, or t
  misc_feature (310)..(310): n is a, c, g, or t
tgagacagagtctcgnctctattgcccaggctagagtgcagtggcnaattctcggctcaccacaacccctgcctcccgggtgcaagcaattctcctgcctcagcctccggagcaactgggactacaggcgcatgcagccctgcccagctaattttttgtatttttagtagagatggggtttcactatgttggccaggctggtctcgatctcctgacctcgtgatccacccacctcggcctcccaaagtgctgggattacaggcatgagccatcgcacccagtcatttgcttttttatatactagaatgancaactgggaatttgaaatttt

SEQ ID NO: 512478 - DNA, 363 bp, Homo sapiens
  misc_feature (8)..(8): n is a, c, g, or t
  misc_feature (323)..(323): n is a, c, g, or t
gacggagnttgctgtgtcccccaggttggagtgcagtggatgatctcagctcactgcaagctccgcctcctgggttcacgccatgctcctgcctcagccgcccaggtagctgggactacaggcgcccgcaacacgcctggctaattttttgtatttttagtagaaacggggtttcaccgtgttagccaagatggtctcgatctcctgacctcgtgatccgcccgtctcggcctcccaaagtgctgggattacaggcatgagccaccgcgcccggcgaaacttttgcaattttcaaacatgtttttttccaaagtaaaccaatnaattcgaactcaaaggttccatatcatcattaagctttga

SEQ ID NO: 512479 - DNA, 499 bp, Homo sapiens
taaacaaaaagggagtaggggtctggcaatgtggtccaggctgacggggcctcaagtgacccaccttagcctcccaagcagctgcattaacgggcacaagccagggcttcgggctctctatctcttgattctgcggctgcttaatggacttaattctcaggcttctcaccccatatgcccccgtgcaattccggagtttggggggactcagggtttaaatcatcaaagcacccaggtgggctcctaaaaaaagccctgtgagtggcttggctgggacccatcaacagtgtccagagacgactgacagactatccaggagatgagtggccagatgtgcccacttctgtggtaccgggagaccggggtcacttgacatgcagcccaggcacgacaggacaagcccgtgttcggtgacctcacagccagactcggtgggacacccgcggggacgggggctcccgggcaacaggctggcgggggtcccggaaagaatccccaa

SEQ ID NO: 512480 - DNA, 975 bp, Homo sapiens
ggcattggagtggttacctacgctgcaccctggaggcgctgcggactgttagctattgtggggcgcagactcgggtctggcatgcatgcgcgccttttgtgttgcctgtagtctgtgttcagtatcttcgtatacccatgcttgtgcctgtgtaccccgctgttcggggttggttgcacccccgcccctggggcgatgattgtgacccacacctggggttctcccaacacgggattgtgttccgtcagcacacccactgtcaagatttggtgcctctcccagagttgggagttaatggtcgcccgcccccagtgttccagaagtccgcaccagcattttctgccccaaaacaattttgtcagggggaccccaacccttttacaatggggttggagatccctaaacattcttatggaacgtggggctcccccccaaccggggttgattatatttcgcggccccccccaatcgggcgtctccaatcacggcgcacccactattctgggacgacgctcttgccattcgcgttggctataaatggcggcggaaactcttccacccactcattcctgacgatgtctatcagatagaacaatgtgggatgcattttctaattataactacagatggtaccactgacgacctttttgttgggtccccccgcagtagcacgcggcgttgagcccctagttgataatgacaatgtgtatgtctcctggggtagcccccagcacacgaatcgtgtttaatcagcccccccctggacaccaccctgggtaaccctactccctccccttttctccgcggtcccccctgttgtctgaaactgcttgtttatggtggcccgaaaacttgtgagctgtgctaatagcttgacgatctcttgtttttaagaaagatataattttggtaaaattatcctccccagaaatctcttaaaaacaaaagttttttttaagcccccatatccaaaat

SEQ ID NO: 512481 - DNA, 910 bp, Homo sapiens
gcccgccgttagggtgctccccccgcgagtttgccggcgcggttggttgccccggaatgaattgtggaagaccactctgtgggggccgataaagaacgagccaaagagaagtgctccggatgggggttcatttatttcagtcagagcggaaaaagaacttgttgtgtatgcagaccccaccgtggcttctgtttgggttcgtaaacagagagagccgtgttgcagtgatgttctgttgccccccccccagcagtggcggtcgcacccccacacgaatgtacagagcgagagcattaattagagaggctgtttctccccacagacagcacccaccctgcagatgtactgcactgtgtgtgtcagctcacccgcggagaggaacccgagagacaaagagacctctctccagcgaggtcgcatgaagagagagaggagagcgagagagaggggaaaaaagtgagcttcggcgtgatggaagacacccccctcccgcagagatgaagaggaccacgcgtgcgagaaaggaaactccgcgagccaccgcgggcgtcggtgtagttggtggccgagctattctataaaagcaacacacgtgcgacccgagcactcgcccatccacctactgcctctcggtgttacagtcctcaccactcacccctgcacattactcataggattaacccccaccccacccacgcatactgacttctacgtgacaacgttccactcacgacttctttcaataaagacatacgccaccatttgtcgccacacaccacattacacaagacaagaacccactctgaaaactccagtcgtatgctccccacagaagtcgattgaacagacagagactcatgcaacacaacagtacagtactaagcaagaacattatccgaccccatcacag

SEQ ID NO: 512482 - DNA, 123 bp, Homo sapiens
  misc_feature (119)..(119): n is a, c, g, or t
acagacaggtgagaaagaggtattgcagtgggagggagggaaagtggcgggagaatgagatggaggacagctgccctcgtcagaccctaaacctgcacttcttatgatattacttttangtaa

SEQ ID NO: 512483 - DNA, 1036 bp, Homo sapiens
gaggaggggccctgcccccagccaagagggccaagaagccagaagaggcgtcagagagtagttgaggagggatcttgaaagtgaggatggaggccccatgcagggacacgaagccatggtaaatgtgcctctgaaaaaattctccagtgtcatgagctgcctcatgcccactgccaacggggacccctgtggaaatggcggctaccccgagcaccccactgcggaatgtgcaggggcatgtaagcctcaccatgacacaatgtgcagtggagagccagcagcgaggactcacgatgatgcaagacatgcgagggacgtcatcatagacaaggtgacgcgacggagaactgcccacgctgcctaactggccccttgcctttcaagggctggaatgggcctccagtgagaaaaacccgtcatccagtgtctcggacgcttgcgcatcaatgaccacaccatggcacaaaagtgggcaggttccccgcaccagtgtggaaaacctgggacatgcattgccgcccgatgctgcccaccccctgttgggcgacacgaccaccggtggacccttggccaaggttaggccccatctgggccccaaggcagtgcggaccccgccgggcgcaggggcacggggaccaatcggcacacgcaaagccctaggcccaagccgggaacgcgcacaccccgccgggccacaggggacagcgagaggaggcaagggaccggcccaatgcgcaccaacgtgaccgcaaccccaccaatacgaccgaggaccacacggggacccacaccccgcaaagggttcccaacgaaacgccgcggaccgcaccgaggcgccgcacggtgcgccacaacaacgggcaggtcgcgcccaccccacgggggaacaccggggagcgctgtgcgcccgacggccaacgcgcttcacactataacgaacgacacccagggtggcgccattggcaaccacggagccacgaaggagacaccacaagggaggcggaaggaaaccagcgaggagcacggaggcgaacac

SEQ ID NO: 512484 - DNA, 577 bp, Homo sapiens
  misc_feature (134)..(134): n is a, c, g, or t
atcctagaggatcccagctgactctggatcgcaaggcagtacagcataaaacggtagttaaaacgcagtggccacatataatcagatacgtcattggtgctgaataccttgtgatattgccgcatcccaattancgaaggttgcgcatattccacacaacctaccctcagaatcgcctctatcactacgtagtaatcacgccagcaccacttaacaacagactggatcgaacaccaatatgaccaagcctgccaatcccgcaaaaacacaacaacggtttggccccaaccccttgaagaaagagattaaacgcaatagaaaacctgattttcctctagaaccacatcacagaataggaaattaagaatcctcaggagatatgagccataagaaattcttatctatggaaaacacgcaaaaaaacgccggaagcaggtacttccggcgttacgagaacgatctctaatgagaccctagattacagaacctgaacttggtcagcctgcatacctttctggccttgcacagcaacgaaagaaactttctgaccttcctgaagggacttaaatgggtaccg

SEQ ID NO: 512485 - DNA, 315 bp, Homo sapiens
  misc_feature (45)..(45): n is a, c, g, or t
gagagagcccgtctgaatgggcagcaccgcctgatacttgggcgngaggctcaccggctccggctgctgcaggctcccccccaatgccggcttgcttggtggccgggggcggacagggcaagggtaccgaaccgccccagctctcttcctgcctgccgtgggcctgcctcggccgggagtaacaacgccccggccttctgccccgcagccggccggggaaggcgcggtcccgcctgtgaggaggccagcgggggccccggtccttgagcttacggtgccgggggaggaagtggcttcggtcgcccaggctcgtcc

SEQ ID NO: 512486 - DNA, 218 bp, Homo sapiens
gatgtgagtgaatacccatgccagcgcgtaatgaccaggaatacccaaccaacacgagactgaccaggaataccccaatccaacacgagactgaccagtgaataccccaatcccgtgcgcgagactgaccaggtaatacccacaacccgtgccatcgagactagaccagagcataccccaatcccgtgtcgcgcagactgaccatggaataccccaat

SEQ ID NO: 512487 - DNA, 567 bp, Homo sapiens
  misc_feature (437)..(437): n is a, c, g, or t
tgagacttgaggagcaggggctgccgtggtgtgtcctctgaaagaggccttcgccacgaaagcacagaagacccagggctcactggaaccatcaagggtcctctggttcttcttaaagtcaaagattaggtgccaaaatgtcagtttatgtactggcaaatatcatcttcttccttggggctttaagtactcagataagatgcaacagaatgaactgtcccacagagtaaataactttctgggagtaggtaaaagactctcagaaaagcagtcactcttttagaaggccacaaatgaatacaatcatttgttaagaggcaccacagtacaacaagacaccatattttggggatatggactgatgccttctagtcctccataaagtgctgatataacaaaaagatgttagaaatgtattagacaacttcgtaacaacntgaagaaaacaaaatttaaaaaatccacattctggctgggtacagtggctcacacctataatcctagcagtttgggaggccgaggcaggtagacggcctgaggtcaggagttctagaccagcttaggcca

SEQ ID NO: 512488 - DNA, 415 bp, Homo sapiens
acctcattcttaggtcctcatgagcaggacactgtcacttcttggtgcatgggatcatggaaagttaatgatgacctcggagaatttgtcacgaatttcacggatccgtacacccttctgcccaatgattgtgcgatgaaatctttgctcactgattagatcctggatacgctcatatttccatgcgagatgcaagctccagacagctctcgcatggaactgactgcacgccctgtgggatccccctcgatgcggatcaaattgctcttctcactgtcaggagggatgcgcacggacaccttgtactggtctatgattctgtatacttaggcatctgctgagtgattatggccaggttctgccctttcttgccaatgatgacacggtgaagccaggaaggggcggcgacagcgga

SEQ ID NO: 512489 - DNA, 213 bp, Homo sapiens
gtgccttaggcccgggaccgtttgcacccggcctgcccccgtcaggccgttttaaaaaagctttttcttgggcgccccccgtttttggcccgaaccctggaaagcctaaacccccttttgtgctgtgttttttatttttggaaaccttttattttttcccgtaagtcccccaatacttttataaaagcgtgccttgtaataaagggtttatta

SEQ ID NO: 512490 - DNA, 185 bp, Homo sapiens
  misc_feature (18)..(18): n is a, c, g, or t
ggccccctaaaaaatttnaagggccctgtcccctttttacaaccccgggaggagcccaggatcctttttggtttaaataaaaaattttaggggggggggcccccttttttcctttttaaaaaaaaaaaattaaaattgggccccccgggtttggggttaaaaaaaaaagggggttgcctttttca

SEQ ID NO: 512491 - DNA, 167 bp, Homo sapiens
agtaggagaagtgttacctcctgtaatattaaatgaaaatgttctgtgaataactgatgtttattatttaaacgtttgcagaatcatcagatgacgtcatctgttcatgaatgtttctttatgggaatttcgtagattaaccattcaatctgtatattattggagac

SEQ ID NO: 512492 - DNA, 134 bp, Homo sapiens
ctcttccttttaccttgatctcttccaccaacttcctatcacttattaatttttgaatctgtttttctctgtgctgttttgttttgtgtgtccattgtgatttctaacttttttaaataatataaaacacaaaa

SEQ ID NO: 512493 - DNA, 1640 bp, Homo sapiens
  misc_feature (997)..(997): n is a, c, g, or t
gccgttatatgtgatcgtcacgtgcccgcatgagttgttggagacatggtataccagaatacagacgctatgttgtccgcaagtgaccactctctgtagtcacgtcgctcttgtggtgtcgctggacaatcgatctagtgttggagcctgctatcgctgctggctctgtgccttatgatctgggacgggaaggtcgacgctatgtcggcgatcggattccttctctgtgatcgccttgagtcggtctgtcctccttccatggtgcacaattgcgtagcaactagcttacattagtgaggtgcaaacatccaaagtgacatacctctagtcacatcgttttcttgctcgggatgccgctcgcaaagcgcgacggctgggattgcactttctagcctaacttgacgcatacaccactaggaataaccgaagaagtcgcgaatatgccgagcattaccctttgtttgcctggtgagcaccggcagttattggaggcggcctacaccactagccgcggaggtcaccccctggcgatgtgttcgcccaatgaggcggcatggtgtgttggctgtccccgtggcgcattgaactccggcactctattcgctaggtatcgccgcgttttaaccgcactttgccttcgagtgctaatcactttgggcctaaggtctagggaggctcatattcgcgtatctgttcggcgcggaatccgtgcctgggaactcggtcccttattgttagacgtatcctccttcggtggtttccttcactcctcatgtctgggcatatgtggagctactagcgttaccagctgtaattagactgcgctttgtgcgtcctctgctacgaagccgcatatcggaccggttcactatatacctgattggcgccatccccatgttaccgcgttctgggtttcgtttcaatggagtctcggttccttacatatcgactgcctcagtacgcgcgtccatcggctgaaccccatcgttggtgtctntcactcagtgcgccgttactcccaccgtctgtgcggcagccaatctctggtctcacaacgaatctctggtgctccgccggttcctgagcgtataccccgcgcgggtacgacactcgttcccctgcgcgtgacgactgcgcttgtgacatgtgggttccgttcagtcgaccagactgtgggcaagcgagcgcttcaaatgtgtggacttgtgatgccacatttggacagcgctgtgaattagcctttggcgctctgagtggcccctatggcactcagcggccgctgtggcaaccaggacagtgcaacaacatatatcttgcagagcccgactatgacaagctgggggggtcgtcagaaaaacacattagaccaagtattgcactacattagtgttcgctgtcttggcaagagccagcgtatcacgctatttacgacaaatggtaatagcactggctaaccaatacaccgtcagaaaagggataggcaacaccccgccaaataaacacccatacatcacgccaccctgtgcaaggtgtagcattccgagcccaataattggtcgcacccgccgaatagcaagaggggtatcactagtgaacaagagtcggtctcacacatctcaaacagtgtcatccctcatcca

SEQ ID NO: 512494 - DNA, 235 bp, Homo sapiens
acacgttgaccagatgggttatgctgtgtctgcagatcatcaccttgaggacacctccgtgtgtgctgtggcacttaacatgtttacatgtgtcagtcccactaaactagaagctccttgaaagtagaaactgtatcttcagctttttattttcatgcccaccacaacttttgagccatactatgcagcaacaaatatttggtggttttgaataaattttactacactgtaacac

SEQ ID NO: 512495 - DNA, 551 bp, Homo sapiens
  misc_feature (14)..(14): n is a, c, g, or t
  misc_feature (158)..(158): n is a, c, g, or t
  misc_feature (162)..(162): n is a, c, g, or t
  misc_feature (336)..(336): n is a, c, g, or t
  misc_feature (351)..(351): n is a, c, g, or t
  misc_feature (361)..(361): n is a, c, g, or t
  misc_feature (371)..(371): n is a, c, g, or t
  misc_feature (383)..(383): n is a, c, g, or t
  misc_feature (413)..(413): n is a, c, g, or t
  misc_feature (421)..(421): n is a, c, g, or t
  misc_feature (442)..(442): n is a, c, g, or t
  misc_feature (444)..(444): n is a, c, g, or t
  misc_feature (450)..(450): n is a, c, g, or t
  misc_feature (471)..(471): n is a, c, g, or t
  misc_feature (489)..(489): n is a, c, g, or t
  misc_feature (538)..(538): n is a, c, g, or t
gatctggggacttnctatgtcattttccaagggcttcagcctatgttggggggcgcgagaggagggggatggtggaataatatttattttgataagaaactacagctcccagcagaggagaaacatcctctgagtttccggcccagactcaggccaancttnacttgcttcttggcccaccctgcaccttcttccttttctctggatggaggtccccgtttggcagaaacaccttgtcttccagctcctggcactgggtcccatattcagagctcagaggagggggtgtggcttgtaggatggcagctgctccctagagccatcaccccacccacnacgcccaggctcagnctgtttgggnaggtcccagntggaagcctcanctggggggtggtgggtaggggtgggggtanagtggtanagtccccagatactggctgtntnaaaaanaaagaagaaggaaagataggnggctgggctgcgccccantgggagcccagggttttctcgtgaccagtgcacgtgccccctgtccccntggctcagagtgc

SEQ ID NO: 512496 - DNA, 192 bp, Homo sapiens
tacgaatcgagctggtacccgatgataacgatattcgccaagtgggcttcaaagggtgagtttgtgtcgcgataccgggccgtcgccatttcagccccggcttggggaacatcaccaggttgcccgagtaggatcaggcacaggcccagcagggcgtggaagtgccactgatagccttcgtagatcgttgag

SEQ ID NO: 512497 - DNA, 165 bp, Homo sapiens
tccgcatgtggtgggttcagtacaggaacaatactacgtagacataaaatcacaggttacattcactgagactagaaggtatcgactttcacccatcttagagaacagagaacacacgttggaacaggtgctcatgcagtcagatctgtttgtggaggtagcact

SEQ ID NO: 512498 - DNA, 369 bp, Homo sapiens
gtctctacttgttgtcaggccgcactccttctggaactggacctcagtgtggttctccagacacctgtgggtggttgaggatcgggtaggcgtccaggaccgcagccccagccgggggcgatcgggcatccgcaaaggtaaagagtagttcatggagataatgatggggcggagtttgtcacggaggttgtccatcaggagcagctccagcttctggcagcgcatctcgggcatggagaagaagccgtggaagacagcggactcactggcggcaaagcggagccggggcgggcggcggtccctgtcagcctccagagtgtaggccagggtgatgtttcgcctgtcgttagggttcccggcactctggtt

SEQ ID NO: 512499 - DNA, 87 bp, Homo sapiens
agggaccccccccccaggggccctgctccgtgaaataatgttaaatacgactgtgggcccaacccaataaaacctctgtttgttcga

SEQ ID NO: 512500 - DNA, 1230 bp, Homo sapiens
cagcctggacgcgtagctggattatctgtgcgctgcgcaactttaacacacggtctcttacacgcagcgcttctcggcaacccctcttagcaacacctgccctagctaagcccagcagagcaactgccctgctagttctcttgcctggcagaaacctggctgctcttctggcatccttcttacatcctccttctgaccctgcttctcaacacaggctctgaataaatcagcagacacgacaggttctctggacgactctctgtacacgccaccttacaagctgctccttacttcttgccttgctcctgaagcacgctcactagccctagcggcaaacttctctagcctgacacaactgggccatctcccatccttcacacatcacgacgaaacgtacacaactactacgacgactactcgcaccacgcccaagggcccacgacgccctagcacgcacacacaacctccatacacattccctaaaatctccctgcacccctccttcctaacctcaacccaacaacatgcctacaactataattctctcactgcttctctctacgaccctcgtgtctccctcctatcttcccattcccctgctactttaacacctactcaccacgtgctctacaacttcgcatacacttaaataagcatacacttgaactcactggcactcaccctactctgactactacactgaactcctccccctcaccccaacttcttccccgaaactctccccctgccccacgccactggccaatccctactgaaccctctaccaacgctcgacccatctaccaccctcccctccacttccaactccccctttgcccttccacgcgaccctttcccctcactcctctcccctcaccccacatggaccgcctcttctccccgcgccccccaaacagcgcccgcccccctccggacgacaccaccacccaccctccaacaccccatgcaccacccacactggcccccagcaccaccattctacgctctgtatcgatccccccacgcgcccattcacacacccgccgccgatcttctacaccccataaactccaccacctaacaccactggtcccccccccacatcactgaccacaccacccctccccactcccccctcacccctccccccgctcaccacccccccacacctcctccgcaccacacaccctctactactaacacccaccatcacctctccaccaactcacg

SEQ ID NO: 512501 - DNA, 409 bp, Homo sapiens
gatctacacgcacatgccaccaccaccagctaattattttggtagagagggagtctgtgtgttcccaggctggtctgaactcccaggctcaaatgatcctctagcctgacctccaaaagtgcaggggttaaaagtgtgaaccaccatgcccagcagaagacgttttttaaaaaagaaaaattgaggccgggcacggtcgtcacgcctgtaatgtcagcctccccagtagctgggattacagcatcatgccaccatgcccagctaatttttgtattattattattgttttttagtagagacggggtttcaccatgttggccaggctagtcacgaactcctaacctcaggtgatccacccacctctgcctcccaaagtgctgggattacaggcatgagctaccacacctgg

SEQ ID NO: 512502 - DNA, 173 bp, Homo sapiens
gggggggggggggggaaaattttttcccccgggaccccccttcccccttgggccctttttggggcccctttaaacccatttttttccaaaaaacgggggggggccgggcggggttttccggggtttttttcccccccggggccggggacccaaaaaattttttttttttttta

SEQ ID NO: 512503 - DNA, 438 bp, Homo sapiens
  misc_feature (54)..(54): n is a, c, g, or t
aaaaactgaaaaagtcaaagtgttttttcaattctctcactcaacaataatcancactgaagactcctgtgaccaactctgtggggatttctcctcaccaacaagcagtcagttctgtagcagacaccagctgggtaccctccaatctaattcaattctgatgttacctacctggaggtagcgtcagatgccacaggttgagggctcagtcccacgtgactgcccctaacttatgataccagtcaaaagccccaggttgttttatttgtgcttctgactgaccgtctataagtcagggatcccctgaacccctttttgtgtgtgattaatttactggagcagagcttacagaactcaaggaaacacttaacatttactggtttattattgtattagttcgttttcatgctgctaataaagacatacctgagacttggt

SEQ ID NO: 512504 - DNA, 113 bp, Homo sapiens
acgaagatctgcatcccacctctgagcagtgcaggtgactctttctggatgttgtcgtcagccagggtgcgtccatcttccagcggtttcccagcaaagatcaacctcgtgcg

SEQ ID NO: 512505 - DNA, 389 bp, Homo sapiens
  misc_feature (389)..(389): n is a, c, g, or t
gccgccagagcacaggtgctatgagtactacccctatgagtcacagtgtggaccggagagactcatgctcaacattgtctgcattcggacacgttacatgactgcagagtgcaccagtactggtcatctgcatgtataagtgcgagggcatcgactatagaccattgactaatctgagaaggagcgctgctgagacgctagcgagctattttgagtatgccagggccatgtgtaaactgaccgctgagcgtgaacagtggatctgcatcagacatgtccttgagcaataccgtgactaggctgtgctaagtcactatctgacgcgccaccacacagagactgtgatcacatgatcaccgtacctctcaggctgacagtgctgtactggn

SEQ ID NO: 512506 - DNA, 241 bp, Homo sapiens
  misc_feature (6)..(6): n is a, c, g, or t
  misc_feature (36)..(36): n is a, c, g, or t
  misc_feature (38)..(39): n is a, c, g, or t
  misc_feature (77)..(77): n is a, c, g, or t
gctgtnttggctaaccctcaaacactggggctggcncnnctcttggtttcttcaacaggagacttttactgtgttgnctttatggttccattgtttggagacatgcctgggcacagtttggtccgttagaattaaaagttgaatttttttttttttttttttttttttttttttttttatttcgctaaaaatttttttacaaaatacacaccgggcccaaaaggggtttttccacattttt

SEQ ID NO: 512507 - DNA, 422 bp, Homo sapiens
atattatatatgcagaagaatgaaactggatctccatctcttactatatacaaaagtcaaatccagtcacaccagtacactccagcctgggcaaaagagtgagactctgtctcaaataataaaataaaataaaataaagataatttaaagacttaaatgtaaaaccccaaactacaaaactactagaagaaaacataggggtttcagcatgttattctgggtcttaaaaaaaaaaaaaaaaagaatactgagcaacatagtgagaccttgtctctacaaaaaaaaaaaaaaaaaaaaaaaaaaaattagaccacagtggcttacacctataatcccagtactttgggaggctaaggcaggaggatcacatgagcccaggagttcgagatgagtctgggtaatatagtgagaccctgtcttta

SEQ ID NO: 512508 - DNA, 921 bp, Homo sapiens
acatgccgattaacaaccttcgcgctgacacaaaaacagtaagcgccgcggctagatgacagtccggattatcctttggacgccagcgtacacaatgggcgttcggcggggccacaatcccagcggcttggctgtcaccacaagcccgttccccccactcttagggttccaaaaccatagaaaaggggccccaagtgggtagacccgcgcccgaggagtgcccgcggcagaaagatattaatccgggcccgcaccacgaaatggggtggcaaggaaaaccccccgctaggccagggccccacaatgcggcgcacaaaacccctggggtaacgcaagacccagccttgtcactgcttgctgggatccgcgtgcaaacaaaaacgtcccccaagaagattttatggcgtgacccctcccccctgcccccgccgcataataatggccccccctttttgtggagaggagaagccccataccaaggaaccccacccgccccctgtggtgagagttcggcggaaacaccacaggcccacggccaagcccaaggaggcgacctgtaaactctttattgggagtgagattccccccggcgctgttggtagagagaaaacctcaaggcgcctgcagatataggagccacctcgttttcccagaagggtataaaaaacttgttgccgccaatccaaaccgcccttaggcgcttatacacatcaccacttttaagcgcatcttcccgccccgtcccctgagagatatagagaaagaaaatgatagatctccaaagaagtataatctattcttgtttttctctttttctctttggtgttaaaccccaccacccccgtctttaaaacacactaaaaattttttaaccctttcccctttttttttggttccaattaaaaaaaaagggaaaaaaaa

SEQ ID NO: 512509 - DNA, 283 bp, Homo sapiens
  misc_feature (58)..(58): n is a, c, g, or t
ggtcctaggttaaagcacagaaaaaaaggatggcctattgtggcactgtcccacaganactttcattattggccgggcgcggtggctcatgcctgtaatcccagcacttcaggaggctgaggcgggtgaatcacttgaggtcaggagttcgagaccagcctggccaacatggtgaaaccctgtctctactaaaaatacaaaaattagctgggcagagattgcagtgagccaagatcgcaccattgtactccagcctgggcgacaaagcgagactccgtctcag

SEQ ID NO: 512510 - DNA, 204 bp, Homo sapiens
attgacgcccttttttgcatatgaggtaggttagggtccaacctcattcttttttttttttattccctctcccactcctcagctccaacttcattctttccagggggatatccagtttccccaatattattaatggagagaccatccttcccccatggaagggcccgggcaccctggtcaaaaactcaatggggccgcggggac

SEQ ID NO: 512511 - DNA, 1072 bp, Homo sapiens
gcactccagcccaggcgacagagcgagactccgtctcgaaaaaaaaaaaaaagtataagggagagaaataactttaaaggtttattagacaaaacagagtatagatgccaagatgtctggtaaaatggattttttctgggttataaagagatgtgggccattattttctaatccattttaaaaatacaggacaaaacacttctttaaacagaacaaggaatgaaaaaaggttaaccaagggaattatccttttctcaccaatcaacactttaaagaaatatatatatatattatacacacattatacacagtgccttcatatatatggataacttaagaaaaaatacttataaaaagactctcattttaaggtgatggacaagcaaacgggctccatttaaaaaaaggtccctacttataggtcaacgtaacaggggggttattattaggtgggtattaaagtggttatgggtttcgggtatatggcagggggtggtgggcggtttggaaacggacgctctaggccctggtaggcctaaggctgggagtgcgcaggggccgcgaatctgggccccctggcaaacctccggcctcccggggtccaaagcaaatcctacctggcgctcaaggcctccgcgagaatagaccggagcagatacaacagcgcgttgcttgctcaccccacgcccgtggaataaatcacacacgggacatagagaagctacaaagcacggggggtcaaccacccacactgggccaaggacggatcctacacacacacggaccgtggtagaaccaagcgcacacatcgggccactcacaaaagcggccggaaattacacgggaattaaagccacccgggcctccgggccccacaagaaggggggactatagggaggaaaaaggaaccacactaaccgacgggacaaaagcggggcacataagaagagactaaaagggggaacacaacaggagaaaggggaacaaccaaaacagagcgaacagaagttaaaaacgcacacgtacaacaccaggatatctcacaacacacgtccagtagagagaacatccg

SEQ ID NO: 512512 - DNA, 282 bp, Homo sapiens
attggatatgcggataggggcgggagagggaagggtggcctcgtgaaacccctaactgtggctcctctaaagatggtgcagacacttcctgtgcatgtccagctcccctgccaacatgaccaccgttggctgccatccagttggtacccatgcacctgaagcctcaaagctggattcgctctagcatccctcctctcctgggtcccacttgggcgtcttcctccccacctgatcggtgttcccccacatcttggggcgctttttgggtttgaaaaacccacc

SEQ ID NO: 512513 - DNA, 984 bp, Homo sapiens
ggaagccgggagctcggcacgggtggcgaggctgcggtgaggcctggtctccggtgccagaccatgctgagtgtgagcacgctgaaggttcgcctcagcgcttgcgggaaatggcgctgcgccggaccgacacggggatccggcccgtaaaggttgcattgcaacggcagtcacgggggatcgacggcccatttgcggcggaccgggggccacaggaagacttggagcgacgccgacccggggaaattacgaatcaggggaaggttgctggacagttaccctggtgggtcgccctggatcatcccaagaaaacgcggatcaagaattaatgcaggagatttcaaaccaacaagcgggacacttgggatctatacttggaaccggacagtctgcgcggaaacattcggttttaacttccctaaaatcaacatttgcggcatggggagaactcccccgattaagatatgtggactataccgcatccaagggcccatggcatcacgcgagcatttggaccacctcggtctcaacacatgggttactgagcaagctggccatacgcaactcgacctagtgtggcgacgccacacgtctgctcaactggattacaactataacgctttccgcacacacacacacctgttagtccacagacaacaacgccgctactagtcagctgccacacagctgtatgatctgtttgaagattaaacccagagtaattaacccgtttctgttaaacagaccacccaccacgggtggcagccgggtttaacactacagtgtcgacacagcacgcacacagcaattgtgatttccccgtcgcaccttacattccccataacgcggagtagcaccgtggttcactataatgttacacagatatgtgtattcgtacttacagacgccacggggacctgtggattcgctataccatcgaagggccttcctgggtctggaacagacaacaaggtttcgccaccg

SEQ ID NO: 512514 - DNA, 1470 bp, Homo sapiens
gggaggttctagtgtcggagttgggtgcagtgcagtgtgccatgggcccgcttgaggcacactgaggggacgctggtggcttggtgccaatgtgcctggctgctcgtgtgcctgcctgcctgccgctgcctcaggctgtgggtcctcggcctcttcatggcaaccatgccgcctcagagagctgggtgcttggggatgctgctggacgtgatgttctcccggactcagtaccgggccaaggatggcagcgggaccggcggctctaaggttgagcgcattgagaagagatgtctaggagctgttttggccgagactactgtatcagcgatgattccaaaacaacgaaatggggactatcttgtgaggcacctataccccgcgacactctcgtgacctcgcgggtattactgacgagctgctacgagagaaaaaacccagcacccgtcagaaacacacccggaacaaagaggtaagacaaagtatggcaaaaaacataaaatcacaactggacaacccgacattggcccacaggtagacaaaccagacacagaatatgatcatgaccacaagaaaaatcccgtgacacaaggggaacaacaccaacactaaacccacggattcagagcccacaccatgtacaatgacattcgcttaaacagcaatgttaattaacaaccaccatcaaatacaatcaccaccataatttataacaaactacaagtattataccacaccaaatcccctcacaccaccacccacatctactaaacacaactcaacacacaaccacaaaatcagagaacatagctcactacccaactacctcccctacctcactgactactataaatagacactagatacccagaaaaaaccactaccaataaagaaactaaacttcaaacaatacaactatctaaaaaaacatcatatgacactcaaacaactactatcaaattatctaatccacacacacacaaaactgcaagacaaaactaccaacacagaacatagatctatgacaacataactaacactatcttcacacatgtttcaccatacaataaacaagatacaagcaacacgaagcgaacaaacacatataattgacactagacacaaacacacacatacaacataaataactcagtcaacattattaaatgacgagtaacatatatagtaacatatcaacgaaaatgaaaacataaaacgaaactaataaaacgaagacaatccaaattcaaaaaactaaaacatagaaataacaaataacacaacatagagacacaaccaacaagtaactaagtcacaaaaccataaacacttagacagtgataaatataaacagacaaaaaacaaacacagtgaagaactattacataataaaaagaacagtaacagacagaaaaaaaaaaagaatctaacaatataacaaaaaaactaccaatataaacaacacaccaaaaa

SEQ ID NO: 512515 - DNA, 382 bp, Homo sapiens
  misc_feature (108)..(109): n is a, c, g, or t
  misc_feature (112)..(114): n is a, c, g, or t
tcgcgcacacatccttcgcgcacacatccttcgcgcacacatccttcgcgcacacatccttcgcgcacacatccttcgcgcacacatccttcgcgcacacatcctcanncannntagagactttaggaggaacagctagctgatttgaggggagaagaaagtatgtgagtttaaatggaccaacgtgaagtcacgcttagaaggtctaacatttcatagggtgtgcaagccacgcggtgttttgctcaggttcaatatctaatgtggacaggcatagacaggaataaacacactggagcaatagctttggcctctggataggaggacaaacggttagtgggtagactatgtattattctaggggatgtatctctctgcgacg

SEQ ID NO: 512516 - DNA, 550 bp, Homo sapiens
gcagccatctccttctcggcatcatgggcgccctcagaccccttgttgaggcccaggatcgtcaatcaagagaatgcaagaagttcatccgggcagcagtcagagcgatatgtcaataattaagcgtaactggcggaaacccagaggcattggtacgaacagggttacgtagaagattcaagggaccaggatctgtgatgcccaacattggttatggagagcaactagaagagaaacagaagcacatgctgcccagtggcttccggaagttcctggtccacaacgtcacaggagctgtcaagtgctgctgatgtgctaacaaactcgttactgtgcctgagatcgctcactagagtgtgttcctccaagaaccgcaaaagccatcggggaaagagctgcccaactggccatcagagtcacgcaagcccaagtgccaggctgcgcagtgaagaagaatgagctaggcagctcatgtgcacgtttctctgtgttaaatcaatgtaaagaactgccagaatgaagatcaaaaaaagataaccccgtggggggc

SEQ ID NO: 512517 - DNA, 129 bp, Homo sapiens
catggatttgctggtgcagtacaactaggcttaatagggacatggaaactgaacaacctgctcctgaatgactactggataaataaaaaaatgaaggcagaaatagagatgttctttttgaaaccaaaa

SEQ ID NO: 512518 - DNA, 183 bp, Homo sapiens
atctgtagaggagtgaggaaatgggttgtacttgttgaagacagatgggagaaatgatgggggcgccttcatcctcaagggccccatgtgagccctcggaatgaaactgaaggcataggagagtagtccgtggggtcagggaaatgggtgggggggaccagtgagttgacttaatgtccaatg

SEQ ID NO: 512519 - DNA, 413 bp, Homo sapiens
acgttttgtctgtggacaccctctgctgtttttaaaccctgaaaacccttattacctctttgcttgagacaccccttctgctctaaacaaagtacagacgatagtgtagatttcatggtagagcagtgcactatccactccaccaactaaaccaccaactaccacccatcacccatacactgtccactcaccaccctcccctactctattgtctataacatactataccaccctgtactacttggtctaatacatcttcctaccctacccacttatacagtttgctctattttccatccattgccacttagtatcccacccatcctcccatcctcttgtacatctctccatccattcattcattcactccctcattcatcctctatcccatcatctgtccatccatccatcca

SEQ ID NO: 512520 - DNA, 1194 bp, Homo sapiens
tgccatactgggggcttgttcatcacgatagggattgcatcccgttttgctgacgacttcgttcgtcgacgtcttgtgatgacaaccgaccagtgaggttctgtggacgccttcgtctgtcttctcctctgcagttgctgcctcttgtaataatagttaggatcctctttatcttatgggccgtattgcgtggctgtctcgaatggttccccgtcgcaatgtttttgggtatgtgctctccccgagtgcccccattgttgggccctccgcgggtgtgctcactttttctgagccacatgtaatcttgtccccaggtggtccgctaggagccgccatgttgttcactctacgcgttggatgtcggcgctctctagcctgttgttgctgcaccacgaccggttgttgttttactggtgtctccccctcttttcccatatgccccattcccccctggtcaactttacccttggcctcctgagttattctgagcgaccctttagccttagccggtttgacgtcaatccctctgattcagggttgagcagtcaagactcaattaacgcccttgatcggcgcacttcggagcaagtagcccccacaatgctcatatggagtcaccctagccatcagtctgacgtatcgagacatgtactaataagtgggctcctgtgtaacctctgccagcccggatgcaccacaccaaggacccctctgattactcctgccatcatgacccttggccataatatgatttatctccacactagcagagacccaccgtacccccttcgaccttgccgaaggggagtccgaactagtctcaggcttcaaacatcgaataccccgcaggccccttcgccctatttcttcatagccgaatacacccaaacacttattataattaacacccctcacccacctaccaattctttcctagggaaccacaacatatgacgcacctctgcccctgaactttacacgaacatatgtttgtgcaccaagaccctacgttctaacctccctgtttttatgaattcggacagcatacccccgattccgctacgaccgaaatcgatacacctcctatggaaataacttcctagccactcaccctagcattacttatatgatatgtctccatacccattacaatgctccagcattccccctcaaaccttaaagaaaaaaaaaaaa

SEQ ID NO: 512521 - DNA, 327 bp, Homo sapiens
cccccccctttttttggggggggggggggtgcccccatccccccgggggggggggccttttggcccggaaaaaaaaaaaaggattggggagcggggttttttccccccaggggccctggttttcccccggcccaaacccttcagggggggtgggccccttggggccccttttccgtttggaaccctttggccccccccggcccccccgcccatttgttaaaaaaggggggggggggggtttcccccctccttcccccccccccctttttttaaaaggcccccaagggcttttttttttaaaaaaaaaaaaaaattttttttggggga

SEQ ID NO: 512522 - DNA, 81 bp, Homo sapiens
tgagaccacatctcattgtgtcacccacactggagtgcagtggcataatcacagtttactgtaaccttgaactcctgggct

SEQ ID NO: 512523 - DNA, 231 bp, Homo sapiens
gtcccacagtgagtaaatcccctagagcatagcattgagcgggtcagagaaagtcagcaagaaaaggctgtggtgtggcatgctgacactctcatctacgtctctctctctatgctctaggggatttactcacttggggacaaaagcaataatagtagcatctttacagtggcccaagggtaaccagaagtggtagatcagatcacaggataacacgttcgcgagggggga

SEQ ID NO: 512524 - DNA, 303 bp, Homo sapiens
cgtttcgtttaaaaaattgtattgacacctgtttattgttattttgatttagttattgttagaggcagggtctcccagtgtcactcagttggagtacagtaacatcatcatagctcactgcagcctcaaactcctggactcaagcgatcctcccacctcagcctccgaagtatctggggctacaagcacatgccaccacccccggctaatttgttaattttttatagagatgggggtcacttcattgcccaggttggtctcaaacccctggcatcaagcagccctcccaccatggcctcccaa

SEQ ID NO: 512525 - DNA, 411 bp, Homo sapiens
tgtagctgtgtcaaaaaaaagaactggcctaaatacagacatttgtaaaacatagtcatgccttctgcgtctttggttatgcgttacagttagaagattttgtctttctccccctcctctctcttttttttcccttcactttgtcctggaatttaaaaagtgtctagagcccattactttagccttagctttttggacagcgttatctataaaccttcctgaaagtgagctgcaaagcagaagaaaacttgtttctttttctttttaacctttaccacaattctgtgggccaaagggatcaggagacagacatagagcagtagaaaacctgagacagagaaaagaagaatgagagagactcataacagatggtaaagtagaggaggggtgagggatttgccaagaggtgac

SEQ ID NO: 512526 - DNA, 255 bp, Homo sapiens
aattaaaaagtgaagcctctacttactcttaccatataataactatagaagaaagtagactatacacacacacacacacacacaccacacccagttgtgacattgttaaatgatggggatgcattccaaggaatgcgttgtataagcgattatcatcattgtgcaaaaatcatagagtgtacttacataagacaagtataggatggcctattacacacctaggctatatgtacagcatgttactgtactaggaat

SEQ ID NO: 512527 - DNA, 108 bp, Homo sapiens
agcctccgtggcctccagcagtaataatttacctgttctctagctattccttaatccagtcaagttgacacctaaaattaaccatcatacttgtggaatgctttatta

SEQ ID NO: 512528 - DNA, 979 bp, Homo sapiens
tgtgaagtgtaggggtgtgtgtgtgtgtgaagtgtaggggtgtgtgtgtgaagtgtaggagggtatgtgtgtgtgtgtgtgtgaactgtcccctccctgtaggatgattttagataggaggtaggcgggatgtgagggtccgctgctgattctattgccgcaggtgccccccatgtgcttgtcactgtgcccatgtggggaagctaagagatgacgccctcttgggggcgtggttttgggggaggggacacggcatcacacgagggcatggctgggtgtgtgcaaggagcaggtgggcatgggaggagcgggcagtttctacggaacgtggagaccccaggtgtgggaagcggtaggtgcagcccacccaggtggagaggaggcacctaggcaaaggtgcagagccatgtggtgccctgggaccacctgcttctcttgggtgtttcatcatcagaaccaaacacaagtgagaataaggagctcagatttgtatctcgattttccaaatagttcacagacccagggcaacataccctgaatgagaagaaacgatgcttcaaagtcagtgctttggcaagtagaatgtagtctctcttgggttgtgaaaagcatctttcctgtgaagatgtcgtcgctgtagtagcctagatgatggagcatttggcaggggatacgatgtggtacgatcgatggcaacttggatacgaagaagtccaggaaattgaccccctcccccaaaaaaaggagagggcacacacaacaaacaaaacaaatttttcaggatcacctcaagtaaaggtgccacgggaaatccggcgggtgaacagacactggcttgttacaaacggtgtcttaaccattgggccgctttttacacaaaagaccctgtgcggtacacaacgggttaaagggccccgggggcaacgccgttaacaaaacctgtgcaacgggattctgaaaacgggagcggtggagaata

SEQ ID NO: 512529 - DNA, 534 bp, Homo sapiens
tgggcgccccccttttttgggggaaaccccgggggggatcggttaaaaaactcggggcctggccccccccggtcccgggggggcccaaaaaatcttccccggggcgcgggcaacccgcgaagcaccgcggtgtggtggccccatatttggtgagtgagagggaaagggggggttcatcacgcggattatcgtggcgtgatgcgggcgtgacacaaaatcgtgtaaacatacttagtgtggggggcgccacgagggaacccccacccctcttgtacttagtgggggggagcaatactgtgtaggccaaccctatatctagagggcggtgtgtgtctagacaaaaagagagcgggtttctcgggtgggtgcgcccccttaccgagagaaacaagggagctattctctctcagagtgagcgcgcgcctttcttacaaagtcagcccgccccacagaggagatctatctccaaccagctgtgaagagtgtgtccaaaagcacaggaggttggttcatgtaagacaaaggcggtgttcc

SEQ ID NO: 512530 - DNA, 739 bp, Homo sapiens
tgaatgctcgcagctcccgggactttgagtactataagcagtatctgtgtatcctggcttcaagaacaataaaggagtggctgagtgtgcttcgagatggtagactagccctgctgtcctcatccccagcaaacccttggcccggagatgcttccccgctatccacgcctacaaggtgtgtcctgatgcgtgtgcgcaatgagacgacctatgagtgatgggcatggctcccggaaaaacatcacagacctggtggagggctgccaagaaagccaatggagtcctagagtgcgcggaactcgccatgaccgccaattaacttttatgaaacggaatataataaccaaacacaagttaccttccccccggtactggattatcataggcctggtcattgccatggcgatgagcctcctgttcatcatcctgcttcgcttcctggctggtattatggtctgggtgatgatcatcatggtgattctggtgctgggctacggaatatttcactgctacatggagtactcccgactgcgtggtgagggcggctctgatgtctctttggtggactcggctttcagacggatttccgtgtgtactgcacttacggcagacctggttggctttatgatcattctgagttccttgagtcatatcatcttggtggcatcttctcggaagagatctctcgcgattgcctcaagagcccggctttggaactctgtgctctgtctacatgtcc

SEQ ID NO: 512531 - DNA, 285 bp, Homo sapiens
cattatgtgaggttgcaatatgactgctgataatcatagtattagtacaggaggctgagctcagtggctcatgcctgtaatcccagcactttgggaggacgacggtaagtggatcacctaaggtcagagagctcgatgaccagcctggccaacaattgtgaaactccatctctattgaaaactacaaaaacttacggcaggtgtggtgagtgtgcaccctactactcccacgattactccggaggactgtcggagacgggacgacggatgtcggagacgcggacg

SEQ ID NO: 512532 - DNA, 496 bp, Homo sapiens
gggcagaaacagcaagaaaaatagtatcagaaatggagcctgaaaatgtggctgaagagctgcaatctcctcatcaaacttgaacagatgtggagctgcttcttaggggtgcgcagagaaagtggtctcttgagatggaatctactcctggtgaaaaggctatgaacactgttgaaatattggcaaagaatttagaatattacataaacttagttgacagtgcaacagcagggtttgaaaggattgattccaatttccaaagaagttctactctgggtatagtgctatcagtgtcacatgctgcagggaattcttttgtaacaaggggagtggtggcaaatttcttgtttcttactttaagaaattgccccagccaggccaggcgtagtggctcatgcctgtaatcccagaacgtttggaggctgaggcgggtggatcataaggtcagagttcacaaccagcctggccaacatagtgaaaccccgtctctactaga

SEQ ID NO: 512533 - DNA, 633 bp, Homo sapiens
agcggggaacaatcacttctgtagactgaattggggattttttataaagagggcatggagtaattgaatcctggaaggaggaagggagcttactgcttgggaggagaggagatcttgtagattatgagaactgtggacggtggtattctggctgaaagttagtttcctgctttctagagctaagctggctaccacttctagtgctttaaagcaggctggctacccttggactgtgttatctagtggtttagagaggtaagctacaggggcaaaggaaggaggatttcctttctgtggtcctaagacaccgagggctattcctcagctttcagcagtatagagagtgaaaggtggggagatatcaggtaaggacggagctgacgcagggacaagagcagttgggagttggtggaagctggggagtatgttatgtgaggggtttaggggttcatggggagggcctttggccacttcatagaggggatgagctaggagggcaaagttggaaatccatattctaaagaagcctgctagccctgggaaggaaaggatttcgcttgtggaggagggtgggggtagattttctataaatgctgccgtggtggagtatagctgggccaagggaagttgatt

SEQ ID NO: 512534 - DNA, 115 bp, Homo sapiens
gtaaaccgagttagaagggaatgcaacagaagaaaagaccaaagacctgggtttcaggtctgggaaagaaagcaagacagatggaggaaatgaggcctcaggacatggcgtctca

SEQ ID NO: 512535 - DNA, 356 bp, Homo sapiens
aaaaaaaattttcccccaccacttaaatataattctggaggtggaccaaaaccaaacccaaaagggggggttggaatcccttaaaagattgggatatttttcaagactggccttttaacgcccattgggatagagcatcttttgttgactcacgaaccctccaaggggggggccttttgttttatagaaaccaggaaaaagggttctgggcccatcagaatgggtggaagggttcccagccaggaacacttattttgaacaatgcagacagtacttgccagagtcccaaatgctgaattattgaaccatgtttttttttcctttgttaaaaaaaataaaccagggtgatttctata

SEQ ID NO: 512536 - DNA, 139 bp, Homo sapiens
cgtctctacgaggatccccacagtttgatcgagcatgcgtgacttgttaaaaaccctggcgagccttggaaataaatctctattaaaccgctttgtaaccaagctctggtaccctctgtctccatctcctgagtccact

SEQ ID NO: 512537 - DNA, 136 bp, Homo sapiens
  misc_feature (38)..(38): n is a, c, g, or t
  misc_feature (92)..(92): n is a, c, g, or t
cccagaccgaactaacttcccccggggtgtgtccagcngaagcaccttccatgctgggcagctccgacaggtgcggggaccagcagaatttnccctacggtgtgaccccagcctctccctctggccacagccaggg

SEQ ID NO: 512538 - DNA, 292 bp, Homo sapiens
aaacgcgcgagtatacaaggggtaagtaacatagagagacctaccgcctagctcttggatgacccactctaccgtccagaaaatgaacgaaagtacgtctatgggagtatggggatacccaagataaggtagccgcaagtacaaggaggagtatagggtacaactatgcaaactaggaggagtcatagctagagatcctgcgaggagtacgtactgcactaaccgacgatctaggtagaagggtcagaccaataaaatcagcttagtaagcgcacagcaaggggcttgggac

SEQ ID NO: 512539 - DNA, 242 bp, Homo sapiens
  misc_feature (90)..(90): n is a, c, g, or t
aaggcgccccggggcccgcgatttaaatgggggggccccccccccccctttttggctttttaacccccccccagggggggggggttgggnttttaaccccccccccttttttttttttgtcttttgggggtttgtgccccccgggggttttttcccccccccctttgggggggggggtttgcccccggttttttttttcccccccccctttttttaaaaaaaggggttttttaattttttta

SEQ ID NO: 512540 - DNA, 495 bp, Homo sapiens
  misc_feature (488)..(488): n is a, c, g, or t
tttgaatatttatgtcaaattacaaaccagtttaaagctgcctatttggcaaaatgatctgctgcagaattttcattttctgtctctagaatgcagaaaaatgtcttaaagttccttaatttgcttaatttaatgtggtttccagaagatgtgaaaacctcctttatttttaaaatacctgattccacattggtcaatagtttcctctttaatttacctctctcctctcactttatctataataagcagggagaaatgaagacacaccatcaacacgtttgcttagatatgtcctcaactaaatttctagtgtcacttactaattctaatttcatccaatataacataattaagataaattctataacaagctacacatactttccagttctaataccatgtttgtgatggaaacaaagcaggagtgccctctgcaaggtgatcatctgagggtccaagatgaaggggcacacaggtattttatctgncccacac

SEQ ID NO: 512541 - DNA, 121 bp, Homo sapiens
tcatcccaaaactggaaatggaaacaaggcttcaaacactcgtctcacgccgtgtttgagatcaccgactcaccagtatgcatcatagatggaggtggtttcagtatgtgggtgtgtgtga

SEQ ID NO: 512542 - DNA, 1432 bp, Homo sapiens
  misc_feature (1432)..(1432): n is a, c, g, or t
ttggaagaagtcacaggtgacagcgcctcctgagtgcccacgactttatgagggggtccatgatccagaagagacccatgcacaacggtaagggatgattgatgtcccatgcgagtacgagcattgctctgtacagaagtgagctcgctctaccacgacatacttactcacgcacgctgaccgagtaacacactcgatgctagagcgagttctgcggtcaatccagcctcatgcgcatgtgcatggttgctccatggacctctcacgttgcactattggaacgttgacgaatgaagcaccttcagtccaaagctctttgtggattcctcacttcttgtacagtcgcacgtatgcatggatgctaggtcgggcatgtgtccctgtggtagactcccgtcttcaggcatagagacacctcaacctccgaactcacagccacgcatgtgaatctctgcgtgcctcgagcaaaggaggacgtggagccgccaggctcagtattcctctcacgagacctggcatgatcactgtctgtaggggcggggaggcccaagatctgtgattccatgcaggtggagctacctctatgctatatagtgtatcaacacgcacagattagttgtattaccttttccgatctaaatgtggctaagtatatataactcgtacgacaggccaacggtaccatagaaggactcccctggggggcatgagaatctactctattgagtgaactctcgaaaagccgcactgacgagtcccagtacgcggagccaaaggacgtcacaatacagaaacaaacaaaaccaagggacaccacgcagaacaaattccaagggatcaatagcatgaaccataaaagtgaagggggctgaagagagaacctgcacgcagaggaggccaatccaagggcataacagagccacaataatcacaaaggtgaacagaagactgagaggaccacatatatacaaggacgagacgacgcggagcaatagacacacctgggaccgagaaccaaaggaaacacagagggggaacaagaagataagcgcaaccacccagtgagacagacgggaaaaaagtggggagccaacgatattcacggacaagtgtgagaacacggccagagaggacaacaaacaaaggggaacacgggagagagtgcgtcaaaacccagtaggaatgccagaggcgggcagaacaacatgagcacgccgacacagagggaacgacaacccaggccacgagacggcatgaacagaagaggggagcagacgatgcatggggagagcggacgaaaacagacaaggacacagacgggggacgagcacgcgagcggcaggggctccaacaggagcaggacacgggcagcacgcagagacgcacaggagcgagaaagcaaacagaggacacgacagatgcgaacaagggn

SEQ ID NO: 512543 - DNA, 217 bp, Homo sapiens
ctccccaattacagaatatactgcttccccccacccccaactctgtctcccaggctgcagtacggtggcatgatcacggctcactgcagccttgacctccctgcctgaggtgggaggatcatttgagcccgggaggtcaaggctgcagagagctgtgtttgcctaactgcactccagcctgggcaacagaatgagaccctgtctataactgttcttt

SEQ ID NO: 512544 - DNA, 309 bp, Homo sapiens
gatgacactagggtagttttgcaggtggtaagccatttacaagatagtgtaggtaaagaagggcagatttattagagaaattgtgaaaatatgttgcagtgggcagctcagcagagaaggggctacctgcaaagaggcaagggctggaggaaagttttatagggtcctgctgaagggtgctacgtgtggaatgaggtcattgtgcccgcaggttgtttgtgattagctgtctctaacaattgttcatacaataattgttcattattgttctcaacttggggctctccccaacctggggacccttcctta

SEQ ID NO: 512545 - DNA, 563 bp, Homo sapiens
agtacctttgatattattgagaatatttggctcacttgttttttttctttgttccctttattttagggcaaacactgtatccttgatgtgtctggaaatgccataaagagattacagattgcacagctttaccctatctccatttttattaaacccaaatccatggaaaatatcatgtaagtgtaaatgcctaaggcatagcctctgtgtacaaattcagtcactgtagggtaatttatttactctccctgcatctcagtttatctataaaattgagataatagtagtatgtttattcacctcagattatgtggtgaggattaaataagcactatgggttataaattgtcattgtaatcatcatcattaatattactaaagtataaggtaacatgtgttagaactttaaatagccccacgtgtgactagtgtgactagtgtaaatagtgactagtggctactgaagtacgcagcacagctctcaggtaaccattaagagaataaaagaatgtataaccattacctaatactttcaggggacaaaaaaatagaatctaagtaaa

SEQ ID NO: 512546 - DNA, 258 bp, Homo sapiens
aatttagtgacccggcggcatttaacggttgccaagtccccttggcattttgtgaaatgcgacgaaatacggatccgtaatatgtcaatttgccaaaatatttcgggccgtgtttcatcacgagacgttccgttgatatctatgtcgtgtgtctggaagccgcctcgattagccatagcactacagaggatttgaagcgtcgttacgacctttcagattctgattccaatctctctggtgaagaccagagtgcttggt

SEQ ID NO: 512547 - DNA, 214 bp, Homo sapiens
atttggccccaaataacccaaggttaaaaattttttacccctttttaattttttccaaagggttttaccctttgaacccttttttaaaccccccgggctttttttttgggccttttttttttgggcttttgggggccccaaaccccctttccctttttttttttttttccccccccccccaaaaatttttaaaaaaaaataaaaccctttttta

SEQ ID NO: 512548 - DNA, 184 bp, Homo sapiens
cagcactttactccttcggctgtgatcaatctccagctcacttttagccagcaccaacatggccttgcagtccccctgactttcttcattctgttctgcgttcctttcgtggctttcgttggaggtctttttcttctcatacaggccatgtcttgcaagtctatgtttgggtgcatttttcttg

SEQ ID NO: 512549 - DNA, 1188 bp, Homo sapiens
gaacgatggcgctcaccaggctttttacctgggcctactcagctatctcaggaccagcttgagggctgaagaagaggcgagatcccagagatcagcggcatgaccgtcacgtggctctccatcccgaagagaagcctcccccggtacggataccggaataggctggagtacctcgggttattagaggatttcggagatggaggtgcttgtccagtagatccatgtggcccagctagtccactggatatgggacgaaagaagcaaaaatgtcgaatgcgctggccatgtcaggtggactgctgacggaaaaatgaaatacgatgcaaattgctcgtacgaggacaggtcaaaggacagaggtcagtcgataagcagaatacagtgatcgtgggttccagaaggaggttatgagatgcagatgatcgcgagaggtgcaaagggccgatgaagaagctatgacaaggagatacccacgaaaagacaagagtagccttagaaaaatctgtatcacagaaggtcgccggcagcatgccagttcgagcagctgacaaatgtggctcctgctcagtatatccgatacacaccatctcagcaaggagttgcattcaactctggagctaacagagggtgatccggatggtagagactgcgacacgatccaattggagcctccaaggtttcacgattactaagacaattccccggagaacaactttctcgctcctgcgactggtattggcttcttcctagccgaaagaatgactgtaaacggaacaaaagcagtggaagatcctccatgggattgtctaaagtgcgacaactgcacaagggtactacgagttccatcaaacaaacgtttgttgctgacggaacatgacacagacagtcacacatatgcacctcggccacagaggcaaaaacactcaaccaagcggaaccgaaggctcaggaacacggggaatggcgcccccaacccgccaaagagccaaacaaacagacacacgagaagccgacacagcgcaaagcggcgacgacaaaagcacaccaccgaacacaagaggagcagcacaggaaagcgagaggcagaagaaaacgcacacatcagaccaaacgacgagaagaaatgagagcaccacaaaacacaagacggagagttgacacagacacgacagaccacagctccaacca

SEQ ID NO: 512550 - DNA, 839 bp, Homo sapiens
gtcaggatccttagtgtttgacactcctcgtgcggggctggcctcctgcggactctagtttcgcctccttgatgtggcgcctgggatttcttcacttcagagctgtatttttacaggcaagagtaagttcctgggcacagtggctcatgcctgtaatctcagctactcaggaggctaaggtgggaggattcttagagcctgggaggtcgaggctgcagtgagctgtgattgtggccactgcactccagcctgggtgacagagcgagactctgtctcaaaaaagaagaaagagtaagagctgaggcatataatagaattctgctaaagcacttaaggtgaaatcacattttcttttcccaggatgttgctcacatctttcgtttttattgaggtgtcatttatatacaataaaatgtactcattttcagtgtttttgaattttgacaaatgcagcatgacctcaggcagaacaacataggacattttcatcacccaaagaaggttctcatgccccttcttagtccccccaccccatcctaagcaacctatgtgggtgggttttggcttttctagaatttgatgcacgtggaatcctgcagcatgttcacgtttgtatccggcgtcttgcgttcctgcttctgttccctgatccctacacttacactgtctcctgggtcagggcagccccttgttagtatcttaaacaatggaacggtttgaggagagctcgagggttgaaaaacactaagcgagcggaaatgtaatgtagtaagaaacagaactctaggcggggagaaaacctagggaggtaaaaggctgttcttcccgaagcatcactg

SEQ ID NO: 512551 - DNA, 185 bp, Homo sapiens
aggcgaagactgggggtaggcaccgggacatagcacatcttctaaccgctccaggcctcggcagatacgctttcctcagtctctttcccctggccggtccgggaaaatctccatttccttccagacggaacacctccacagtcttctccggatccacagtcttcgcgggaggggtaccgagctcg

SEQ ID NO: 512552 - DNA, 104 bp, Homo sapiens
  misc_feature (32)..(32): n is a, c, g, or t
  misc_feature (100)..(100): n is a, c, g, or t
tgaggctctaagaaataccagacatgaaagcnaagacatcattcctcagcaacagttcgggtcagtcttattgttctcatttatagataagaaaactgangctc

SEQ ID NO: 512553 - DNA, 270 bp, Homo sapiens
cgccatcgcgaacggcgtctgctctttctgcatcttgcgcagcacgtcgacgagcccctgcgtctcgggcacgaagagcacgtcgcgccgcagcgtgaccaggttgggcagcttcacgttccgcgcgtcgcggagaaaatccttccagtagagatacccgacgacctcgtcgagctcttcgcccttcgagagcggcacgcgcgagtactcgtgcgcgcgcaggaactcgagcgccgaggcgccggggatgtcgatcggcacgtagagcgc

SEQ ID NO: 512554 - DNA, 114 bp, Homo sapiens
cagccggtaccgaatcttcgtcccatcagcggatttctatacattgacctcttgttggttatcaacaacagcagtctaacgacgtgtcaacagtgacgctggtttgatggtagc

SEQ ID NO: 512555 - DNA, 366 bp, Homo sapiens
ttctagaggatccctcaaaacgtatagaacgatgagggagaatgacgagggagcaagcctgcatcagagcacggctgatgtcacggaagccaccaaaggcacccaccagagccttccccacctgcaaagccccttgcagcacccgagagggcaagctggcttattggaggccatgcgtgagtccagtgacagagtgggacatgtgggactgggctggcctgttgcgagtgcgctgttcactgtcaacatgtgctcacgccaagtgcagtgacggacagaggatagagacgccggggcacgctgacctgggcccgcagattgccgctcacatggagacggcgtcttgcacacacgctgagcaacttg

SEQ ID NO: 512556 - DNA, 257 bp, Homo sapiens
gaagctgacccttggtgacgatgtacgcccggtcgcacagcaagctgctcacaaacctcacagacaaagtgctttcggtgccaggccagactcttccacacgctggatagtcctcagcgaactattatctcaatcgcagccggagacaccgggtcccgcagaactctcgcagtaaatggctggcccgcaccagtggtgcaccgatccgttccagcaagctagactgaaggtccaccaagcggcctcggacgcacttg

SEQ ID NO: 512557 - DNA, 205 bp, Homo sapiens
gcaggcgaggcccgcaggtctacagaccaaggcacgcacgcaagcgccgtgaagagcgcctccaggccaagaaggaggagatcatcaatgcactttatccaaggcaggaagagaccaagaaataaaacctcccactttgtctgtacatactggcctctgtgattacatagatcagccattaaaatataacaatgccttatctgcg

SEQ ID NO: 512558 - DNA, 462 bp, Homo sapiens
gcaatttcactaattcacttatctatttctgcctaaacataacactgttacttacaaatacggcttatatttgaatctcgttcattgtttattgggtaataaatcatactttatcaaaatattatatattcctaaccatgaacactcaacgtctttccatttagttctgttttctgcaacttttttctgcaaagtttagtatattatcagtgtataagtgtttcgtctcattggtcaagtttattcctaagtattttattctttttgatgctactgttaaatgtgatttgtttcctcaattgccttttcagattgttcatagctgcttcttgaattgtaactgacttttgtgtgttgattttgtgtcctgcaactttgctaaatttgtttattagttctagcagttttatgtgttgtgtgtggaatcattagggttttctacgtacaagatcatgtcaccta

SEQ ID NO: 512559 - DNA, 958 bp, Homo sapiens
  misc_feature (957)..(957): n is a, c, g, or t
gagcggttggacgtgttcgcttgggttcctgctgcggcagctacctcgtcggatctctctgcatcgatcgccgcgtcgctaatgctactgaccgtactcgcgcgcgtattaggagccgcgttccagcctcacaccccacggtgctgttcttcgacttcacgtaaaggatctagtctcagacacagaagcgcctcaggcgcggcgcaatgctcgagcggcacggcgggggcggccggagcctctctcgggggagccgcgcctgatgaggcggacagaacccccctgacgcgattggcgtgtgcttctgcccgccaccgccctcccgtatctcacccgggccgtccctggctcatcgtgtccctggccgcggtaggcagtcggcggtcagcggctctcctttccacagccggcgctccgcgaccgcttggctcctgagcccgtcgggtaggctctcctcgagttcccgctcttctccccgttccctcacctctttctttcgttacccgtccccgagcccaaccgatgccgggcctcagtgatcgccggtccatggtgtgtcggagtccactctgaaaaggatctggatttcgggccgctgcttgagcctggcgtccccgagagtgcaggcgtatgtgcgccattgtcggtgccatctcggcgtgcctccccgtgtcgggatcgggcaccgtcgctccttcttcgttgcggcgctcgctgagaattatctccgaatggagcatcccttcggcgaggtttctccgctttccggaccaatcgtcctctaccccgtgttaggtgcgcaggagcttttcacggtttcatgacggtcgttgatctgtgcagcctgtttcttggcggttcccggttgggtcccaaaaaaactttctcggtgggtgggtcggggtgcctagccgtcgttgttttcacctactgggctcactttcgtgcgtgttctcng

SEQ ID NO: 512560 - DNA, 168 bp, Homo sapiens
ctccattgcacattgttacctgtgagtgtatacgtggtgagagaaagcagtgagacctctctctctctctctctctctctctctctctctctctctctctctgtctctgtctctctctctctctctctctctctctgtcttctcttttttcttctcctcctcgtgctc

SEQ ID NO: 512561 - DNA, 86 bp, Homo sapiens
ggatttgctggtgcagtacaactctcgaattcgagttcaagcttctaacgttagaagcttgaattcgagcagtagtagtagtaggc

SEQ ID NO: 512562 - DNA, 354 bp, Homo sapiens
  misc_feature (321)..(321): n is a, c, g, or t
ctagcattgtcatgctcgctctgtgctctcttcatcttgtctggcccgagcaccctgccacctgcagaattcacagtcctgtctctcttgtctccctgcaggctgtggttcgtgagcacttctgaggagcagggctgggtcctgccacctacctggaggcccagaatggtactcgggatgactccgacatcaacacctctaagactggagaaggtgagggcttgcaggtccaaggggcagggagcaacgcggcctctggaggcagctctctcactctttccctagaaccaacagaacccttaaagtgagctgagccatatnctagcctcctcccttaggatcccatctcagtac

SEQ ID NO: 512563 - DNA, 210 bp, Homo sapiens
tgtagaaagtcaggctggggagcaggctcttggcggggtgcgggggtgttatgcaatgcagcagccgcagtgaagcagtctcaggtcacgctcagggtctcagggccagtgacagctattgcgatatccagagcaccaagatagtacctcaccctgtagcttgtaccgtcaccctgtatgctgtaccgtcaccctgtatgctgtacctca

SEQ ID NO: 512564 - DNA, 221 bp, Homo sapiens
cactggcagcggaggtctgctccctagagggcgaagggggcactgaaggtctcccatcagtagacctcttactctgatcgcttcctctattcagtgggctggtgagcatctgcgccagcacaagtttcgaacgacctatctcccaaggagaaccaaggacacacatgaccgttcaagaacacatgactagccagtgaacaagggcacaggattaggggtgg

SEQ ID NO: 512565 - DNA, 134 bp, Homo sapiens
ggggtgatctagaggatcccatctcaggcaggtacgacgagctggagcccaaaatcacccatgagtccaggacaaagccaatgtcatccgcggctctcccactcctgcatccagtccctccccaagcctgagat

SEQ ID NO: 512566 - DNA, 307 bp, Homo sapiens
tcagcggactctcctactgtatctacaattctactcctggattttaaccacagagaaatgaaaatatatgtccacacaaagatctatgttcgcaaatattcagaggagatttattcgtaatagccaaaaactgggccgggcgtggtggctcatgcctgtaatcccagcactttgggaggttgaggtgggcggatcacgagctcaagagatcagaccaacccggctaacaaggtgaaactccgtctctactaaaaatacaaaaaattagccgagtgcggtggcatgcgcctaggatacagtagggaga

SEQ ID NO: 512567 - DNA, 513 bp, Homo sapiens
gtagaggtcatagttactcctttttagcttttttgagcccaaggcattatctcttatctttttatttgttccccaagattggcaacctcttctgccagaactgctgcagtgtcaaatctcaagagtattagtcttgtgttttcagtttgtttttcattcttggtccttgggggtttatattaactttttataagcatagctgtgaatcatttaaaaaggacagttattataattttatccacatttctacatgtttcgcagtgggataagttgcagggtctcttaactgccaaggtaccaagtaggaagttcttgtccaactcgttagatgtacctttttcattgtgttatcttgttggtttctaccagttattcaagtacttcctctcagtacttttttttgttaacttttgcaatttttttgtttttgcagataataattttacaggcttttgctgcaaaaatggaatcagtagggaagctataaaatgacatacttaatcttggtttgtg

SEQ ID NO: 512568 - DNA, 228 bp, Homo sapiens
cgtgagttccttgtctatgaactatcagtatattattaaagttatgtgtacaaatttttaaataaattcattatatgaataatgtatgagacatgagatttccataatatgtgctttgcccttttccgcccaggcattctcccaactcccactcctatatgatatacaccccttcataaaattgattttacctcaggacaaatacaaatgaacagacaaagggaaaca

SEQ ID NO: 512569 - DNA, 279 bp, Homo sapiens
aaactcaaaagacgacagtaaacataacaggacaggtacgcacgtccatgtacttcttacgtcccacaccaaaaacacttactcacgttaaacacctggaccaagaaaatgttcaactctcacaaaggattccaagcttaatacataccaaaaaagggctagactatctgacaagagcacagagagaaaaaaaaaaaatttcaaaacaaacaaacatgaacaacaccaacacttaatttacacttcactgaagtatatatggggacaatcctatttaca

SEQ ID NO: 512570 - DNA, 130 bp, Homo sapiens
  misc_feature (77)..(77): n is a, c, g, or t
gacagtcctagagagcccgtagcttcttcgctgaactcaacggaatgagcattttcccccgcaatgaagagcatcgngcgtggcgagattgtctcgatgtcattgaacggatagaagttcatgaacctga

SEQ ID NO: 512571 - DNA, 102 bp, Homo sapiens
agctggtaccccaccggaggttgtactcagggtctgcttttctctgccaagctggctgataaacggttaccagcgccacctggcagtacaacctgccggtgg

SEQ ID NO: 512572 - DNA, 274 bp, Homo sapiens
ctgccttcactgctcacaggtcaacggagcttgggcccagctcacgcaggtattcagcagcaggcatggcacgtcagccagcaaacaagtcactcccatgcatgaaaagcatgcagaatggaaggtgccatgtgccgtgaaatgatacatgatcctctggtccttcagggaaacccttgactcttcactaatcctcaaccttgacatccctttgtatggcttttgtcacagcgagtcaccagttcccctacgtgcacaggcagcacacatctcg

SEQ ID NO: 512573 - DNA, 360 bp, Homo sapiens
cccagagtctacaatgtgtctgaagtgtactgagaattccagtgagaataagtcacacgtggcttgaaatttatgatgctgtctaccaaaaccgtgggctagaggccagcacctaaaaaaccaaaatcaaaatttgatcaggccacaaaagaaaacaggacaccctcaaacacagattaccttacgttggctcctgacgagattacaagcctcttgtcaccaaaaaacggaaacagcggttgagaaagaagccgggcgcatagcacaggccttcaaaggttcgctttaagcacagaaagacagcgctttcccgagtcctcgccccttggggcgatctgcgcgagtcgggacaacagacag

SEQ ID NO: 512574 - DNA, 202 bp, Homo sapiens
cccctttgaaaaaggggggtttttttccaaatttgagggccgggggtattttttgggtgggtttcctttaaaaggggaaagatttttggtttgggggtattaagagccccttgggtgggggggggggggtattcccttccccccttaaccttgggggggggggtttttccaaagaggaaaaaaatttttcttttttttttta

SEQ ID NO: 512575 - DNA, 183 bp, Homo sapiens
taggcggactgatatgcgtctcacagagcatgtagcagcaagcgccccctctaacaggtctgtggattctctggcttttctggtagtagttcttggagcaaaagttcacagtgtgattctctgtgcacgctctgtccgtccaagtgggagctgcaagttagtcctgcctcctatctgccatat

SEQ ID NO: 512576 - DNA, 183 bp, Homo sapiens
tcatatagcccaggtttatcatcaagaaacgcaatataccagcaacagtgatcattaagtacaaatgcatatctccagcaagcttcctgagaatttcttcagacctggaacgcctctcttgatatccgccgactccatacaccctctttccacctggacgctccgatcaagttacactatctt

SEQ ID NO: 512577 - DNA, 119 bp, Homo sapiens
ctcccacggcaagaaagttagagtttacgcccgattaactactgactatgtcaaattggattttggcgttacgtttggtctatggtgtagcctgagaataggggaaatcagtgaatgaa

SEQ ID NO: 512578 - DNA, 377 bp, Homo sapiens
agatgaagcacgtgcaatctaaaggatacccaaaatgaacgttttgtaacttctcaccatactttcctctaaggagattatctcatctggactcatgatattacattgcaagacgctggcctttgtcctctagagactgtctttgttcaggaaagaaattagacaccatggcttgacctctctcaggttagcccttttttcccttttcctgtgagatacagtgatcactaagtatgcattttggctcataggaccacagagccaatgttgggcaagctagtcaccttccttctcttatttcttgatctctcctataatcagtctctttctccccctttgtttctgtctcctcttctgttttctcgctccccactccg

SEQ ID NO: 512579 - DNA, 361 bp, Homo sapiens
atctctcacggatcccacgctgttaaattaactataagacgatcaattgttggtcctgctcacagcccagaagacaacagcaaagtgtttggcgcttgcacgcgatagggacataaatgttaggaagctcacatctctgttttcattcattcttgcttgagtgctgtcatgaatcctctggactatccagcagaatgctcatataagtcagtgcatactcttacctgaggtgctttctctcgctcctggcctgagtcacattgcttggccctatggggtggggattaggatgtgagaggttcgaaccgtttctgcctcatggccaagactttgaatggtgtctccgtgttactttgacgcg

SEQ ID NO: 512580 - DNA, 702 bp, Homo sapiens
aatctttattgtaataactatatatatgtgtcggaatggttacatattgcagcccttagtatttgtggtagtataaatgtatcacttctaaacagcaaactgtaaaagttttaatagcagatatctgaagtactattaaattgcagggttcacaggccgtaactgtctactacttatgctataatctgtatacatcctgtatgctgagctggtaaaaatacactagtaaataaaatactaaaatattttatctgctaaaaacaagcgcaggtgcaacacaatatattaccatagctctacattgatgacctgtcacaagttgcattaacattaggtgatttatgcctaacataaagtgactaactataaaagaatacataaggctacccccgtaccacatcactgatttcaactagaaacactggacgtggtacacacgataacaaaaaacataccacaacatggcactcaaaagccaggtggtacaaacactactagacgcactccgagtggagtaccaactgactgaatagcgccgataagcaacacgcacagcgggacacaccggaaaggcgactccaacgaacgagcacgcccaactgacgactctcagaacgcaacggatcaccctaagacaaaaagccagcggccaacgctgaaccacacacaagacgaacgcagaccaaccaaaaaaaaaccaag

SEQ ID NO: 512581 - DNA, 306 bp, Homo sapiens
  misc_feature (98)..(99): n is a, c, g, or t
  misc_feature (239)..(239): n is a, c, g, or t
  misc_feature (267)..(267): n is a, c, g, or t
ggaccgtatgtatccccaacactaaggtatccggtgttatgaatcttctgagggcatcttcaggtagatttgttagcctcctggtgtgcttttctttnngagatggagtctcaccctgtttcccaggctggatgcaatggcgagatcttggctcagtgcaacctctgcctcctggtttcaagtgattcttctgcctcagcttccggagtagctgggattacaggcatgcatcaccacgncgggctctttttttgtgtgtgtatcttnagtagagatggggcttcaccgtgtggggcgataacatca

SEQ ID NO: 512582 - DNA, 331 bp, Homo sapiens
cgagaatgtacgtgacaactcaagaaagttctgagcatggtggacaactatgtcattatgatgataccatttagagactattccagcaactcctagctgcagttaatcagagaagattccattaatcactgcaaaaagtgaagatgccagctgcttgtctgcaaagtctgtggagcagtactatggtctcggaaaattggaaaaaggagagccgctgagtggcaaagagcaatgacaatgcgaaaagtcttacaagaaatcctggagaagaatccgagatttcaccacctgactcccctcaaaaccaagcacatcgctcactggtgccgct

SEQ ID NO: 512583 - DNA, 757 bp, Homo sapiens
ttgtgccatgggccaccccagcttcgtgatgagtaactccttcaccaaccaggtaggatggcgcagatcgagctgtgtgacccatccatgacaaagtaccccgttggggttcaatttcctgacccaaggaagctgtgcatgagcgcagtaggcgtgaagcctcgaccatgggcaagcgtgaatgtgaagttgaccaagctaacgtgagaaagcaaagcccgagataccgtgaggctatgtccatgtgatggcacccattcaagccggatcagctaccgcatacttgagagccaggtctgcgtttcacccatccaggcgtgcgtgtcctatgacgccagcgcccacatcatctccgtcccgtaagagactacactggacatccaagcgtttgctcgaatatgggtatgttgtcgagatcgtccgcctcatcgacatcgtcatgagagggcgtgagtcagctgtagtattttggacctcatgctgacagcacgatccatactgtatcctaaatgttgcgacacgcgtggtaacatgaggtacccatcttgcaagcacccgtgtcgatgatggaggtcccagacacagggaaccatgagcatcagtggtcttggaacagctcactaagtcagtccttcctatagctctggaagtcagtcgtggagtcacgaagcccatgtgtggtagtcatctaggccttcactggtcgtggactttatacctgttataggttaaaggccagaggtctcagccttgacaa

SEQ ID NO: 512584 - DNA, 258 bp, Homo sapiens
tttcaccatgttggccaggctggtctcgaactcctgacctcaagtaatccacccacctcaacctccaaagtgttgggattacaggcgtgagccaccgcgcccggcctaatattggctagtattttcagtacaacgtttattaaatggtgaaaaatggtttcctgtctcattcttttttttttttttttttttcaagacagagtcttactgtgtcacccaggctggagtgcagtggcgtgattttggctcactgcaacc

SEQ ID NO: 512585 - DNA, 406 bp, Homo sapiens
cacgcgtcggccccggttcgcgcgggaagaaccccgtgcgcactggtgctccccgtgcggtcctcaacccgttccggcgctgcgagcgtgagcccgacccagcgtgcgccgctccgggaggtcgtgggatctggggctgccgcggggccgaaatgcggcgcgagggtcgcgggttccagagctgcggtggctagggacgtcgctgggggcgtctcagggagcgggctaaggagagcgcgtggccgcagcctccctcgcgcagcgccacacgcggtttccgtggtccgctctcccgtcgcccggagactgcgcgtcgaacctgtcattcccttcctgtgccgcggggacgtctttgggatccccggggcccaggcgccccccccccagcctctggcctcgggctcca

SEQ ID NO: 512586 - DNA, 118 bp, Homo sapiens
aagcaattagaagttgtctatccatctatctagaaaaaaatctatatatagagagaaaaaatgtatataatatagagaaaaaatatatatataactatatatagttttatagtttata

SEQ ID NO: 512587 - DNA, 370 bp, Homo sapiens
taatttaacactaaccaatgaaaattcccttcctcaccagttcagaagtatcctacaaagaaaaaaaaaaaggataatttaacactaaccaatgaaaattcccttcctcaccagttcagaagtatcctaaaaagaaaaaaaaaaggataatttaacactaaccaatgaaaattcccttcctcaccagttcagaagtatcctaaaaagaaaaaaaaaaaaggataatttaacactaaccaatgaaaattcccttcctcaccagttcagaagtatcctaaaaagaaaaaaaaaggataatttaacactaaccaatgaaaattcccttcctcaccagttcagaagtatccgtcgacgaaaacgcgaatttagt

SEQ ID NO: 512588 - DNA, 368 bp, Homo sapiens
  misc_feature (37)..(37): n is a, c, g, or t
  misc_feature (106)..(106): n is a, c, g, or t
  misc_feature (144)..(144): n is a, c, g, or t
  misc_feature (157)..(157): n is a, c, g, or t
tcagccctgctcccagctgctttcatgggctggcagngtctacaacttttcaggcagacagtgcaaggtgttagtagatctacagttctggggtctggaagacggnggccgtcttctcacggctccactaggcagtgtcctagngtggactttttgngggtgctccaaccccacatttcccttccgcactgccctagcagaggttctccatgagggctctgccctgcagcaaacttctgcctgaacatccaggagttttcatacatcctctgaaatctagtcagtggtttccaaacctcagttcttaacttctgtacccctacctgcatgcccaacaccacgtgggctgccgcttgagacttgcacct

SEQ ID NO: 512589 - DNA, 767 bp, Homo sapiens
tgctgacctgctgtgctcgcagtagattccaaaaaaaaaataaaaaaaaaaaaaaaaaaaaaaaaaaaaaaaaaaaaaaaaaaaaaaaaaaaaaaaaaaaaaaaaaaaaaaaaaaaaaaaaaaaaaaaaaaaaaaaaaaaaaaaaaaaaaaaaaaaaaaaaagggaaaaaaaaaaaaaaataaaaaaaaaaaaaccttgtgagccgcttggcccaagggatttttaaattggggcaagttaatattgggggcccaattatgggctaattgggcaaattccccttttggggggggttttaaaaataaaggggccggttttaaaaaacctcggactgggaaaacccgggggtaacccaatttaaaccctttggaaaaaattccctttttgccaatttggggaaaatgaaaaagggcccccccgatgggcttttccaaaaatgggcccaccctaattggaaagggaaaattgaaggcgtaaaattttgtaaaaatttcgggaaaaatttggtaaaaacacgttcttttttaaccaaaaggcccgaatggggcaaaatcctttttaaataaaaaatttgcccggaataaggttggagggtttttccacttagaccaaaacgcccttttaaaaacgtggcctaaacgttaatggggaaaaccctttttaggggagtgcccattgggaaacatcccctataaagtttttggggtaaggcccgcttaaagggaccttagggggccccttttgattttgggcccttatacgggcg

SEQ ID NO: 512590 - DNA, 2490 bp, Homo sapiens
agagacagggttttgccatgttgcccaggctggtctcaaactcccaggctaaagcgatctgcctaccttggcctcccaaagtgctgtgattacaggcatgaaccatcacacccggccaaaattttgccgctgatttttagaaattgaattattattttagactgaagttgtatctttttaaaatgaaagccatacctccgtatttctaagaaatcagatgggatcatcatcccatcaggtattcactgagctcctgcttgtgctccactgtctgctcagtgctggttctgtattgcggagaggatctaaccagaaagtaatccaaagggctacatctgtctttcttaatgacgaaccgacggctttccaccttacccttttggctacaaccagtgggattgactgctgtcttattgactctgtttatctagatatggtggacatattgcccagttagatgggctaagataccgatagccccccaaaatgccagattccagaataaatgaaatcactcagtcattaaggtgatatatttaactgggctggctgggctaatttgtccatgttaccaattattattgagcagacaaagtcaggtaatgatggcagcaaaagcccatctggggcctgagactagaggaggaggaggctggccagaccctcctcagatgcgcagaggacagcttcaggataaggagagatcagatcatgcctgctccatctcggcgggctcatcttctctcgcccccatctgcatggtcctcttgattttcttcataataataacactgaaatcctttgagtgctaacattactgtaagtgtcagctgtttatgctgttatatgccttaagttatttcagccttaccacatgcagtgaaggagacactagtattatccttatgttgcagctgaggaaactgaagtgtggagtttaagtaactggcccaaggtaacagatgcagtgatcagaggagcagggacccacagccaggcactgtgacacagagcctgcgctcctcactcatatcctgcttcaggcttcacaggtcttgggaagaaaaagagaacgtttacaccctgaataacattgcaaaaggatagtgcgctgtgtctgccggtcagcagagctctttgatgatataagtaggagacacctaagcaaagtaaagttgaggtcagtgagctccataacaggatagtgcgctgtgtctgccggtcagcagagctctttgatgatataagtaggagacacctaagcaaagtaaagttgaggtcagtgtagctccataacaaaagatagggaatgctctaggtctcctcaagaaaaatctacaccatggttttctgttttcacctacagcttagttgcccaggaagattcatttattatttatttaagtaatacatcacagggacgagattcattgaagtgaaggtatttcacttccaactgtcctacagggaaacaatgagcctaaataaatcctacaaattctccctggagagggagcagtgattgattcatttttgcatctgtcaaatgcctctatagtccaaagagtgcgttttgttccctcccttaacaagattctcttacctttgttttgttcaggctttattggcgctgtgtgtataaataagattacaatgaatagaaattaacactgtatcccagttttctgagtcaaagccccaattccaaacagaaaaaaaaaaatcttgttgttaaataatatatgggtattatttgtcacatatgataaatattgctactcatgcccaaaaagagactttacaactgtccttgtgctagacgaatgactggtctacaggctacagactattcacagagctttggggaagccctgaaactcacctgatagcagtgtccttgggactgaatataaacttctacagttacaaggccttaagaggttccaaagtagagcaagtttggggacttcaaaagcagtgcctgggatggcagacaatcattgccgtggtgcaggggcctctctatgatcccatcgctgtgcccccaccgagacccaggtggacagtttggaggtggggagggagctgggatgtgactcagcagtcatgtggggcaaaaccagggtgggggcacgaccctgctagattagcctgaaggtggggcaaatgactggcaccttgtcacaagacattgttgtttttacgcatttgacttgatttcacccttcaggctcagggctggccctgtgaggcctttccactgcattcagttgttctttcttgaatgttagagggaggaagttggagtctctgttctggggaactgaacacaccgcacgcagcccatctggcctgtgccgtgacccacgcagcacaaatcactagttccagcggcgacaacactaacatttatacatcatgcaagttgtagtcttttattttaacttaaactttttattttcaaataatttcaaactcacaaaaagttat

SEQ ID NO: 512591 - DNA, 1081 bp, Homo sapiens
  misc_feature (1081)..(1081): n is a, c, g, or t
agaagctgcagaattgaaagatccaacagatcattaccacgctcagcctctggaggataacctttttgaatggcacttcacagttagagggcccccagattccgattttgatggaggagtttaccatggacgcatagtactgccaccagagtaccccatgaaaccaccaagcattatcctgctaacagctaatggacgatttgaagtaggcaagaagatctgtttaagcatctcaggacatcatcctgaaacctggcagccttcatggagcataaggacagccttgctggccatcatcgggtttatgccgactaaaggagagggggccataggttctctagattacacacccgaggagagaagagcgcttgccaaaaaatcgcaagatttctgttgtgaaggctgtggctctgccatgaaggatgtcctgttgccattaaaatctggaagtggttcaagccaggctgaccaagaagccaaagaactggccaggcagattagttttaagtatggcgcccagaatccatcaggagcacccttgccagagactacccagccagctcctaagaatacctccatgagccctcggcagcgcagagcccagcaacagagtcagagaagggcatccacttcccccgatgtggctccaaggtcaggcaccaagagcccacaaaaagagcacggcgggtccgcatgcgtgatcataatcctgagtgtaggcattggggggctaataattcgaggaaaattattggggcaagagtacatatatgacgttgagatataatagcaggatagtgaaaaaagggggaaaagagggtattgagaattgcgggggggaaccacagaggggtgacacgaacgttgccggttgtctccgcgtaaagttaagaggcaaaacactagccagaaagagaaaaagcgggtgcaaaaaagtgtcgtaggaagtgtggaacagaccgggtaggagagtaagcaaaaaacttagggtgcacacaggatagtagataaaaaagaacgagtagaagactagagagtaaatagggaaggactgactagtctgtttgctgtacatacaggn

SEQ ID NO: 512592 - DNA, 418 bp, Homo sapiens
gccaggaggagggtggatctccccagagcaaagcgtcggagtcctcctgctccttctccttcaactatttatcatagttcatcgaaaggagcataccagtgaaagtacaactacaacttagacagatgcatgcgcgatgtcttatatgctacatagacaggttacaatatcggacagaggatcacgatcacatcttacggagcccattactctagagactgatgtactgcgtacatttgttaatcaatgtatagtacaagctggacatactggtgtttgcaaataagcgcaactacttaacacttaccactatacgcatgagcatcatgtgttgcattagctgaccatctcagctatcacctggagatacataacatgaacatatgaatatgtacatgactacaatgcttccaggtgt

SEQ ID NO: 512593 - DNA, 112 bp, Homo sapiens
acccaaaccaactccgagccggccaaggtttactacgcgtgacgaacttacaagcgattttggactgggctaatgaacatgacacgtatgtcattttggatgaaatctatgg

SEQ ID NO: 512594 - DNA, 122 bp, Homo sapiens
tagttagaagttcaatagcaagaaatggatgtagctagagtagtgtcaggtaaaaacagcatcttttaaatggagttgtgggcttctaaaatctaaatacattgctattgaaacttctaaaa

SEQ ID NO: 512595 - DNA, 1271 bp, Homo sapiens
tgcgtggcaatccctgacgcaccgacgtgatgcccagggaagacagtgccgaactggaagatccaactacttccttaaagatcatcccaactattggcatgcattcatccagcaaatgttatccattgtgggcagccagcacaatgtgggcatccaagcagcatgccagcagcatccgcaatgtccctatcgcgggcaaggctgtggtgctagatgggccaagcaacacccatgatgcgccaaggccatccagcagggcacctgagaaaacacacccagcatctggcagcaaactgcatgcctccatatcctggtgtggaatgtgaggctatatgtgttcaccaaggcaggcacctccactgagatcagggacatgttgctggacacaataaggtgccagactgctgcccagtagctggtgccatatgccccatgtgaagtcactgtgccagcacacagaacactggtactcggagcccgagaagacctccattttatccaggctgttaggtatcaccactaccaatctccagtgggacaccattgacaatcctgagatgatgtgcagactgatcaagactggagaccacaagatgggagcccagcgaaagccacgcgtgctgacacaatgctcaccatactcccccttcctccatagggagctggtccatcccaagcaagcgtgctcggaccaatgggcacagcaatctacaaactctgaaagtgcttgaaattcagagacggaaaactcgtggatatcctctaataccctagacatgggtgtaccgcgactagatgccaagatagtctatgacctgaagacattgggctacacagaactgatcgcattcacataccccgacatgcaatgatacaaccgaggaacaaaccgactcctgtccttgacagacgcacacagatacacaaacacacacttacggaaaaagagatcaggcgccgcactgggccagaaaacacgatggacatatagaggaccgggataacccacatacagaagtgggaacgccacaacagaatacgaccctagtagactgtacaaaggaccccccaccaagataatacaccacgggacacactgacgaggtcgccaccacagactcgacctacgcagagaagcagagcacacaaacacaccaacaagatacaataaatactaaaaaacacacaggaggcgcacctaacacaagaggacgcaccaacacagccacctacaagctcgaacagcatcacaacgacagccagaagacagg

SEQ ID NO: 512596 - DNA, 249 bp, Homo sapiens
ttgttcgtcgataagccccccggctggcgagcaggctgatcacttctttgagtgcaggaggaaacaaaccccgagccctgcacgtaaaataacgtaggggcaaaatcgggctccattctgagcccctcttcagcggagcattccactatctgggcaagcttgagcttcacatagacctcatcgcccggctgctcacccagcaacaggcgcaaatccggacgtgcgctacggatctggcaacgagcatcc

SEQ ID NO: 512597 - DNA, 151 bp, Homo sapiens
ctagaggatccgcctcgtgccgtgtaaggttgcaataaatattagttgctgtgatcggaatgaataatcatgaagtgtctcatgtgtagttgcatatctatcgtacttagatccatatagcgcttggacgacccataacccactggatccc

SEQ ID NO: 512598 - DNA, 599 bp, Homo sapiens
ataatatcacgcattgtacgtagtgattatcatagccacaagtaggctgcaactacttatcattacgtgctttagatctagcacagtcatgtgtgctacagatactagagtgagctagtagctgtgaagagatagatggtatggcgaggtcagtcgtcctagatcagatgtgacgcagagcttattagccatgaagaatcctacagtcatagtactcaagtgtaactttacagtatttaaaaagacaaagtattttgtgcgtgcagattatgcactccatgaaaagttcctctggactctggggccaaaagctgttgattctcataagttgaccgatgtcaatatatcgagctgttcccgagttagtcaagtatgtatcacccctagcatgatataaaaaggcacacagcagttgaatgaaaaagtgagcataatccactttgtaataagttatagtcctaagggcatttgtaccgtcctcccattttgtgtctcggaagagttaatgtgacctgtgtaagtcggcctagataggtagctttaacctatgtcaaaatgtctgcagcagtttgtcactgaagattagtccttttttaatc

SEQ ID NO: 512599 - DNA, 1342 bp, Homo sapiens
cggacgcgtgggtcgacccacgcgtccggttgactccaggtgctctccatgtcttctcacaagactatcaggattaagcgactgcctgtccaagcatatacaaaagcaagatcgtaccattccccagtgtaattcggcgttatggctggaaataatatcatggtacacagctccacagaagggagaacaattggtagggaaaaaccagaggactggcgtctataagggagattgcaacagtgagatggcaccagcagtagtatactgctgtctgcagatggctcacgatacactgtttaccaatagtcgagaagcctgacaaatgtcgaccacgtatcgtggcagggattacggacagatggttttctcctcatctgataatcgtggtctttgaaccaccgcttgcgtatggctcgagcaggttcaggactacagtagaacctaggtggtagacggtccatttctcctgtttatagacagcaagaaaaagcatggacacacataaaccacaccaaagatagaaagaacaccacaccatagcacagaagaggcagagcggccggtcagtccgtgcacgcgtaagggaagctctcaccacgcaaagggaagagagtcgccaaagggccgtactctgagtgtggacgcgcacacgtaatcctccctaagtgcgtcaacaagtggagcgagtgccacacacgaagtgggcgaggatgctcaacggatagtacgattagcacacacgtgaagtacatggtgttcaccgttgcgaccgcgcgttcaccttatgaacacacacgtgttcccaagtccctatatagattgagcggcgaacacacctgtgggcgttgtatacggcgatgtgttgcagtgaaactgtcctttgtggtaaagacaaggcacaagagtggacccatattatggccattcacggagatggaagggccagacgtacaatgcgaaatgtgttcaaagatgatcgcacaatgagtaaataacactataagagttattagcagagtactattgatgtgtcaatgagggagcgacaattaagtgtgggtgtgcgattgataagcattagtcataatacaagagatatatttatatcacgcagtagagtgtgtggatataggtgattggttgggtaataaaatataccatctgtggataaaattatgggaacgatggaagtggggatgcgtgtgtagtagaagtaaatatggggaattagtttgcacatcatccagaggcgtgtgaatatgtgagattaaattagatacagtaaagaaagaataaaaactatgtacagaagagggagagaatatggaatatatgataaata

SEQ ID NO: 512600 - DNA, 159 bp, Homo sapiens
tagagagtgtaacataagatcagtggttgacagggatgagaggaataataggggtgactgcttaatgaatgcaagatttatattgggggtgatggcaatgattctggaactagtgtagatggtaactgcctgcacaaccattatagaagtttcttgttg

SEQ ID NO: 512601 - DNA, 341 bp, Homo sapiens
  misc_feature (1)..(1): n is a, c, g, or t
ncagtgcagtaagtcgagctcacgttcctagaccatttcattatataagttgagcaactcatacatacagcgggaatgatgacttatatgggcgtgtcaagacagcattcatccgcatttctgtggccaaatgcgttctaacattcgataagcgagtactcagtggaatgtttggcaaatgtctcgtgactatgggaagctcgtccccatctgcatgctaataggatctcattctactcgtgtcacattaatactcccatttaacaggtacggaaagcaaggcacagaggtcacttaccgttgcggtcaccaaatctaggcagagcaaggctcgaagcaag

SEQ ID NO: 512602 - DNA, 749 bp, Homo sapiens
gggttcccttgcaagagtaaaattaaaatcactctttcgtctgggtgcggtggctcatgcctgtaatcccagcacttcgggaggccgaggttgggggatcatctgaggtcaggagttagagaccagcctggcacaacatggtgagaccccatctctactaaaaatacaaaaaaattacgctgggcatggtggcgagtgcctgtagtcccagctactcaggaggctgaggcaagagaatcgcttgaacccaagaggcggagactgcagtgagccaagatcatgccattgcactccagcctgggcgacagagtgagaccctgtttcataaataaataaaatcactcttttacttcatatatttctgagacaggatctagtggtacgcaggctggagtgcagtggtgtgtgatcacagatcatagtacgccatcgagctcaacactgggaatcaggcagtcattccatgactcagacatcctgagtagctaggactacagagtgtaaggccaccaatgcacatgggacctataactcaataacaaatagagacatgtacagggtacgtcacgcgtataatcccaaggggttaacacgttaaccaaacaatatgcagaagtaaccatgagtaatgtcaaacatgacaagatcaagagacattggagcttcacgactatcgtgacgggagtcataggggtcaatgccatataacaccaaagaacgttggagacggccaaggaaaggcagatccc

SEQ ID NO: 512603 - DNA, 369 bp, Homo sapiens
aaaaattcctgtttgggatttaaaatccagggctgtgtttccagtaaaaaaagcaggcagtcccttttagtttttcctttttaaatttttttgagatttttcatttcaggatttaaaactaaaccagtccattttaaggaaagtgtaactcccatggccccaagtttgctagttgcacttgaatgctctatcagggttgtttattaccctttttacgttttggaccccttgccgagactgtttaacttgaaaattaaaaaaactattgcaaatgccagggcatcaaaacctaaaagtggtcaaaaattatgggcaatttttttgtaaaaaaattttaatttaaaataaagtttaccagtttaaaaacca

SEQ ID NO: 512604 - DNA, 2557 bp, Homo sapiens
  misc_feature (422)..(422): n is a, c, g, or t
aatttgtagtcagagttgaagaccactgctctaaattagtgcaggaaaatgcttttatttctcccatgttaacttttaaaactagtaatgtacccagttaagttttgatggtttaaattccactaaagaacatattcttctaataactagcatttattacatgaaatttaagagtttaagttccatcaaactagcccttgtgtaagattattatttcttctctataacttcaaaatagatatttcattcaaactgttcaggtgagaaaacataatggatttttttttttttcctctggagctgcctgttcagggcacgatggaggaggtgggcacatttaaggtcagttcattaacctatggtccagagttctgatcatatggaagttgggaaaagagagcttatcacaggttggtatgctngtgaatggatagttttaattctcactgtctcaaaagagaatcagctctccagcagttctagaaaagctttgacaatccccaaggggcagtgttaccttactccttcactgcttcttagaaggtagaattaagtttctggaattgcacctacatgttttcttattaacattcagaattgggaatattaatttttccagtgagtagttttctgaaattggtaacttggagagtaaaataacgtattttgcttttcaattttgtgtttgtttacttttatgtaaaaatttgatatgtgaattacacagttctaataaaacctcatgccttttcattacatctaatttgaactctcaacttcatgttacagaatgctttaaagatgctttaatgaaaagtattaagaaaatatatagatttgtatgtcagtttatacttcagaaatccatatatttgtcatatttatttttttagaaacctcctaattggataactagatggtatttaaaatgaatgcccaaaaatatcttgtacctttgtccaaaagtttatctgttggaagccgccagccattcatgtagagagtttataagaaaataatttaaaattgtatgcattttatattactatggtatctgtgtaccatatttctaagtattcattattaaattggtacttcttaaaaccataacctggcttgccttttagtgttaaaaaaaatacaacattgtatatagagatttcttcttttatgaagaagagctgacgtaatttattagcagtgatctgagaaagacattaaataagtttctgagagtgatacattttcaaacatgaagagtgacaaccaccaaattaagaaaaggaaacaactcagacttggaattttatacgaatttcatttctatatgtgcctggtattgcctctggcataacttagaggaaattgttctacctatatgtcctcagtttcttcatctacaagttgggaaaaacattttcctcttaaaattgtgaagaggatttatatatttatatgatatattgtatatattaatatatttaaattgcttagagtttctagcacatagcaaataataaatattagttattagtataaacataaggcttaaagtcttggatttgatgcatatgacttaatttgtatttgtgctagtagctgtaatgtcagtgacaggataacaagcaaatgattagaaatctaatagtaatgcttgttcctttgctatctatgctaacaagtacatagatagcctaagataaattatacttaggatgaagctaaaatgcataactgagacaccttaaaattgtactaccttgtgctgttcactgccatcagggaggtagcataaaatgaaagataaagtctgaagactggatccaggcaaattcatgttctttctttgtaactcactttcttcgtcaacatttctgtgactcaatggatagcatatttccatcaagtagcacgtataacgtgatgctttcatgtttctgccttaaataaaataaccctcaaaaaaccaaaaaaaaaaaaaaaaaaaaactcgaggaaaagcaccgaaacccaattcaccctatactgaagggggtgccaattccctgagttgccctataccgcgtcgtgtttcaataacctgtcgccgttttacagtgactcgactggcaaaaccttgccgttacccaacttgacgtaattgcaataaatccccttttggccaactctcctaatagcaaataggccctgaccgataaggccttcaagcaatcgcctatcctgaatgtgcattgccaaattggcagctgtaatactgcgtacaaattcacccataaagcttgatcaataaaatcccttataaaccataggtcttaatcgagataagcccttatgaataacacgattgacccgatagcgatatccgagatcccgatttgaactgaaaccctaaaaacgaccttgattcaaaggccaaggcaaaaccctattctaagaaatgctctcttcgggaacctaccctcataaatttttccgttaaagggcccccaattcataaactgaacctataaggggccacctattaggactccccggttaaaacctaaggcggtgaccc

SEQ ID NO: 512605 - DNA, 1339 bp, Homo sapiens
  misc_feature (422)..(422): n is a, c, g, or t
aatttgtagtcagagttgaagaccactgctctaaattagtgcaggaaaatgcttttatttctcccatgttaacttttaaaactagtaatgtacccagttaagttttgatggtttaaattccactaaagaacatattcttctaataactagcatttattacatgaaatttaagagtttaagttccatcaaactagcccttgtgtaagattattatttcttctctataacttcaaaatagatatttcattcaaactgttcaggtgagaaaacataatggatttttttttttttcctctggagctgcctgttcagggcacgatggaggaggtgggcacatttaaggtcagttcattaacctatggtccagagttctgatcatatggaagttgggaaaagagagcttatcacaggttggtatgctngtgaatggatagttttaattctcactgtctcaaaagagaatcagctctccagcagttctagaaaagctttgacaatccccaaggggcagtgttaccttactccttcactgcttcttagaaggtagaattaagtttctggaattgcacctacatgttttcttattaacattcagaattgggaatattaatttttccagtgagtagttttctgaaattggtaacttggagagtaaaataacgtattttgcttttcaattttgtgtttgtttacttttatgtaaaaatttgatatgtgaattacacagttctaataaaacctcatgccttttcattacatctaatttgaactctcaacttcatgttacagaatgctttaaagatgctttaatgaaaagtattaagaaaatatatagatttgtatgtcagtttatacttcagaaatccatatatttgtcatatttatttttttagaaacctcctaattggataactagatggtatttaaaatgaatgcccaaaaatatcttgtacctttgtccaaaagtttatctgttggaagccgccagccattcatgtagagagtttataagaaaataatttaaaattgtatgcattttatattactatggtatctgtgtaccatatttctaagtattcattattaaattggtacttcttaaaaccattaaaaaaaaaaaaaaaaaaaaaagaaacaaaaaaagggggggggtaaaaacaccggggggcacagtctacgctccccgttttggcaagggggcccaaggggcggataaaacgaggcggcgcgggaaagcgggcggacatccccgggctgtgcggcccctcgggcggcgatggaccccacagaaacccgagaacaagttgggaccgcatcctgcgagttgtaaccacccggt

SEQ ID NO: 512606 - DNA, 1021 bp, Homo sapiens
  misc_feature (422)..(422): n is a, c, g, or t
aatttgtagtcagagttgaagaccactgctctaaattagtgcaggaaaatgcttttatttctcccatgttaacttttaaaactagtaatgtacccagttaagttttgatggtttaaattccactaaagaacatattcttctaataactagcatttattacatgaaatttaagagtttaagttccatcaaactagcccttgtgtaagattattatttcttctctataacttcaaaatagatatttcattcaaactgttcaggtgagaaaacataatggatttttttttttttcctctggagctgcctgttcagggcacgatggaggaggtgggcacatttaaggtcagttcattaacctatggtccagagttctgatcatatggaagttgggaaaagagagcttatcacaggttggtatgctngtgaatggatagttttaattctcactgtctcaaaagagaatcagctctccagcagttctagaaaagctttgacaatccccaaggggcagtgttaccttactccttcactgcttcttagaaggtagaattaagtttctggaattgcacctacatgttttcttattaacattcagaattgggaatattaatttttccagtgagtagttttctgaaattggtaacttggagagtaaaataacgtattttgcttttcaattttgtgtttgtttacttttatgtaaaaatttgatatgtgaattacacagttctaataaaacctcatgccttttcattacatctaatttgaactctcaacttcatgttacagaatgctttaaagatgctttaatgaaaagtattaagaaaatatatagatttgtatgtcagtttatacttcagaaatccatatatttgtcatatttatttttttagaaacctcctaattggataactagatggtatttaaaatgaatgcccaaaaatatcttataaactctctacatgaatggctggcggcttccaacagataaacttttggacaaaggtacaagatatttttg

SEQ ID NO: 512607 - DNA, 177 bp, Homo sapiens
ggcaggctctctagctgtgtaacagcacagctgtcacaaggcgataatgagtaaatcataaaaggggttggtttcttcccacattattctataaatgggacaccggatgggtacgtgaagcaagggttttggctgtccaacttcgagaggctggtgggtggcgggggtctacgttct

SEQ ID NO: 512608 - DNA, 548 bp, Homo sapiens
agaaattagacttaactctgatactacagctgtgcacctagcagagcagttgcgctaacacccagtaaatataggtggggagacaattaccatccactgaatgtttcactacataaactattcttattaatgtcattactttaagcagagtagcaaatagactacataatatacgtgggcaaaaaggcaattacgtgaatctcttgaaacactaaatgtataataaacagcatattatcaacatttacatgattcacatcaaaatgataacatcctaaaaagtattccttttaaagagatagatttataaataaaatattacatatcttttaatactctggtacaatacttcatatactgcaggaaaattaattgtaggtctagtcatcagcttaatcagggatccttttcccattagcttttattaataaaagaatcacaattaggtcataaataaacaggcaaattattaattacatgatttgaggcttcggatgacaacttgtcaaaattagttagatatacagcaaagttatacaacacactaa

SEQ ID NO: 512609 - DNA, 189 bp, Homo sapiens
gatcccccagccaatatgcgtccatctctgcagcgtcgagctggctctcgctctgatgtgacacaccatgctgtcaccgcacagctaccacaggtccctgctggagcagggagccgacctattggggagcaggtagtatcttctctacactattttttctcttttcacagcaaagcaccaagtaaaata

SEQ ID NO: 512610 - DNA, 159 bp, Homo sapiens
ggtgacttaaggatcgtaaagaggcatgagcgtttgtgttgctgtgattgtttaacggaggaatgggctgggacatgtgtagattgcacgatttacacacacacacacacacacacacacacacacacacacacacacagagacatatacacacacact

SEQ ID NO: 512611 - DNA, 1105 bp, Homo sapiens
gtgctttgaagatctcctttgaggatgtgcagtcttttttatttatattatttatttttgaaatggagttgtgttgcccaggctggagttgagtggcacagtctcggctcacatgaaacctccacctccgtgggttcaagcagtattcctcggtgccgacagccctcccaagtatagcgtggaacatacgggcatgtgcgccaccagcgccaggcataagtttgtgggtattttaagataaagaagtggggtttacaccagtgtctcaaacttccgtaaccctcgaggcagattccacccaccttcagagcgttcccaagagtgtggcgtgggaaattaatagtggcgtgtgaagtccagcgcgacacgcgtgggcgcatatatgagtgtgggctcctttatacattatagggaaaacccaaactcataaagggggacaaggggaagaagttgtgaccgtgtcaaatttgtgggcccccacacgaggaaatgtgtgtgacacgctgtgtggtcaaaggttgcccttctcagtgaagagtgtcttgtggccacacacttgtggtagaaacgcgcccccccagagggttcacacagtgggagcggagtgctcaatgtggccggaagtttggccaaacagaggggccatttctccgggggaggacaacgcatgtgccccatggggggcggtttattgtggtgcccacaagaagaaccacgcctgtggcgctaatcccccgcagtatccgcgcgggacggcggggaggcacaaaaaacgcgcctcaaatatagagtccccgccccaattttacacctatgggtatcaactaccccgaccttttgtggcgatcttatccacaggggggatgaggtaggcgacatgttgaacgattggctatctcctgtggaagaacaacgcgtcttgtaagagaaccgtcgtggggtggaaaacaaggacagaaccagatggtttggtaagtttcccacccactagtgtggagaatttatatgtgggaggggtgtgaggccaatttaacaaatgctcgatggaacacgctgtattgtcggaatatactcccccaagaggtgaatagaggtcccccccccc

SEQ ID NO: 512612 - DNA, 151 bp, Homo sapiens
  misc_feature (43)..(43): n is a, c, g, or t
  misc_feature (124)..(124): n is a, c, g, or t
aatcgagagaaaaaatgatgacactgtagcaatatcgtcggantccacctactttgggatcagcctatccatccgtgtcttcctatttaaatcgtctatcctctatccttcccctgtctttttntgaaaaggaaaaaaaccaggaaggtgt

SEQ ID NO: 512613 - DNA, 103 bp, Homo sapiens
gccggtccaacggcctttgcacaccaaggaagatctagaagctgtcaggaggagctgcggcgggcgttgatgaaccagttacagacctgaaatcatatcggta

SEQ ID NO: 512614 - DNA, 256 bp, Homo sapiens
cacttagctatgtaagaggtgactgcggatttggcgaaaatcgccctgcacgtatacctacatgtggctcctgaagatgggccagagttgctgcaatctcaggataacacatgaaccgatgaggagtggcttctgagggatgagcaaagaaagtggcttattgagctggaatctactcttggtaaagatgctgtgaacattgtggaaatgacaataaaggatttagaactagtccataataaatttagggttgatg

SEQ ID NO: 512615 - DNA, 180 bp, Homo sapiens
  misc_feature (175)..(175): n is a, c, g, or t
  misc_feature (177)..(177): n is a, c, g, or t
  misc_feature (179)..(179): n is a, c, g, or t
tccggggggaaatggtgggaacacttgaacttggggagtatcctgcttggcaagccgttacggcagttggcccaggccccctacctaacaattcgaccctcccttcccaagaatctgtccccaccatggttcccagtccctccaaaattcccttcctaaacccctcccggaatanananc

SEQ ID NO: 512616 - DNA, 112 bp, Homo sapiens
ggggataatgctgctcctgatgacagcatcttacaaatgctacctgtctccatggcgttgctagatccacggaggtatgaaactgctctctcagcatactccccatggaagc

SEQ ID NO: 512617 - DNA, 202 bp, Homo sapiens
tgctagccgactctagaggtatccccacccagctccctgcccccggtttccatacactcatatcaccctgtagtctagtcctcctcccacatacacttcactatactatctttcacttatataaatcctttaatgtgagccagtgtgcaggtggactcacagtcatcttagggaagagccaaaggctggtgttgtgaatcac

SEQ ID NO: 512618 - DNA, 392 bp, Homo sapiens
ttgggggtttttttggggcaaaattttttttaaaaaaaattttcccggcccttttggtggccccccccccaattttttacctttggttggaaatggtgggggcctttggggtgggggttttttttttttttttccccctttttttgcccttttttttttttttccccgccttttttcggggtttttgtttgggctttttaaaaccccttttttaaaaaattctttttggggggggggttttcccccccccggtttggggaggttaatttttttttttgtttttccaaaaaataaggttttgggagggttcccccccttttttttggcccggaaaccatttttttttttggcccaaaaaaaaattaaattaaatttactttttttgcccggga

SEQ ID NO: 512619 - DNA, 460 bp, Homo sapiens
  misc_feature (165)..(165): n is a, c, g, or t
gggaggagggaactcagatgccaggtgcctgactcccaagacgccctgctgaacggacttggagtctaccagctcccacatctccaaacaggcctgtgttcttgtcggaggagaccccctactcatacaccaatctgtgaaagccacagcagtaccatgtgagantttgcctgtgctcgaccctcaccggtgcggcgccactagaccatgcagtagaatcgcgacgtgtccctcgcgtgggcgacgaaatcgtgtggagcggcgttagagcgcaggatgggacagagctcgagggcgaggagtccgcgaaaatgagagtgcgagcgcaggagagagcgatcgagagagcgtccaagtacacgccgtgtgtgttaacgggcgttccgagctgcgccaacaaccttcgcgagattgtactcccaaagaccctcaagggaacatgtggtctgggattctaccg

SEQ ID NO: 512620 - DNA, 111 bp, Homo sapiens
ttgactattctctacaaaccacaaagacaatggaacactatacccattattcggcgcatgagctggagtcctagggcacagctctaaggcttcttattcgagccgagctgg

SEQ ID NO: 512621 - DNA, 567 bp, Homo sapiens
  misc_feature (1)..(1): n is a, c, g, or t
  misc_feature (150)..(150): n is a, c, g, or t
  misc_feature (152)..(152): n is a, c, g, or t
  misc_feature (154)..(154): n is a, c, g, or t
  misc_feature (161)..(161): n is a, c, g, or t
  misc_feature (169)..(169): n is a, c, g, or t
  misc_feature (313)..(313): n is a, c, g, or t
  misc_feature (338)..(338): n is a, c, g, or t
  misc_feature (348)..(348): n is a, c, g, or t
  misc_feature (355)..(355): n is a, c, g, or t
  misc_feature (359)..(359): n is a, c, g, or t
  misc_feature (362)..(362): n is a, c, g, or t
  misc_feature (368)..(368): n is a, c, g, or t
  misc_feature (373)..(373): n is a, c, g, or t
  misc_feature (428)..(428): n is a, c, g, or t
  misc_feature (432)..(432): n is a, c, g, or t
  misc_feature (435)..(436): n is a, c, g, or t
  misc_feature (440)..(440): n is a, c, g, or t
  misc_feature (444)..(444): n is a, c, g, or t
  misc_feature (446)..(447): n is a, c, g, or t
  misc_feature (455)..(455): n is a, c, g, or t
  misc_feature (463)..(463): n is a, c, g, or t
  misc_feature (466)..(467): n is a, c, g, or t
  misc_feature (478)..(478): n is a, c, g, or t
  misc_feature (491)..(491): n is a, c, g, or t
  misc_feature (536)..(536): n is a, c, g, or t
  misc_feature (543)..(543): n is a, c, g, or t
natggcatttcataatcacccatcttgattgacatgggctgacacacatggcgctgtcaggatacacaaggacaatagccaaagagttacaaaaaataaatccatgattcttaaacaattgcaaccaaaaaaaaaaaaaaagttacaagnancnaaacttncagatgcnttgcattgaaaagaaggtttgtgcacgtcataatttaaagaggcaaaaccaaggagctactgaaacctcacgttaaacagtttattataaagctgatggaaaggagcaagttgtctctctgtatcagcttcccttaacagtttnccattaattgaagaaagaggggggnggggggaatncattttngcangcncaagangtacngcttaacgaaacactatcagcttgttttaaagggatcttttaaataccaacgggngccnggnnggcnaatncnncccaaccncccccatnacnnccgccgagatnccccatagaccancaggcacagcaaaaggccccaccagaacacactcccccacacaanccaaaangggggccccggggggcccaaagca

SEQ ID NO: 512622 - DNA, 349 bp, Homo sapiens
  misc_feature (114)..(114): n is a, c, g, or t
actctacagatctatgtggtctgtgctggacactggatatgcagaactgtagggaagagaccgtccgtgtcgctaaaggttgagtgtagagggtgacggagaggcatccgaggnggtgtgggtgtggaagctgctctgtctggcgcggtggtggcggacacctgaccgtgcctctctcagagtccgctggacggcaccagcatggagctaagggaggaggaatgcagacagcggcccatgaaccgcagaaccacactgtggctgtgaagaaaggagctcttttcagtggccttgggaaaggcgtttgactgtggttcactgtaaggctgaagacaagaaccacacgaca

SEQ ID NO: 512623 - DNA, 105 bp, Homo sapiens
ttctcctacgataaggactaaacggaacaaagcgaatgcttcgcaaatcatgaaaataattaatattattagctgtctagagaaagtgaatgagccaacagatcg

SEQ ID NO: 512624 - DNA, 126 bp, Homo sapiens
  misc_feature (3)..(3): n is a, c, g, or t
tantggcttcgggaagaggctgcaacaggtcttgcagaacgtgtactgtgtctgcgggggcgagccccagccagccagctgcctgtcacgtctgttgggcaaactgcccgagctgcggaccctgtg

SEQ ID NO: 512625 - DNA, 151 bp, Homo sapiens
tccagggcaaatttgttaaatttttaaaaataacggagtgggcaaaataaaattatttaactctccacatctcactacgtggtgtgtacacactgtgtatagaggctcctctgtgttcacaaagaaaatatacagtgcaaaattagtgtgg

SEQ ID NO: 512626 - DNA, 1378 bp, Homo sapiens
  misc_feature (616)..(616): n is a, c, g, or t
cgggctcccggaggactgcaggcaggatgacgcaagaacacggtgatagtgaatggagtagctatggcctctaggccatcccagcccacccacgacaacataccacaaccaccaggttacagcgatatgagctgcaacgaacgataacacaaataagtacgtacggataagaacgaaacaggtgcaccctgaggagattggctagagccaaccgactaggccaggagttggttagatgagcagtctggctctagtgggtgacctcagatattgctgggggttgtgagtttggagtatcaaaaaagaagaagacacagtccagaggagatcccctagagacaagatcgaatcagaagcctgcgggactaatagctgagtctaaaagctgaaaaagtccaggaggtgaactgcagcgtggcagtgggggcatttagcgcttagtttggcattagtagacagatcgggcctggataagccaaaaacttaaagccggaggaccgatggaataagacgctatgttctttattttggactcgcggagaattgagagcgagattattcgaaacgaggggctatggaagatcggaacggaaagatgaatctccagcgaattcgntgattgatagaaccgatgcccattcgagaaaccattaagctaaagaaatgccgcgggaagatggagggaagctttgcgagaaggcatcgattggattgaaggaataaatctggcggacaaaggaggctctccttgtaagcgatcggcgcgaaatcggcgctaaaaagataaatcgtatgaggaagaaacgaatgggttgcagaaagagcggtatccaaagaaacattatgcggcaaatgattgagaggcaagtgacgattgaggtcgggttagtggtaaagttaacgtataagaagcgttggcacacgctaaggatgtggcgcgatagagagaagctgaggggagtgtagttccacgttaagacaggaagagcccagccgaattcgaagaagtaagcgcgagagtttccgcgccagagaagaagttctccgtggagactcggagaaaagtgggagttttagaggttccggaagaactaccacacgtagcggaccacggagagtttcttggggagcccccgagtagagatggtttttgtcccgtaggaagggggggcaagtgggaagtttggttgcggagtgctccgggcagagttgggcgttaggagatcgtttgggtaagggcccctcggggaaagttcttgtccccgccgagtggtgtcctcctctgaaggagagctttgggcgatgcgtggggctgcggggcggcggtgtgttttgaatgcggggggggcggtaaaccaggagttgttgttgggagaga

SEQ ID NO: 512627 - DNA, 1182 bp, Homo sapiens
  misc_feature (250)..(250): n is a, c, g, or t
  misc_feature (507)..(507): n is a, c, g, or t
gcccaaatctgtttattatctcagtgaaagaagtaagtgactgctatggaactttgccactcgttctgcgtcatgtggatcatctagtcttgcaggtcggtctcgtggaagagttcgctggcgacagaggtgagcgacatgtagagagtcccgtagaaggcaagggcgaggtgggacgggcttccgctaagcgtcccactgctcagggtccgtagcgccacagtttattgcttgcttactacaggctagngtatcggtgacttgctagggacataagttcctacggaagcatagtgccggtgttgattaccacgtgcaatcgcagccgccgacattagactcatcagtgcagttgagatggtagattaacccatcgcaggctgcctcccggagtagataagaggccagtctacagccgtcttgatgacatgtgtcataccctgtgatggctaatcctctcttcatgggtaatgtgagatctggctctgcacatgacgtcactgcaanacaggttcctagaagcaaggtgtcacgggtccgtcttgccctttatagagggctacttagctgccctgagctggatgcagaagacgtaggagaactatgggacggatagcgagctgtgaatgggttcgaagcactgagccaaggaaggcatgaattgagcgtgtagcgtcagccagcatccgatggcagagatcagtagagcttcaagatgtgcttcatcttcaactacctagtctaacaccagtcttcctgcagacagatccgaggagcaggtctcgatggtcacttgccccttttaagagggctctcagctgctcgagtgcgattaggatcaacgtgtacagattgatataagactaagaaaacaatcttagacacctaaatacaaattcaactagactaactagtggcccaaccatagcctaccataacggaaccgcggacacaaccgcacgaaaagaacattcacaaaaatagaaaatatgggccgaacactacaaaacactatatgtgcacctaagcaacgaccgagaagaatcactccaacaacacaaaactgcagaaaacataaagacaaagaggaaacacaaacgacaccaacccaagagaacactataacccacgagatacgccaaacgcaccacacaaagagaacaaaccacagagcagaaagtc

SEQ ID NO: 512628 - DNA, 397 bp, Homo sapiens
  misc_feature (18)..(18): n is a, c, g, or t
  misc_feature (123)..(123): n is a, c, g, or t
  misc_feature (180)..(180): n is a, c, g, or t
  misc_feature (195)..(195): n is a, c, g, or t
  misc_feature (205)..(205): n is a, c, g, or t
  misc_feature (286)..(286): n is a, c, g, or t
  misc_feature (312)..(312): n is a, c, g, or t
  misc_feature (320)..(320): n is a, c, g, or t
tgtttaccggatgccacnctaagacttccagccactttctggtggcaacagaaaaaacggcaaataaaaaggacacaaaaccaaaccaaaccaaaaccatcatgtggaaatgccacagccctngaggcacattctgggtgcctggacttgtgtaggtattggctccaaaaagaatcccangagcttatacatttngaaataacanaaaataatgcaacacaaaaagtgatcccagcaatttttagctaaacctaattttccgtgaatttttaggaaacaattcctngttaactctaaatataggtgtttcancagaacanaaacaacgagttctctcatcaaaaggttggcaaagtgttaaaaacctcgtgttacacaatagggttttctttggaca

SEQ ID NO: 512629 - DNA, 174 bp, Homo sapiens
  misc_feature (24)..(24): n is a, c, g, or t
agtgctgctttagtgatctaaggntccccgcgctagcggcttaatgacggggccatcagacccgaggccgagtcgcccgggagtgctggtcgacagcgcgggccctcggaacaaggcccgatgcgcccaggagagctggttgacaccgcgggcgttcacttaatgccgctagcg

SEQ ID NO: 512630 - DNA, 521 bp, Homo sapiens
  misc_feature (382)..(382): n is a, c, g, or t
  misc_feature (410)..(410): n is a, c, g, or t
  misc_feature (454)..(454): n is a, c, g, or t
  misc_feature (468)..(468): n is a, c, g, or t
  misc_feature (488)..(488): n is a, c, g, or t
ggtatcaagtgctaagaatagcaccacttggaaatatgacaggactgcagccagtgtggataattatcattttcaactacagatctctctcagccttgtctgcttatcacactggcttgatcgcgcccatgaagatccgcacagaggcccctgggaaccttcgtttatacagtgggagccccactcgcagcgagaaagagcaggtctccatcagctccttctactacaaggagcgggtaagtgccagagccgcagcctttgattcttaccccttctcctgggattcttgttcctcatctcctgcctgggcgcagagctaggattagtaatcaccctgttagcctttcactttcgtaatcagtttgttcaagaaagtcattantttgttcctttcagttggttttacccgntattaaatgtgtgtgtatggggtcgggggggcatttttatgggnccctaaatttttantccccattttaggccttgtncccaattaaaattaagttgtaatcattttaaaa

SEQ ID NO: 512631 - DNA, 655 bp, Homo sapiens
  misc_feature (516)..(516): n is a, c, g, or t
  misc_feature (544)..(544): n is a, c, g, or t
  misc_feature (588)..(588): n is a, c, g, or t
  misc_feature (602)..(602): n is a, c, g, or t
  misc_feature (622)..(622): n is a, c, g, or t
aagacagcgcttcagctaccgtttgcactccccaactctgtcactccccccttaccgacgtttgcgcgggctacgcggcttacgggtcgtaccagacgccaacattccctttcctaggacttctggggccaggttctgcggagcaagttacctggtgtatttcacaaggcccatgacaatgcatcgggcggtgtctcccacagagcctactccgagatctctctcagccttgtctgcttatcacactggcttgatcgcgcccatgaagatccgcacagaggcccctgggaaccttcgtttatacagtgggagccccactcgcagcgagaaagagcaggtctccatcagctccttctactacaaggagcgggtaagtgccagagccgcagcctttgattcttaccccttctcctgggattcttgttcctcatctcctgcctgggcgcagagctaggattagtaatcaccctgttagcctttcactttcgtaatcagtttgttcaagaaagtcattantttgttcctttcagttggttttacccgntattaaatgtgtgtgtatggggtcgggggggcatttttatgggnccctaaatttttantccccattttaggccttgtncccaattaaaattaagttgtaatcattttaaaa

SEQ ID NO: 512632 - DNA, 525 bp, Homo sapiens
ttcccaatataagacatgtctataactaagactgttactagaagaatgatatatgctagtatagacacttgtatagtagtcgagaaaaagatcatattgttctatattagaaattactaagctctgaaggtactacagctagatccttcttacagtaccggagacttcttctggagtctgtagctcttgacagtggtacttcactttaagaggttgccagggtaccagaccaagtgaatgcgacagagaattattacctgtgtggataattcatgaagtagaacagtataatcaaaatcaattgtatcatcattagttaaccactgcctcacactaagtgaggctgtgccaagtagtagtgtgaaacatgatgtaagtaatacccaaatcacgtaagagctaccaaggaaagccaactcccagatgagtctcagagagggatcaatatgtccatgattatcaggtatgctgactatatccaaggtgattacaagttgctccatatgcttgtaaagcaagtaatcc

SEQ ID NO: 512633 - DNA, 395 bp, Homo sapiens
ggaagctactcctgtagtctcagctacctgagaggcttacatgggaggattgcttgaacctgggacgtggaggttgccattagctgagattgtgccactgcttctaccctgggcaacacagtgagagtctgtctcttaaaaacaaacaaacaaacaaaaaaactagctggatgcggtggctcacacccgtaatcccagaactttgggaggccgaggtgggtgatcacctgaggtcaggagttcaagaccagcctgaccaaacatggagaagcccccgtctctactaaaaatacaaaacttagctgggcatggtggcgcatgcctttataatcccagctactcaggagactgaggcaagaagaatcgcttaaacccaggaggcagaggttgcagtg

SEQ ID NO: 512634 - DNA, 267 bp, Homo sapiens
  misc_feature (158)..(158): n is a, c, g, or t
  misc_feature (168)..(168): n is a, c, g, or t
tttttcgtaggcctctccaagtggaccaatcatcgaggagctgagatcgtggcagacacgttccgggacttcgctgtctcaacggtaccggtctcaggctcctcgcacctgcgcggcctctgtggcatggggggacctcgcaccgtggtggctggaanagcgaggctnccaaaaagcagtcagggcaatggcagcgctgactgatcacccctacgcctctctgaccctcccagatgatgcagctagtgactgtctctttcttgcgtc

SEQ ID NO: 512635 - DNA, 761 bp, Homo sapiens
tgggctctagaagggggtaaagggggtgctatagggtaaaaccgggcactattccaaaaattgttagggggacataattctaggacgatgggcttgaaactgtggttggccccacaagattccaaacctttgaccggtaatatacccccggtcgtgtcgcgggcagaaggtgggttgggtttagactgtcgcgggcattggcatctgttttctacgcctaattggggggacatgctcatgagtcgcgaagcaggtctggtgagtgtagtaatgtagtacgagttgggggctccattcgggagttccactcaagtggtcaccggcgcggagtcgcgtgtcggcccgggtccttagagaataatgggggggaattgtctggtacgagagtctgagactcactacgtttccccgccggaagtcccctggattgccccctaaggttcaagttacacattgcctggcgtggccacctgatcgtgatagagatgggtcaacgggaagcgagatcctgggagaccgctcacgatcgcgcggttcgtgacagggtacccctttacgagagttgaggaacagggtccattgtgcgacccacgtaggatgaccgcgagggacatgggcatagtcccgcaacgcggtttactactgtactggacccgtgccacaatcgccagggcactaacagcactatgggggcaaaaaagctggccaaggaaaaggggcactaccaagcattgagaacccgataagagaacctcgtacgg

SEQ ID NO: 512636 - DNA, 1109 bp, Homo sapiens
gagacgttcttcgccgagagtcgtcggaggataccatgctgcaacagtgctatggactggaacccggcgctcgtatccccagccccggccggccgcccatagccagacctccgatcacctcttcacgcgcacccgcggactgccccaaggcccccgccgccgcgtccagcgccagcgcacgcacacgacgccagcgcacgactctacctgagctcgccgggatgaccgacgcgtccaccgtcgcaggtgcgccaggaagataccagccaggacatcagaggccagccatcaacgcgccagatcaacctgggagacccctacgtccatcactacgctacaccggttcccatgtactcaagcgtactccccgaccggcgaccgatgtggtcctacggacagcaacctctgcacaacatagcttctctatcaccaatgtcaatgaggtgagaagggcacaccatgactgccgcacaacacgaactgccaccgggctagggcgacggaaaccccaaactccgcgagggcagccgcacacacaccacaccgcgacactaccaagcgcaatcgctcgccaggcaaacagaccaccggacccgggcaggacatgacacccgcgccgcaacgcagcgcgcacgccctagccaactggccgacaggcgcacgccggctcgccccgtccaagacacacctgcgcacacagaacaccaactgggctagagactcacagggtagcaacactaacccggggacacccctgggaccccacacaaccgcgggaccaaacaggcaacaccagtacacacgccctgaacccccgccgcaagccaccggccagcatcgacacccgagcgaagcccaggccgggaacacatcccaccctaccacgcccggacacaacctgcaagccaaccccgcgcagcgcaacgacgacgccactaccagccccgaaaaccagacggacgcatagaacaccaccacgcgacagaaccccagcaactccgaccggccaacacaactgcggcaaccgcgacacccgaaacgtcttgggactgggcgccgcgcgacacaccaccatcgagagtagggagacaatgccggccacccacccg

SEQ ID NO: 512637 - DNA, 153 bp, Homo sapiens
gcaatcatggcgccacctgtgagatacttgcatccccggcggaacgtcttgtgtaactttggaggaggggcaggccggggcagcggcacctacacccgccacggcgtacatcttttcgtcggttgccggctgtctgatgaggagcagcagaat

SEQ ID NO: 512638 - DNA, 443 bp, Homo sapiens
acttctctcctcttggttgtctattgtgtgtggtggctcaccacctgcagggcactaaccctgaatcagcaataggaaggagtctaagaactagtctttggtggccccacacttctggttcttggatgcacctctcccctttaataatacttttccctcttttcctcaagactctactaccttcctgcatttcctctgccaccatcaacatggtttgaggaccaggtcagaaacccttttgtattagggttgagttgccagaattaagttctgcctacgttgcatttatttgcatttcagtgaagatcaaaacataaaggtgaggctgagtgtggtggctcacacctgtaatcccagcactttgggaggccgaggcaggcagatcacttgaggacaggaatttgagaccagcctgggcaacatggcaaaatctcgtctctact

SEQ ID NO: 512639 - DNA, 134 bp, Homo sapiens
tttgagattgacaaggctccactcagacagaagacctcatctgtggccctgtgaaagttgctggtgcacctggcgctctgatgactgcccctgagtactacgaagtgagtgaggtgggaggaacaccaacctaa

SEQ ID NO: 512640 - DNA, 1175 bp, Homo sapiens
aactcggaagtatgagcctgaacgcatcctgctggaattctcatattcatctcggacagttgtcaacaccaccgtgagatggctcgagatagtgcctagatggccatacaggcatggagaatggcgatggatgtcactgagaagttattactggccaggttccactgttcagtagtatattagctcgtcatctatagtaaagatatccaatgtgtgtcgcctgtggtatacagaacctgcaacactgtgtggtatatgttgtacagcttatcaacagatgactacttatagcgttgaaacgactactgttgaattagtagaagacctctcgattcatactcttttccacagtcctgcaaggaagagctagcctgcaaagagtaaggtatcattgcttgttatgacttcagagattgtgatgtcagggacagtatacctggaccatgaatgttcttcaccgttgctggctgttttgcgtatgcgattgcaaaggaggatgacctactcggcattttcgttgcacgtacttgtgcgaacttgcagaaagcactgaacacattccagttgacctttaggtaattaaggcaccgtaacattattgttgggcgctcccatacaaaggtcattcgaggtcccaaaaggcgcagagtggaatgcgataagttaaggaacacagacgggcaacacattttaacataaaatttggaaaccagcttgtattgatgggccaagcgaattttagtaggaatcaccccattttccaaggtagttattggacaatccgaacgaagggataacaggagtccactccccgttaatgaaagagagaaagcgcgaagggttcgttacacaagaacgagaaagtttctgtgggcacaagacccgtttgtgatttcgaccacttcgcatttccacttcctcctcggagatcaacacacaatttgtgacaagccgatccagataaagattcccacggttcgcacaaaagaaacagggggacaaacacccatatgcttcctttactcatcagaggttggcaccccgctcgggtagttcggcagggacgagcaacgtcggcgtcatgggcacacgtagggtcggaaacccccagagataggatcgggactaatccttcaagcgttaggacaccttcttacgtctcataagcaacacta

SEQ ID NO: 512641 - DNA, 141 bp, Homo sapiens
gcaatgtgccagcccctcacattccacaggcccatggactcactattgtatcaaactcctaccaacactgaccaactaaaaaacactgtgggtgttcttggtattttttttttttatttttttttttggtatatttaattt

SEQ ID NO: 512642 - DNA, 1519 bp, Homo sapiens
  misc_feature (189)..(189): n is a, c, g, or t
  misc_feature (605)..(605): n is a, c, g, or t
  misc_feature (1519)..(1519): n is a, c, g, or t
gcagcaacgtgcagaagaagctcaccgcgcgcgcagcgagaaggttctccagaagctggggagaggcatatgaagaccaaggatgtgaggcagatgtgtgaggcatgtgcgatccatgaagtcttcaacctaatgtcagactgacgggagtggcagcgcgtgtctggcggacaggattctccgagatcntatcgcgtggccgtctcgctcagaaggccgatgcactgatgcgcttccagaggagagctgaagtgagctgtctgctaaggacgggtgtagtgacgtcgcctgatttggtccacggcggggagtgcaaggctaaactaagtattcgctatgatgaatcgagacgagcactgcgtgtgtgacctggaattcagctcgagcacaagaaggacttgtgtagtgcactcatgtgccgcctggactgaactcgattgggatctaccgttacgcttgtggcccgagatttcgcccgcaacgatcgagagttcgatcgtcaatttggcctagagcggtggagacggccaaggcgtggcctgggacgttacgtatcagttgtccgcgggtgaccgagatacgcagatccactttcacaagggtgntgcagagaagagcatggcactggaagaccgataaatgtgcctaatggtgcagaggaaggcagcgtcaattcacataggcgcgcagaaaggggtggttctggaggggaagagtcgaactgggtgcggacttcattggatcgtgctgggacggccttaggcgcgggcccattggtgttgggccattgcaggaaggtacgggcttggtgacagtcaattgaaggtatccaggacaagacttcagtgggagggcgtttggttgcgggaaacaccactttcccgagcccatgggggacaattggacgtggaaggttcgttgacttgcggggggagcccctttgatgtgagtagtcggctgtgggcctttgggccctggtttaacactgcggagcgaacgcgggatgggagaaccatcccttttggcagggggtccgatgggctcccattccccagcagtttcgaccaagaagggcgcacctttgcggcaaaaagggcgggaaccacacaacaacagtggtgccatttttagcccatcccaggatatgttggggtcaccccgcgtggtgtgagagcacaaccaaccgcacgccgagtgaatttttgggagcagcaggcaagacgcagaatggagggggccccaaagagaaaccgaggtggcggcggggagggcgccacaggcccccaggggggtgaccaccccagtacctaacgagaagagaggacacgcaactttctaaggacgcaccacgcgagaaatagacggccggcaacaaatacgacgactggtgaggaagaccaacaaaagaagacccggttcggaacgaagagagtcagacacagcaagacacacagtgactcacacgcggcaggcaggagaaccacaggtgtccgacgctaagtagaaggtatgaagcacn

SEQ ID NO: 512643 - DNA, 151 bp, Homo sapiens
caaagtggcgcaatgtgacaacatagtcaactaatgtggcattcactaatctcccaccaattcatgattgaatctaactctgaaaagttgtaaaatcatttcctagtcactattgccaatgacatagccctacctgaagatttcaacgtct

SEQ ID NO: 512644 - DNA, 718 bp, Homo sapiens
  misc_feature (40)..(40): n is a, c, g, or t
  misc_feature (70)..(70): n is a, c, g, or t
  misc_feature (99)..(99): n is a, c, g, or t
  misc_feature (112)..(112): n is a, c, g, or t
  misc_feature (141)..(141): n is a, c, g, or t
  misc_feature (163)..(163): n is a, c, g, or t
  misc_feature (182)..(182): n is a, c, g, or t
  misc_feature (184)..(184): n is a, c, g, or t
  misc_feature (188)..(188): n is a, c, g, or t
  misc_feature (198)..(198): n is a, c, g, or t
  misc_feature (223)..(223): n is a, c, g, or t
  misc_feature (234)..(234): n is a, c, g, or t
  misc_feature (252)..(252): n is a, c, g, or t
  misc_feature (270)..(270): n is a, c, g, or t
  misc_feature (273)..(273): n is a, c, g, or t
  misc_feature (298)..(298): n is a, c, g, or t
  misc_feature (300)..(300): n is a, c, g, or t
  misc_feature (347)..(347): n is a, c, g, or t
  misc_feature (359)..(359): n is a, c, g, or t
  misc_feature (377)..(377): n is a, c, g, or t
  misc_feature (379)..(379): n is a, c, g, or t
  misc_feature (381)..(381): n is a, c, g, or t
  misc_feature (386)..(386): n is a, c, g, or t
  misc_feature (392)..(392): n is a, c, g, or t
  misc_feature (394)..(394): n is a, c, g, or t
  misc_feature (396)..(396): n is a, c, g, or t
  misc_feature (420)..(420): n is a, c, g, or t
  misc_feature (434)..(434): n is a, c, g, or t
  misc_feature (451)..(451): n is a, c, g, or t
  misc_feature (469)..(470): n is a, c, g, or t
  misc_feature (472)..(472): n is a, c, g, or t
  misc_feature (480)..(480): n is a, c, g, or t
  misc_feature (487)..(487): n is a, c, g, or t
  misc_feature (510)..(510): n is a, c, g, or t
  misc_feature (514)..(514): n is a, c, g, or t
  misc_feature (518)..(518): n is a, c, g, or t
  misc_feature (547)..(547): n is a, c, g, or t
  misc_feature (555)..(555): n is a, c, g, or t
  misc_feature (557)..(557): n is a, c, g, or t
  misc_feature (571)..(571): n is a, c, g, or t
  misc_feature (652)..(652): n is a, c, g, or t
  misc_feature (682)..(682): n is a, c, g, or t
ctccccgccgccaggctccagtttccgccatgtgtatgantcgtagtccacctgccaatctggactcagnggaaaggcaagctcctggcctcggaaganccagactccaggnatggggctgcttttgttggttccaaaaangatgacagtggggggggggttnttcctcagtttgtccagtngntggnacattccggngatggggttgcggctcatgggggtntgggtgggttnttcggggggggggtagtntgggtgccaggggggggngcngtccttttcaaggtgctcccagagntntgggggtgcacggagagtgtgtgctcattggggtgcttgcgcttganttcttccaacanaaaggtactcttggcccngngnccccnggggtnantngccttgggctcagcagacagggtntgatcaaattcatnaatctcctcctcaggcnccggggaagacgcctttnncncctccttnggctcancctggggattatgatttttttcncgtnaacncttctctttccgtggtgtgtcctttttangttgggtntntgcaaactttttancatcaaactgggccatcttctcacacagtttcacttcccccaagacagcccggaactggggctggttaatgcaggtgaggnaccagcggttggtattgggaaaggcctggnggaaagaaggctctagaacctgcttatagagccaca

SEQ ID NO: 512645 - DNA, 221 bp, Homo sapiens
gctgttctgaggatcccctgtccgctcagtcatggtgatcacgacagctcactatcccggggatcacggcctggggcgtcggtctcttccccttcttgcctgtggctgcctccatcatcgagtgcctccttttccttctccatctgacacgccatccgcacggtcagcatctgaaaagctaccggaggaactagggtggttggggtttggatttggcatcg

SEQ ID NO: 512646 - DNA, 350 bp, Homo sapiens
  misc_feature (1)..(1): n is a, c, g, or t
  misc_feature (244)..(244): n is a, c, g, or t
naagttaagtcatctggtctgtcgacaggtgtctaacgtgtaaacttggaatcaaactgacttacatcctcttcagattgcaacagaggtttaaaggggggctccacctttcgagccaagagttcttcacagttaatgtgtctaaagaatgaatgagcttcagcagctttttaagcagatctctggcttcttgtgtaagatagggaggcaaattgagttccatttagattgtgcaatgtttctnaattctccacagtgaatgggggtgctacagtcagcatgtcatacattaatgctcacaaactccaacaatccacagcacgattgtggcctcttctcatcaagatttc

SEQ ID NO: 512647 - DNA, 814 bp, Homo sapiens
gatttagactgcattttcctggttcgggaaggttaaagcaaatgtatattgccttttctagtgaactaactcgtagagatgttctcagcaggaagacagtcttagcactgtcacttagcagattgcacttaagtcccttgtgctggccagatggcgtggcctggttgcctggggtatgtcccagtgacccctgttttttggctgccctggcctctccctcgtgctcctcaacgagcccagtccatacactgtggatgtcatctgctgtcgggttaaggaaagtcatttgtccctagaacgccctggcattggtatgacccacgagttcactgagctggactcatttctctgcttggggctcacttggtcaattctttccatgcaacctgactttgttgcttggcggaatgggcccgaggaattgggcgggccccaagccacattgtacctagagccctgccttgggggggcccttggcttgggtgacggtccttgatagtgggcacgccactgtggaaacaattgcacgccattgcgtcacattccttggttggaacccgaagtgtggccgatccctcattcttgtggggcaacgttcgtcatggacctattggcgctcattggattggcaccccattgggaaccccgtttgaatacccacattgggccacttattcatctcttttgccatttcataggccattaccccacttatggcgggggccataacccaccccattgtgggtgcccaccattacgcagtggcgatccgtatgtgggccaacaaaccttcccccttacaagggggaagacc

SEQ ID NO: 512648 - DNA, 123 bp, Homo sapiens
actgtgtctcaccgtgtgcgcctcacagtcacaccttcacagtcacaccttcacatgtcacaccgtcacatgtccacagcgtcacagtcacccctcacatttccacgccgtcaaagtccacgc

SEQ ID NO: 512649 - DNA, 170 bp, Homo sapiens
tagaggatcccccagttacaacagctcagtgtactagatatatgtatgacatatgtagccttagtagcgtttgtgtgtgtcagcacacctatgttgtgtgaacatgtgtgtaatacgtgtgtgtaggcatagcattgggtctgaatgtgtatgtctgttttaatgttcac

SEQ ID NO: 512650 - DNA, 179 bp, Homo sapiens
ccagccttattgcccaaaggttgatccaacttcgccacagcccaatcgcgttcaatatcctgctcagaacgcttattctcatccatccacacttgggtgacattggcggtgccgaacggtttggaatcgccattctgacctgggctgaacgtcatgtccgtgaacttatcactcaaaca

SEQ ID NO: 512651 - DNA, 101 bp, Homo sapiens
gtcaaggagacaactaattgagaaactgattattgatgagaagagtatactatttggagaaccctgattttgtgtgactttaccattgaccaccagtcttg

SEQ ID NO: 512652 - DNA, 82 bp, Homo sapiens
gacagcagcttctacatctgcagtgttttattggggggtgggtatggctacaccttcggttcggggaccaggttaaccgttg

SEQ ID NO: 512653 - DNA, 200 bp, Homo sapiens
catgcactgtcaacaggcctcattagcacactctctatagtaatctgtctgcagaaattcccctactttaacctcccttctcccaagactcctcatcttactgcaattgcctcttcttcttcttcttcttcctcctttttgtttttttttttatttcgcctgattacaaaattaacgtgtattaacaaaggtgcattggg

SEQ ID NO: 512654 - DNA, 485 bp, Homo sapiens
acatatgcttaatttttacaaagtggaagtataggagcattttacacattttcctatttctttgcatgttcttataaaaacatatcaaattctgggccaggtgtagagcgtcacgcctgtaatcccagcactttgggaggccgaggtggatggatcacgaggtcaggagatcgagaccatcctggctaacacggtgaaaccccgtctctactaaaaatacaaaataattagccggacgtggtggcgggtgcctgtagtcccagctactcaggaggctgaggcaggagaatggcgtgaacctggaaggcggagcttgcagtgagctgagatcacaccactgcactccggcctgggcgacagagtgagactccatctcaaaaacaacaacaacaacaacaacaaaaacccatcaaattcttttttgccattagcttctggagttatttactcacctattaactcctcccctccccctgccctccatc

SEQ ID NO: 512655 - DNA, 359 bp, Homo sapiens
caagtctgcaacttattctttcataaaactgtcagcgctctttggctatgcaacttattcttaatcggctcagaaatgctaataattagggaatctgggtgataagtgtgtgagaacgccgtaatatatgtattttgcaacttacaaataaatgtgagattatttcagaatttaaaaatatttttaaaaagaacattaacatttacttcaagaaactttctgccattgtcaaatcctaattcctcttactgattacagatcaaataacaaaacgaagcatattgaagaagagaacttgattgacgaagactttcaaaatctaaaacctgcggtcgaaaggctttaccaatcttggagca

SEQ ID NO: 512656 - DNA, 337 bp, Homo sapiens
  misc_feature (337)..(337): n is a, c, g, or t
tcatacgctcgactcttgagtataaaaccgcggcgagttcatgcacccggttggtgttcatgacaaagtgggttccaacctgcgttcctattgccctgacttggctcagggcgggagttctactagcagattccggaagtccccggaggtatctgagcgaaccatgtcagagagagacttctgatacttctcttggaactttgctttgatcccctgaaggtccacctcggccctggtcacgactatgcgaatcaacgtctcctcatcggtccccgcacccttcatcgacttgtacagacgttcagcaaaatagtcctcacaatcctgggcacatctn

SEQ ID NO: 512657 - DNA, 906 bp, Homo sapiens
cctttagatgtgcgcgtactctcttctcactacgagtgtctctgtggccgccagtacctgtggttgggagataccctctccgcgatattgtcttgtcgcatgctcttataaaaattttctggtgcgcgcgtgtccccgagaaaaatgccgcctgtgtttctctgtcccctctcccgccggggagttttatgtcaccggacgcccactcggtgttaggctttgtaacccgccgccaacggggtatccgattcaggcccgccttcgttccgtctagactccttaaccgtatactgctttctttctggactcctccataagggtgtctcttcatcccatattcccactttctgccgtatagcacccccttcgttcctaaactatttacgcgccgcatcgcctttcgacacgtcgaatgttcttctccgcgcctcaatagaataaattgattggtatacccacgccacacccgtcttatttgtcgcgttcgaattcgacgggcaataccacgaactcgactaacgtgaatcgcggtgcatccctcgcctcattattgcacatacccccccacaccagttgagcaaatctctttctttcatctccaattcccgcattataactctttttaaactacccctgagaatttaaatatatggatctctacagatctgatgaatactgaatattgaaaaatccgacataatagccctaagattttagagtaaaaccctcctcccccttcaccagtaggggaaaactagtggaactccccccccctatccaccccttatttcaaccatccccggtagacttatttgacaatttctgcccacataaagtaaaactgtacccccccctgctgcgttttctcccccccgccggcccccaacaatttttttaaacaaaaca

SEQ ID NO: 512658 - DNA, 134 bp, Homo sapiens
tcactttctacacgaaacaaatgtatttctaagtattcatgtgatgcacaaaaaaatccaaagcagaaatgataataaaccaagcttagatgaaactaactgaagaacttagaacctgaggtgtagaaattgaa

SEQ ID NO: 512659 - DNA, 986 bp, Homo sapiens
  misc_feature (381)..(381): n is a, c, g, or t
  misc_feature (397)..(397): n is a, c, g, or t
  misc_feature (431)..(431): n is a, c, g, or t
  misc_feature (434)..(434): n is a, c, g, or t
  misc_feature (448)..(448): n is a, c, g, or t
  misc_feature (481)..(481): n is a, c, g, or t
  misc_feature (515)..(516): n is a, c, g, or t
  misc_feature (549)..(550): n is a, c, g, or t
  misc_feature (571)..(571): n is a, c, g, or t
  misc_feature (589)..(590): n is a, c, g, or t
  misc_feature (607)..(607): n is a, c, g, or t
  misc_feature (610)..(610): n is a, c, g, or t
agcgggccgcgcggcggcggcgggcgtgcgcggactaggtgcgcggcggccatggccgacggcgtcgccgcatccctggacggtacttctgccacgtgctgctccgtggaggctcgtcccgcgcctgccggagttatatctgtccaagatgcgagatcctgggttctcatcgaggagcttccggaagagaccaggagcacagaaaactggttctggcgcgcgctctcaccagcaaggacgttccccaacaagaccagagccggtcaccgttggagcacgtggaccagcacctgtgcaacgctgccgcagggctacggacagtgtgctttcggcatcttcgatgacagcttcgagatccccacgttccctcctggggcgcangctgacgacggcaggnaccctgagagccggcgggagagagaccatccgtnccnggcaccggtacggngcccgacagccccgcgcccgcctcaccacgcgncgggccaccggccggcacgaaggcgtccccacgnntggaagggatcatccagcagctcgtcaacggcnntcatcacgcccgccaccatcnccagcctgggcccctggnngagtcctgcactcaaanccntatggactacgcctggggggccaacggcctggatgccatcatcacacagctcctcaatcagtttgaaaacacaggccccccaccggcggatcatcgtacgaagatccaggccctccccaccgtccccgtcactgaggagcacgtatgctccgggctcgagtgccctgtgtgcaaggacgactacgcgctgggtgagcgtgtgcggcagctgccctgcaaccacctgttccacgacggctgcatcgtgccctggctggagcagctacgacagctgccccgtctgccgaaataagcctcacgggacagaacacggcacgaacccccctggcctcactggggtgagcttctcctcctcgtcgtcatcgtcctcctccag

SEQ ID NO: 512660 - DNA, 305 bp, Homo sapiens
ttgagacagggtctcacactgtcaccccagctagagtgcagtggtgcaatctcggctcactgcaatctccacctcccaggctcaagtgatcctcccacctcagaaccctgagtagctgggaccacaggcatgcgccaccatgcccagataatttttgtatttttgtagagacggtttcgccatgttgcccaggctggtcccaaactcctgagctcaagtgatctgcccacctcagcctcttcaaagtgctagggattacagggcactaactataaaatgtcttatctttaaataccaaaacaaat

SEQ ID NO: 512661 - DNA, 1272 bp, Homo sapiens
tactatgtagtggtgattgacttctacctatactggtgccatgtcactatgaggtgcctgtgccaattgtagttattcctcggggggggtctgtgcgagttgcatgttgggtcatggggcttggtctcccctggtactgacatattcttgatctgcttcacactctcatgtggtgttgtttctgagtgtttgtcgtaggcacttggccccatgtgttcatagaggtgttgagcatgtcagagaggtgacgccaattggggttgttgtgctggatgtctttcggtacatttgtcccttctggctcttgccagtctattgtataatgtgcacatgtgtttagggctgcggtaatggcctatgcaatctggccggcatatatattggcctttgggtgccacgtcggtgggagtctatctgagactccctgccctgatggggaccaggatctgtgaagcgctgccgagtatggtgaccgatgtaatggtgcgtgtctgctcgtctacagaggctctgagtgaccaccacgagtctatccatggaaggcaccttggctggaagcccaacatggtcacccgcaggccatgcttgtcactctagaagttgttctcactgatggagattcggccattggcgacgcgtatcactagcgctgcgacctgcatcagtgcacccccgtatgtgcatctggtgatgcgaccttcgctgtcctggaaggccagatgtgtaggtaggtacggctgtctcatgcaacctgctaatgcgcagttagacatagtgtccccgctgtctgagagcccgtgtggctcctgacgcgttctgccgtacgagccagagcgcctcgcaggcctcatggccctgaagggccatgagggccgggaagaatggagaaccgtgaatggacatgcgcacggacggagtatagtcatagtcgagtccacatggccaacagggccttagcgctgtacaaggaaagtacagctgccgaagacggttcaggtcatgaggtgctgtctgcacagcgagtccctgcgtatcgtcctcgtaagccatcagccatacttaagtcggaggtgattacccagggtcatgctccccgaatcacttccaggccctgccccactctccactcttgaaagaaggaggccgcctcctcggggctccaggctggcttgctccgcgctctttcttccctcgtgacagtggtgtatggtgtcgtctgtgaatgctaagtcgatgacatactcctgactactgccgtataactagtagttc

SEQ ID NO: 512662 - DNA, 277 bp, Homo sapiens
ccattttactctttctgtgagttcatctttttaaaatttgacatatatatacccagaaatgggcttgctggattatatggcagttctattattaatttgtggaggaatctccgtaatgttttccataatggcttctaccaacagcgtacaaaggttcccttttgcccatatccttgccaacacgtattatctgctgtctttttgataatagccatcttaacaggcatgaagttatatctccttgttgttttaataaaatcacattgttgtacaaaaa

SEQ ID NO: 512663 - DNA, 312 bp, Homo sapiens
tccccctcttgatgccccttgatgctgcgagttacagacttactgactggtcatattagttgcacagcagtaaaatttaggttatatgtcaagagatataagcctgaagactacgcacctagaactataagttagagctctcaggcattgttgacattataaatggattcctgctcttgaatgactcttacaccacagttcttggtggtgaagtggaacaccttattgatgaaatgggagttacatgagaagcttatcaaaaatacaatagaagcattgttggacctgtcggtggtccaccgccttttgtgc

SEQ ID NO: 512664 - DNA, 407 bp, Homo sapiens
  misc_feature (102)..(102): n is a, c, g, or t
  misc_feature (112)..(112): n is a, c, g, or t
  misc_feature (117)..(117): n is a, c, g, or t
  misc_feature (122)..(122): n is a, c, g, or t
  misc_feature (139)..(139): n is a, c, g, or t
  misc_feature (144)..(144): n is a, c, g, or t
  misc_feature (148)..(148): n is a, c, g, or t
ccggtccaacacttcgtcactccgattgcacaacttcgtcacaaggattgatcttaagaagtgtgtggatgctcggcgtgtgcagcaacaacttcgtccacngtgacttganttcangaagngtatggattctcggcgngtgcntgcncacgccgaggatccacacacttcttaaggtcaagtctgtatgacgaaattgttgctgcacacgccgaaagaccagaccgccgcgaggtcagtatggacggaagtagtagaaatctcaatggacgaaggccacaacttcgtccatcgcgatttctctgcgctacctttctcagtctatagccttcgtatggtacttcggcgtgtgcaaaaacaacttcgtccaccatgacctgtgtcaccaaggggtagggtcccctcgg

SEQ ID NO: 512665 - DNA, 954 bp, Homo sapiens
ggaagtgatcccagatggtggttccaggagcccaagctgtgtttcgggagggcattccaggcgcggggctatttatcccgcccgggggaggtcaattcagggaagtgcaatggcttttcgccctcctgcgaaggttattccttgaaatgtcgagtacgtcgagtacaatcaagtccggttccttcagacagctggggacctacctcgttgatgttgtgagccccgggacagcggttgggaacacttggacgaagaacgacctgccgataccccggtcaacctaaccgacgattgggactaccaagccccaggcgcggggcatgtcaagttcgcaataatgttcgccaattgtggtctgtcccagatgtagggatggaatcgggcgtaggggctagcaccctagtggattgggtcacccggcagacctagggaaggtgtaggcgaggtggggagttgtgcagaatccggcatacctcgcagatttagctgagtctgtcttgatgcagagggccagagaatggcattaccgggggcccaggttggatggggaaacggctaatggtgtcagaccccgaccccagtatacccctgccacgtcagcccagcgcccatcctgcagctcagctgggagcatcaattctccatgctttgtaacatagggtgtggtcgcctggcacgtggccaccatcatgtactagggccatatgctaaggaggcaaatggccaggctctgcctgtgtggtttctcaacacgtagcttgttctgatatggagggcagcacctgcctcgtgaatgggaatattatgctaactactcagaatgtgtcctcgtcatctaaagctcactctgtttaatggtgatgcctcgcgtagcaggatactggttacctgtgcagttgtgaatacacagaggttgggcagatcagtgtctcatacctaccaggtcataagatc

SEQ ID NO: 512666 - DNA, 566 bp, Homo sapiens
gggaggctgagacaggagaatcacttgaatccgggaggtggaggcagaggttgtggtgagccaagatcacgccactgcactacagcccgggcgacagagtgagactccgtctgaaaaaaaaaaaaaattactcagtgtggccaggcactgtggctcacgccttgttaatcccaagacttggggaggccaaggtgggtggatcacctgaggtcaggattccgagaccagcctgggacaacattggtgaaagcccatctctactaaaaacacaaaaattagccgggcctggtgggtgtgtgcctgtaatggccagctactgggtaggctgaggaatgagaatcacttgaagctaggaagcagaggttgcagtgagccaagatcatgccctgcacctccagccggggtaacagagcaagactctattctcaaaaaacacaccaaaaggtgtttccggggggaaaccctcaaatcttgggaaacaggttttgcattccttcagcagatctacccttggggagttagggactggaaagtttccccagcttgtgtccctttactaaactctg

SEQ ID NO: 512667 - DNA, 373 bp, Homo sapiens
tgaagattgcgaaatggatggcttggcccacagtggctctgggttgagggtggaactgtggacaattgggacaaaggcatgtcattctatcttgctcctggagaggctgattgtcctgggggctttggtgtcacagttcccagaagccaggttggccagaccatatgtcttacattgtggtgagcttgcctttgtaaattaatctccaagatgccagatcgagagggatggtggacctagactgaagccaaaccattcgggagctctctttccccagagagaaactccaaatgtcttgaaaggagccctaaagcatacccttagaaggggcaagccatgctctgagacagaaagaggattaacagagcaaagt

SEQ ID NO: 512668 - DNA, 120 bp, Homo sapiens
ggtctttaaaattgtttttttaattaaaaatattttgtagagacagggtctttctatgttgcccaggctaggctagtcttgaactcctggctgaagcagtcctccgtcgcgttggcctct

SEQ ID NO: 512669 - DNA, 285 bp, Homo sapiens
tcatcgtgccatgttccactccgacaacgcctactacctggtcgatgccaccgtgcacgcccaccgctgcaagaccaacactgcctccaacaccgcctaccgtggctttggcggcccacagggcatggttgccatcgagcaggtgatggaccacatcgcccgccatctgggccgtgatccgctggcagtgcgcaaggcaaactactacggcaagaccgagcgtaacgtcacccattgctaccagaccgtcgagcacaacatgctcgacgagatgaccgccgagct

SEQ ID NO: 512670 - DNA, 169 bp, Homo sapiens
cacctacttgtggtctgtgcctcccctactctcttctcatttcgtatatacgaagtcagaaaactcatcatcaggcgacgccctggcggctgggtggagaaggaaacctactattagccccccgccctgcacgccgtggagcatcaggccacacactctacatgcatca

SEQ ID NO: 512671 - DNA, 363 bp, Homo sapiens
tcgttgtatcaagccacgaggtatgacatgaactatatcatagccaagaaagggtgaaaacagccacaatatatgggcaatccaggctctattattacagtactgcacacttgagatgtaatggggatatcagaaaggagaaaaattggtagaaatgcagtattttagccttaataacagactcatgtctcatactactatgctgcaacgtaaagaatagataaacaattttatcaacaacacctgtatacatcacacacctattcacctcattcctaaccacctttggttggagtgagtataaggaaaaatgaaacaaacttcttgtatgacaggaactcatgattttctatatacattttg

SEQ ID NO: 512672 - DNA, 1257 bp, Homo sapiens
gggatggaatagtcacccgtaaggatggcaatgccacgtggaaccacgctgcttgagcgttctgtactgcatccgtacgcactcaagtctgatcactaactggacgaatgcccgttgccagctcgtgccctctccaatggtatgtctaccaaatatgtggatggttattggctacttgtatccatggtttggacagatgtgtgagcacatgagatgtctcattaaaagcccggtggtatggatggtcgacctttttgcttcgctagtcaacaggttgatcaactgggaataggtaaagaattcttgtcgagaagttgcatgctatggaatgcgtttgtgaagtaggaaaggtgtctttcacttgtgtggagcacattgtaggggtcgttccacatcgttgaaggataattgtaggttattgttgcaagggcaatggttcgaggtggtgcgcagagtggttggagtgggtgacaggggacagacaatgtgaaagccaattcacaaaattggagaagccgaaggatgggctacgcaattcgtggtcttcagggagttgatttgattccgtagaagaccgagtgactaggggtcgcaaaattaacaggcgtccctggcttaacttgccatcacagtgatattcgggacactggaccacctaatgagttcgtgcaactatgttgctattggcaaaggatggggtgtgatggagtcttggaaggggacaacaacgcattttggagatgcggacacggtttgtcgtgggactaaaaaaaaggctttggtgatagaggaaatgcgtacgcataaaaaaataacgtttggaaagggggttagttggtgtttagatatgacgtgtgacagaacattgggtttgggaattaattgggcatgttcccatgacgagagagggcacaatggtatgttgattcgaaggaaaggattttacaatgcaagagaaggaataaatttcgcaatgacagtttgtgggcgtggaaacggaggataagggacaaggagaacgggatgtagataatttgaatgacgatcggaagacaacgttgtggtcgtgaatggagagtgggagtcaaatatcacaacaaagggcaggtgtgtggtaacactaactaaaaagggggttgtagcatgtgaggaaggcgttgtgacgaaatgggatcagcaacaaaagattgttggacgccagaaaaaagggtgcataaaaggcgtatatatgtagaagtcattaaactctcctagatg

SEQ ID NO: 512673 - DNA, 134 bp, Homo sapiens
gagctcgaccgcttctgcttctgcgcacgacatgcttgcccacctcccggctgtgacacggcccgtgtaccacttccctgttcacacgcacctccacgtgcttcctgcttctgcctccagggctcttggtgagg

SEQ ID NO: 512674 - DNA, 1249 bp, Homo sapiens
gaagaagctgtgtgaactgcagcctgaggagaagtgctgtgtggtgggcactcgtgttcaagggctcatgtccgctgcagtcctccatcctgcgggaggtcatgcgaggagcagcaacctggtcccccagctctcgctcggatgtatatactatacacccagatagactgagctggtcttggaagatgaagtgcagcgtatcatcactaaaatggcagccgattgacgtgtctaaagcctggcttacgcgggactgttacctggctgtgtttggcgtccgatgaagagacgactgggacatgtttctggtggaggactatatagcttctgtgtgactctatgctccgcctagaagcccgtagccccacttgacgatcgagatagagtagtgctacgtaggtgtccgggcctgggcctagggtggcgggggaggcgagagcctgctggaggaccccaagttgcattgagtgagatagtagtgtgacagtggtgcagccttggcgggatgatcgtgggaagtcagtgcaagctgccaggccaatgtgtatcccggggttagtacttcggcatgggcaaagccttccttcaagacatatagagaatccgagaatgaccagggtggggaattctctaagttcattacttaagggggcaaaagaatagtcccgttctatttcgaaagaagaaagaacgcccaggggccaagtacaccaaagacggatggcgtaagggccttgtatttcccagtacttgggccttgcgcactggaagaattcccttcccgtgttacatgccatggaaggccgattacatacatgtgagctgtaacaattacgagggaacacgagagaaatgtgttgaagggtggacacaattaatatggcccgggtagttaacaatgactagtgctactgagaagggcacatccagccgttggataatgaattcggattggaggcagaatggggaaatcacacattggccagggtagtcacagggtctatcaaataatggatgcccatcagagaatggacacacgctagtgaagtaagccatcattaagggtgtatagagctagtaccccagctccgatatgcataactacagaaattagctggggaactccacacgacatcgagaattatcagttttccgcccaaagaacaatgattagcccccgagagccattgtgtatactataacaccatttatataggtacatgtagtgtcaaacaacatcacataccag

SEQ ID NO: 512675 - DNA, 312 bp, Homo sapiens
gaatctcgggtcaagctcttctcctgcctcaaataccaagtagctaggactacaggcgcccgatacacgcctggctgattttgtattttcagtagagacacggtttcaccatgttggccagagtggtctcaaactcctgacctcaggtgatccatctgcctcgatctcccaaagtgctagaattgcaggtgtgagccactgcacccagctagaaatcgcagattttttttgggattaaactaagtctcaatctgtggcccaggctggattgcaccagtatgatctcagattgagccactccgcccggttaaa

SEQ ID NO: 512676 - DNA, 859 bp, Homo sapiens
  misc_feature (9)..(9): n is a, c, g, or t
  misc_feature (73)..(73): n is a, c, g, or t
  misc_feature (81)..(81): n is a, c, g, or t
  misc_feature (83)..(83): n is a, c, g, or t
  misc_feature (92)..(92): n is a, c, g, or t
  misc_feature (115)..(115): n is a, c, g, or t
  misc_feature (117)..(117): n is a, c, g, or t
  misc_feature (119)..(119): n is a, c, g, or t
  misc_feature (142)..(143): n is a, c, g, or t
  misc_feature (147)..(147): n is a, c, g, or t
  misc_feature (149)..(149): n is a, c, g, or t
  misc_feature (154)..(154): n is a, c, g, or t
  misc_feature (166)..(166): n is a, c, g, or t
  misc_feature (168)..(168): n is a, c, g, or t
  misc_feature (198)..(198): n is a, c, g, or t
  misc_feature (206)..(208): n is a, c, g, or t
  misc_feature (215)..(215): n is a, c, g, or t
  misc_feature (222)..(223): n is a, c, g, or t
  misc_feature (225)..(225): n is a, c, g, or t
  misc_feature (249)..(249): n is a, c, g, or t
  misc_feature (256)..(256): n is a, c, g, or t
  misc_feature (260)..(262): n is a, c, g, or t
  misc_feature (264)..(264): n is a, c, g, or t
  misc_feature (272)..(272): n is a, c, g, or t
  misc_feature (289)..(289): n is a, c, g, or t
  misc_feature (291)..(291): n is a, c, g, or t
  misc_feature (294)..(295): n is a, c, g, or t
  misc_feature (298)..(298): n is a, c, g, or t
  misc_feature (301)..(301): n is a, c, g, or t
  misc_feature (306)..(306): n is a, c, g, or t
  misc_feature (309)..(310): n is a, c, g, or t
  misc_feature (312)..(312): n is a, c, g, or t
  misc_feature (330)..(330): n is a, c, g, or t
  misc_feature (348)..(348): n is a, c, g, or t
  misc_feature (352)..(352): n is a, c, g, or t
  misc_feature (360)..(360): n is a, c, g, or t
  misc_feature (364)..(364): n is a, c, g, or t
  misc_feature (368)..(368): n is a, c, g, or t
  misc_feature (370)..(370): n is a, c, g, or t
  misc_feature (376)..(376): n is a, c, g, or t
  misc_feature (378)..(378): n is a, c, g, or t
  misc_feature (380)..(380): n is a, c, g, or t
  misc_feature (391)..(391): n is a, c, g, or t
  misc_feature (393)..(393): n is a, c, g, or t
  misc_feature (401)..(401): n is a, c, g, or t
  misc_feature (405)..(405): n is a, c, g, or t
  misc_feature (407)..(407): n is a, c, g, or t
  misc_feature (507)..(507): n is a, c, g, or t
  misc_feature (539)..(539): n is a, c, g, or t
  misc_feature (551)..(551): n is a, c, g, or t
  misc_feature (859)..(859): n is a, c, g, or t
gaagctggngtcattttgattgcggggaagtctggatttaatgtcttccatcccactttgtatcgttgcattnacttcacncnctgtccagnttttattctttcttgctcgtttncntnggtccaatgcactggacccaacnnacangngtggnctcggggaaggnantgctccctccctccaaattctgagcagtanaaggccgnnnggggggngtggggnngngaaaggaatgagaccccaaaaggnagaaggnaagnnngngggggggngggatggggtggggggngnggnnggnggnggggnggnngnggtccccggagtccgagngcgaggggcccatatgcnacanctcagggntgtnctcngngggggngngngggggactaangnggcccggnagcngnggccaccgtcttctgtcccgtggctcctgcgaacacaggcagtggggaacaggcagtgactgcccacccccaccgttcctcctccctgaccctgcaaacntcggggaagctttcaggcccgggaaagcagancaggccccagtntccctcaccctttccctgggtctgaaggtcccggatcctgcgttcaaggatgacgctgaaactctctctttctcacatgggatctgtgatctgggccctcacaactcagcagagcaccactgtgtccccctcacatggagaggccgaggtctgtggagatcctgggacagagccagcgtcaaggactcagagggtgtcctggagtctcctaggacggaagacggcggccccaggtggggaaagactcagaccaggcctgcgcgctccaggtcctgcggcaggatgcggcccttcttgcgggctctgan

SEQ ID NO: 512677 - DNA, 110 bp, Homo sapiens
cagcttgtgctacagcttctgtaatcagaatccgtcaccagtatccgtctttattttgagggattctgattacagaaagctgaccattaggcccgaggttaggcccgaag

SEQ ID NO: 512678 - DNA, 718 bp, Homo sapiens
  misc_feature (8)..(9): n is a, c, g, or t
  misc_feature (646)..(646): n is a, c, g, or t
  misc_feature (678)..(678): n is a, c, g, or t
ggggctcnntagatcgctgagcgatactttcggcagcacctccttgattctcagtttgctggaggccgcaaccaggcccgcgccgccaccatgtttcgaaatcagtatgacaatgatgtcactgtttggagcccccagggcaggattcatcaaattgaatatgcaatggaagctgttaaacaaggttcagccacagttggtctgaaatcaaaaactcatgcagtttggttgcattgaaaagggcgcaatcagagctgtgcagctcatcagaaaaaaattctccatgttgacaaccatatggtatctcaattgcggggcttactgtgatgctagactgttatgtaattttatgcgtcaggagtgttgggattccagatttgtattcgatagaccactgcctgtgtctcgtcttgtatctctaatgtggaagcaagacccagataaccaacacaacgatatggccggaggaccatatgggtgtggtctccttattggctggttatgatgatatgggccctcacattttccaaacctgtccatctgctaactattttgactgcagagccatgtccattggagccgttcccaatcagctcgtacttacttggagagacatatgtctgaattatggggtgtatttaatganctagttaaacatggtctgggtgcttaagaganaaggttctgggaaaggctggttaaaagatggtcctggatg

SEQ ID NO: 512679 - DNA, 128 bp, Homo sapiens
  misc_feature (112)..(112): n is a, c, g, or t
  misc_feature (118)..(118): n is a, c, g, or t
gatcgcacactacgctccagcctaggtgacagagtgagactccatctcaacaacaacaacaacaaaaaaccacaaaaactatatttttaatcatgtttggtagcttgaaaantaaatnctttctgcct

SEQ ID NO: 512680 - DNA, 666 bp, Homo sapiens
  misc_feature (8)..(9): n is a, c, g, or t
  misc_feature (594)..(594): n is a, c, g, or t
  misc_feature (626)..(626): n is a, c, g, or t
ggggctcnntagatcgctgagcgatactttcggcagcacctccttgattctcagtttgctggaggccgcaaccaggcccgcgccgccaccatgtttcgaaatcagtatgacaatgatgtcactgtttggagcccccagggcaggattcatcaaattgaatatgcaatggaagctgttaaacaaggttcagccacagttggtctgaaatcaaaaactcatgcagtttggttgcattgaaaagggcgcaatcagagctgtgcagctcatcagaaagatgctagactgttatgtaattttatgcgtcaggagtgttgggattccagatttgtattcgatagaccactgcctgtgtctcgtcttgtatctctaatgtggaagcaagacccagataaccaacacaacgatatggccggaggaccatatgggtgtggtctccttattggctggttatgatgatatgggccctcacattttccaaacctgtccatctgctaactattttgactgcagagccatgtccattggagccgttcccaatcagctcgtacttacttggagagacatatgtctgaattatggggtgtatttaatganctagttaaacatggtctgggtgcttaagaganaaggttctgggaaaggctggttaaaagatggtcctggatg

SEQ ID NO: 512681 - DNA, 502 bp, Homo sapiens
agagatgaagaagctataaaatcacaacaaagatgctcaacactcagactagataaagaccccaaagtcagaaagcctgctcttcttttacaccagttattcaccttttacgacatgtagagtctacactgactttgctagcaaaccaggctagcacatggccctgacatttcataaggttctggtaattcaaacagagagttcataagactacactctaaggtcattaactttacttacagttatattaaaaattagaggtagatgagtacagtttattgtatgtctattacacttcaataaacgtgtaaaaaataaacgagagtagtcatcaaagttagtatgactagtaatatgacaaagtgacatcatatgcctcttgatctaatgactgaggacaaagcatcattcttgtgatattcctgccaaaacagtataacttcaatttaattataagaaaacatcagaaaatcctggattgaaagcatattctaaaaaaaaa

SEQ ID NO: 512682 - DNA, 983 bp, Homo sapiens
tactcatcgacgacgagtgttacagggtatttttgcaatataacttaattgctattgctgggcacatttacatttacaagagtcatttatagggttggccgtgagttctatagttagccagacttcttgagcgatactttgcgttgtactaagcctccatgtatagcgatgttccaagagacagtctagccaatagaagaaaggcgaagaagccccttgctcaagtgcgtcatatgtccgcagccataacatgacacccatttgtcccagtagataaccacctctaccacttggataatgatatctttaccagaacgtattctctaatgaagtttagtagtgcatagtgctaatgtatcactggtagttcctatcatagtatatataggtcgatgacacctttgctcccgttcttcgggacactagactgaggcatgccgagagaccagagaactctgaagatcaaaacctgggttataacgccaacagagtagagtgcggaaacgaccggagaccgtactatacctcagtcgtactgcgtgctcttgaacatagcttcttcctacactagagcgtttggtcgtccgatgttgccaggattcggactaaagggacttagctaacagcagccaaggaatgatcaccgactaagtaccgcgtcctagatatatctcgcgatcttcctgcgtttccctagcgtcacatttaagggtctccaattttcttaaaaggttgctttactgtgaggtggcctcgaaaagcggcttggataaagtaaagacttcccaagagtccccttattacacctgcatggacttagactattgggcactagtttgggacgccccgagtcatacctaatttcgcggtgttacgacgcaatgtagataccgccccggtgtttgaaaacgctggcggggccttgcacaacggacatcagttatagactccttgcggaggttaggaatctcgaaaaatgcaag

SEQ ID NO: 512683 - DNA, 1059 bp, Homo sapiens
aactcccccaaagacaagtgagttaagggagagaataagaacggcggtaacagttattggcaaaaagcatgaaaagagaaagcacttggaaatttattactagcttgctacccacgatgaaatcaacaacctgtatctggtatcaggccgggagacagatgaggcgagaggaggaggaggaggaggagaaggctctggagctgcctcgtggcgacaaacatcacacaacatcaaagcaacaatacaataacacattttcacaagaatcaatacaaacattcgactcatatacacatatcacaagcaaatacaaaagaagtctcagtggcagctattggtcaaaattaatatccatttctttttatctacggtgaatattgcgcaattatagatctggattttgaaccacttaatgaagcggcaacaccaggtgtttagaggtgttggcattcttcgctgatttggctgttcccaatgtttacattatttaatcttgcaaaaatggttctgtgcacttggatgtgaaatgctgtccagttttatttttattatgtggttatccttggatgtaccaaaaattcagaaaatgatctctgtagatattcgggttatgtgggtcatctttagaagttatcaggaatgtgtgtaaaacaagacgagaacttttgctaaggaatgactacatagaacagatttcatatacaatgagtggtaagattgtgtcactaggtagcatgaaggtatctggccaagtcatgcaatgggcacatataatgtagaaaacacacacagaaaaaacagacacagagaaaaaggacaacacacaaaacaacagaacaggcgagcagacaagacactcaccgagagggcccccagataagcagacacgagagttatgagacagagggcgacgaaaaggaggacgaaaacaccacgaagggcagcgctaacacagaggacacggacaacgcatggagcacttaccaaagcaacaccagtggcgtaacagtggaacacaccccagaatcacaagagaacaaaaacagataagatgacaac

SEQ ID NO: 512684 - DNA, 131 bp, Homo sapiens
ttgtggtatcagagcggctcttcaatgtatcaaggtgattttggaagaacgattctcggttctgcaacattgtgtcacagtgggagcaatttggggtgagtctctctcttatgatctctcttaatttcatg

SEQ ID NO: 512685 - DNA, 348 bp, Homo sapiens
gcctacatgttttgcatcattgacaagtcattgccccttccaaatgacaaaaccttactttacaatccatttcctcccacgaatgaatcaaatgttatccggaggggcccaggtcatgcttttaaaatttttaaaaaaaataagcctctacttttcatggattttttggatgaaagaacacttgtggcagtaaaacggcctttggatgacatcattggtcagctccccccccccattaaaaagaaaaaatttggaacctaaaacagggccctgtttgggtccttccttgaactgtttaccctgttgcttttcacaaatcatggtaataaaacaagttatttttgagga

SEQ ID NO: 512686 - DNA, 188 bp, Homo sapiens
atgaggatatttcattgtcgcgctccatttatgcaactagttgcaaagaattgtagagcgcactcctcgtttatgcaagcagttgcacagacattcgcgtttgtggtgttttggcgacggcggcgccgtgttggcctgccgatcaggcgcgcgcagcgagccgggcctcgatccagccgagaatgtcg

SEQ ID NO: 512687 - DNA, 102 bp, Homo sapiens
cacagtgacctgaagccggaaaacagcctctgtcagcaccccaaccaggtctcccccgtgaagatctgtgacttcggcctgggcaatcggttgcatggtacc

SEQ ID NO: 512688 - DNA, 206 bp, Homo sapiens
taggctgtacggccggaatttagggatggtcgtctggtgagaggaacctgcgcgagagtagcacctgtttcttcagagttgctgtcaaaataatcactgcgcccgcctattagtgacaagaagttgcaagaggacgggaccatttgtaaacgggagacgtacagggtactgcagaacggcgcgaggggcggggggggggggggagg

SEQ ID NO: 512689 - DNA, 1028 bp, Homo sapiens
gggtttcccggaacagtccgcgcgtaggacagggaggaaaaagaagccaccctgcggtcctggggcctggagctggagcctgcgctgcctgcctgcctgccgctggcctgtcttggatgctccctcctgctgctggtacgatgccttgccggtgcccgtgcctggggctctggggcggttgatggcctctgggttgctgcgtgtggtagcgtattgtgcgactggcatatgcgctggtccagcggctgccggcttgtacagagtgtggagcccctggctggcggctggcgtggagcagcactgtacggccaaggggtgggcaacggtgttctggccgatgccctccgacaagtcatggcaccagcgaagaagcttggcagcatgtacagttctatcgagtacgctgtctgcacaagtcggtgcccgagaagtcacgctccagtagccttccttgtctgcagatccgactgggatgaagaacatcacgcatgggggagccccactgggttacctcgcgactccctgagtggttgctgtcttctagggacctgtactagcgccggacggccttgacatgaacgaagagggcctagcagaagccactccgggcgaaggtgccgaaagggcccttcgcagggacctcatacgtctgcttgcatggactggcccccagaccaccaggttattgggcgaggtagtggcccctaggtgaccacaagttggtccgtcaggggcgtccattggcgtgcgtggcgtatcgtttctcaggcgcctttcagtgttacaccggacggcattccccacggggtgtgtccccccggtgccagcgctgcgtgcattgccggaagtctagggacctcgccagtaaggtgccttcgccatggtttcgacaggacccatacttcgctgattggccacttggaggcccgtccaccagtgaagcccagagggcgttcccgagcgattggctgggccaaatgcagaaggttgacagccttcctagtggtatgtccatcgatgaggacaca

SEQ ID NO: 512690 - DNA, 554 bp, Homo sapiens
gagcgggatgttccgagcgaccgatggagatggcggctgcggcatgagtgacggacggtggaggccctagagcccgtggcctgaagggggggactaaaccctgggtgcccggcgaggagcccgggcagggttgtcttagcaaggtatcaagaacttactatagtgtggtcgaagtaattcaatcgagggtaaagagcatcaagtagaaacttctgcttggttgataagtacttcaggacattcccccagtggctgaagtggcatatgaatcatgaagttggatcagtttggactgactggctcctcctactccagagaggaaagctcatccagggaccatgaagccacattcgctcaccatctgtgtgctgcttaagctagtgctgcgggaaccatggtatccttgggaggaatcaagcatgagctcttgggatgagacttcctgccatatcctaggggttgagacgcggacacatgccattggcttcatctggatcgacccaggggaagctgacaggaggggcttcgctctgaaccgtctggggcctgtagga

SEQ ID NO: 512691 - DNA, 1254 bp, Homo sapiens
agcggagcgggcgcctgcgacagtgaacgatagtgaccgtccgctcgccgcccggctcatgaccaagccgagccagcgcagtgacataacgagcctagcagagacagcgtctgcgcagccgtggctgaggagcctgtggcggcagacgagcggatgtgaaccagctggagcagccgagcgagttagttgtcagccgaggggcgaaacctggaagggcggggctgtgccagcgtaagcggactccccggtgtgcttgagagcctcagtggaccagtcgctacatcgtcgcgcgaagagcttttacttcccctcctatgagaaagaagccgagcgtcatgatctgagcggcagcaaattccgtgacgggcagatcttgccttctcaggaaacacgtgagctggttggagccgaccatgcttaccactttgctctgcaccaaactggtagggctgctttcacaccaaagcgaccgctgtggaccaaaccaagtcacagctacacctgggtcctgcacgcagaaccttgcttgcaacctttgggcaccccaactttggcccttgtgcgcattaggcccataggaacttgacacaaagtaaaccacggtatttgctaattgctgggccccgtttggcgcacaacagtcacgttttaaccccccatttgcagcttaaacattgaagggcgcgcacagcgcggggtaccttcaaggcgttcccaatgtcgtcccaaaaacgtaagttaacaccactaagttgcccccaagaataggaaaacctgggtgcctgttaacatgggtgacgctcaatacaaacttggttttcccagcgaatgggcgcttttccatgtggcatccgttggttggccttaaacgtaaattaaatcgttagccgtggaaggttacacccaaaggccaacaatacaacagcaaaagtaatatacaaccgtctttttccacaagcgtccgcggttgaaaaactaccgggcggccccaaataaaaggcaggcgccataagaatagccaatttccaagaggcggggcggggaggcacccagtagaataccctacacggctattcggtgagcgccgcccttttaaaagcgagaacgagcacagcataaaactctccccgaacacgcatatgggaggaggaaaatccccatggggggctacagatacacgctgtggatctaccgctcgggggagtcgacacggacggagcaaccccctacggcacaaacaatggtcacagacat

SEQ ID NO: 512692 - DNA, 171 bp, Homo sapiens
acggattacaggcaccggccaccaaacatggataattccagtatggttagatagagatggagccaggctaggtttcaaactcgtgacctcgtgatcctccctccttgggctcccaaagtactgggattaaaggtgtaagccagcatacccagccagaagtgcgcctgggtg

SEQ ID NO: 512693 - DNA, 267 bp, Homo sapiens
  misc_feature (8)..(8): n is a, c, g, or t
  misc_feature (42)..(42): n is a, c, g, or t
  misc_feature (46)..(46): n is a, c, g, or t
  misc_feature (48)..(48): n is a, c, g, or t
  misc_feature (95)..(95): n is a, c, g, or t
  misc_feature (115)..(115): n is a, c, g, or t
  misc_feature (168)..(168): n is a, c, g, or t
tgcaacantggcagacccggttgagatatggacagcaaaatnaccncngtatcggtatcgttctgagcgctggctgaggccggaaaaagatcgangatatggctgtcatagcctntggctgctgcaagattcgcggttgcctgcgcctcaagagaacgtccgtaaatnatcagcctgacgcatggcctgaaccccacctcaaagccattgagattccagcccgtccggttttgcttgggcaggcacaccagcgattgtgcttgcggt

SEQ ID NO: 512694 - DNA, 140 bp, Homo sapiens
caaaattctaagaaccagcattgcacttaacctatagcaacctgccagagactccaaacaacatccgtatctgccacggatacttcaggcaccattggatctgctggatcatatgggcgaagtggcagagcagtttgcat

SEQ ID NO: 512695 - DNA, 406 bp, Homo sapiens
gactgcatcctctggtcccgtcacagagaagagattatctagactcaagcttgagagttcaccttcggcgggcggaagttcatcattttcaaggccgccaaattcacgattaacttcatggctacagcccatgagagcaacacttaatgcactacaaaaaaaccaagcgaggaagatcgatatttatttcatgagttcagtaccttaagagataggactgaaatcacactagagaccttatgcgcagctggatactgtcagaattaacaggtacgcagaattcggcgctggcgtattacagcaggcatgaaaaagcccgcgggctaggcgggcttttaccacagataaatttcagatcagaacctgaacacttccagatccgtacgaatcggcgtggccagaagga

SEQ ID NO: 512696 - DNA, 887 bp, Homo sapiens
gtatgaattgtgtatacgggatgttggctatatggatacatttgttagtcccgtgtgggctgaatccgggtctatcgtctgttgatcataagtgggtacctgtgttgtcatccgctcaagaccaggtagcttagagacattattgggtactgaatgtcatcgttgtagcacttcagtctatattatggatctgtgtatatgattttggaggtgtgagtgggagtgttgaatatcgtaaatacacatgttcaggtatgggtttgtgtacacatttataatgatagctgttctagaaactcactacataaaattctagacaagggggcaagtggcacaaaaatgaaggaatcttttacatgaacagtgatggattatcttgttaacaaacacgcacctcaactggctggtgtttgatttcaccaacatagacttgacatctgagactgatgaacattccagatattcatagcttccggacagaggcagaacggatcaaataattcagatgctaatggccctgtcctctcaagggcaagatgttgaataactaacaacaataaaataccccctttgtggtctgaaataccgccaatctcgtattagatttaaacctctccctgtttttaatttcctgtgaactttctgaaagaggtggttacatcgtaatcttcttgcgctacacatctggtccttaacacttggcacctgaccattctgaatttaacaacctcctcgggtacacgaagatccctagtttctgggtcatcttaacttcatttcactactcattaagtcttacactggcggcacatacacaacaaaccccaccacaccacaaaaaacaccactcttgccccgcctgtgctccccaacccctcagcaccccg

SEQ ID NO: 512697 - DNA, 709 bp, Homo sapiens
tcgtcacctaggcgtgcagtgtgcactgctgggctcccccatcccgtcctatgccggaacagccccgggcaggaggcgtggaaagtcgagggggtaaaccgcgagtgtgcgttgtgtcagccacggcgcagggtggggcgcgggcgggacttgggcgggcgggttgggcttggccgagctggcctccgtgggtcacctgaccgcatataagtgcatgtcggactggacacagaccatcccctcgaccgctcgcagtcgcatttggcacgctctccctaccgctccaagccccagaccctcagtccatggcatgccccctggatcaggccattggcctcctcgtggtcatcttccacgaagtactccggcagggagggtgactaagcacacctctgagcaatgaaggagctgaatggagctgatccatgaaggacgctcaccattggctcgaacgctgcaggatgctgaaattgtgaggctgatggaagacttggaccggaacaaggaccagtgaggtgaacttccatggagtatgtcaccttcctgtggggccttgtgcctttgatctacaatgaagccctcaaagggctgaacaataaatagtggaacgatggatgacaccctctgggggtcctctctgagtcacaatccagtgctgggtacatgtacataaaatatgccgtgggtcactttaatatcgagacaaaga

SEQ ID NO: 512698 - DNA, 481 bp, Homo sapiens
  misc_feature (26)..(26): n is a, c, g, or t
  misc_feature (195)..(195): n is a, c, g, or t
  misc_feature (245)..(245): n is a, c, g, or t
  misc_feature (291)..(291): n is a, c, g, or t
  misc_feature (293)..(293): n is a, c, g, or t
  misc_feature (358)..(358): n is a, c, g, or t
  misc_feature (369)..(370): n is a, c, g, or t
  misc_feature (379)..(379): n is a, c, g, or t
  misc_feature (404)..(404): n is a, c, g, or t
  misc_feature (416)..(416): n is a, c, g, or t
  misc_feature (425)..(425): n is a, c, g, or t
  misc_feature (458)..(458): n is a, c, g, or t
gtccggaattcctatgtcttactttntaaaacatgatggggttgctatgtgccagactagagtcaatggctagtcacaggcacaatcataagagtgcatcctttaactcctgggctcaagctgttctcttacctgaacttcgtgagtagtgggactacaggcacacaccactgtgcccagcttgccttacttttngtattgtgccccaccacatcctggacccctaaaacaacactcatgtcttntgcccacaaatttgcaatttttctcaatttttttttttttttggananggaggttctggtggcccaagcgggagtgcaagggtgtgactacagctcactgcaacctcggcctnccaggtaaaanngattctccngtctcactcagcctcccaaatagcngggactacagtntcgtgcaantacaacgggctatggaatttttttagtagagangggttttggccatgtaggccggg

SEQ ID NO: 512699 - DNA, 936 bp, Homo sapiens
attatggtgccctttctggctaccgattgtcaaacgccctgggcctctttttgtgcgccccgtttcgtcgggctctattccaccatgttcacagggggtcggcatcaatccctaattagcgcgaaattcgcactatttggggcccaaagctccacacaacttcttggagtttagtcagaccctcttccacgctgttgctcgactaaggccggatatcgcctttaaagggggcgcccttttattaacgtcccctcctcgactttgtcggcactgcactcggacgtagccccgccggtcaataatgacgcgctcctattgggggcaccctgcggccgccaacatacgcccggtgtcatcggcgccctacgcttctgagtgttcgactgcgtcgagcccctccttctatgacgcctttgcacgtaaaagcgggcttacggctaaaaatggctggctaaggctattacaactacgggattgcatcatagcctcggaggcctctctctctcccccgggttttttgtgtctaataagccgcacgagagaggccctcgcactacgtaggttatgtagctgaaacgggctcgccgctcgcccacagcctacatagtgttctgctctagtgttaccacagacataataagcgcacaattcttcccccccgatatattatgacgaccctacaataattttgtttgacgcctccttcaaaagcgcctcatttctaaaagcggccccccactgtttgttctcgtaagtgtggccgcaccacaacaatacccgcgccttttcgcggtagatgcctcactcattacgccactcacccctctcttcgactacaatattgcaatcaccgcaccccgcctccgccgattatgaattggagacactatgcccatcaccagctcattttcgggtcatttcccgccccacatgaca

SEQ ID NO: 512700 - DNA, 270 bp, Homo sapiens
cgtccttatcatacctaccatctcagcccaaaacgttttgaactgataaggcaacttcagcaaagtctcaggatacaaaatccctgtgcaaaaatcacaagcatttggttacaccaaataggcaagcagagagtcaaatcatgaatgaactcccattctcaatcactacaaagagaataaaatacctaggagtacagctaacaagggatgtaaaggacctcttcaaggagaactacaaaccactgctcaaggtaggtatgatgaaggacg

SEQ ID NO: 512701 - DNA, 146 bp, Homo sapiens
gctatctgcggggccattcgtaggatgggtgagtcagatgattccattctccgattgaccaaggccgatggcatcgtctcaaagaacttttgactggagagaataacagacgtggaatatttgtcataaataaataacgaaaacct

SEQ ID NO: 512702 - DNA, 289 bp, Homo sapiens
tttttccctaaacccccccccccccttttttaccggggggggggggcgggttccaaaccggttggtttcattgggccctttaggtttggggggaaaagcggggtttttttaaccccggcctggttaacccctccaagggaagggggaagtttttggggcccccctgggttttttttttgggggggggcggttttaggtttttggtttttaaaaccgggcctttttttggggacccccttgccccaaattttgtccccgatttttgggccccctttaaaaggttttttga

SEQ ID NO: 512703 - DNA, 298 bp, Homo sapiens
  misc_feature (9)..(10): n is a, c, g, or t
  misc_feature (143)..(143): n is a, c, g, or t
  misc_feature (209)..(209): n is a, c, g, or t
  misc_feature (271)..(271): n is a, c, g, or t
  misc_feature (285)..(286): n is a, c, g, or t
tgatgttanncccaacaccctctttctcaggtggtttcaccaacattccaccccaaaactttttatatctcattggccagaacttaatcccagtaccataccttgctgctaaggaggctaagaaatgtgcttcttaaactgancacactgcaagccccaattcatttacattagtaagcaagaagagaatgaatattggcaggcagctnccaatctcagctacaattctagggctgatacagaacaacatgagttctggatgaaagatccnggtggttgagcatnncaaagtgttggg

SEQ ID NO: 512704 - DNA, 395 bp, Homo sapiens
acgcgggtctcactgctcttatattcaacctgatatgaattattcactaatgataacctgacttcaaaaacctttaggcaaagagaagacacatttaattatatttatgtatacagatagcagatatatagatatacatacaattatataaaataattaccaaaacatatccgatctgaatgatttcctccaagttaaaaatgtattgactttaaaataaacatgaaaatgaaccaggtaggaaaaaatagttactccagaaaagattaaaactttgttaccagttggtctattttaatgttctattttataaagttagtatttaaaacaagactccctttgtaatgagttcctccatttaatttaatatcccaaataccttgagagccccataa

SEQ ID NO: 512705 - DNA, 178 bp, Homo sapiens
tctagaagctggggctcttctccctggccctttctcgaggcttatctgtccttgcacctgtgccggctcctgctgagctctggcgacatcagctcagacgcctctcctcaccctctgttctcgccttgtgttggcaccagatgtctgcttttctagctgaaatctcacttattagctg

SEQ ID NO: 512706 - DNA, 204 bp, Homo sapiens
cgacctagaggatcccctataccaacgcgaaagtcacagcttcactgcctgagccagtcgaagaccacgaacccagggcgaagaatgaacaactgcagacgcaccacctgaagagccgtaatcactcaccacgaaggtctggcagctgcactgccatgaaccagcgaagaccacaggacccaccaggaaggacagaaacttcca

SEQ ID NO: 512707 - DNA, 477 bp, Homo sapiens
tacggaatccaatccaagggttcccaaaatcgcccgcacatccactattacctaccggaaactctttattcttcgtttgggagagaaagtttataggttgggggggatattggaaaacttgccggcgccgggttagaactttcttcttagggtagttagagaggggaaggttagggtttcttgtattctcccgcctgcctctcctcccgtttgcccgcctgcccgccctgctcgtccgcccggcctgctgtccatacgtccgcccgtctgccctcccgctatctgtccgtctgtccgcccgtctgtccgtccgctcgtccgtttgtcgtctgactgtccgtccgttcgcccgctcgaccgcccgtacgcccgtcggtccgtccatccgtccgcccctccgcccggctgcccgcttgccgtctgtccgtccgcccgcccgtccgatccgatccgtccgtccgtccgtccgtccgtccg

SEQ ID NO: 512708 - DNA, 551 bp, Homo sapiens
tgatgtgtgcatcttgtagtttagtcttcgtttctgatactgtcttattttccatttctttccttgagtttggaacagctctatatttcaagaatacttcctggctcggctggactggtttttatttggagtttttaaaaacttttggacgtggccgggcacggtgactcatgcccggtaatccccagcacttttgggaggccaaggcggggtggatcacttaggggtcaggagttcaagaccagcctggccaacatggtgaaaccctgtctctactaaaaatacaggaattagccgggcgtggtggtacacccctgtaatctcagctactcaggaggttgaggcaggagaatctcttgaatctgggaggcggaggttgcagtgggcagagatggcaccactgtgctaaaaaagcaaaggccctagagattttatgattttctacttgatgaaattaagtgataaaaaatttgagtagaaaattaacatattttgtataaatatgtacatataggggcctaagtagacgtccttgggatttcaaaaaggag

SEQ ID NO: 512709 - DNA, 944 bp, Homo sapiens
cagtgtggaccgacaggagatccgacatacatgattcaaatcatatgatgcattagttataccatattgacatagtcgatgagagattgtctaaaggctgagatatggaatatgtcatggctgctaaaccctgtctcggcagctaaggtattgatatgaatgaaataattctggcctgctgtatcggttacttgaaagagtagaatggcattattaagatacgtagcatgttgaataatgagttttggcagtaatagaggaagtgcagggatgtattcatacagtacttgtaaaaatatggtttactggtagagcataagacatgcattctgggaaaatactatccgggaaattaccgtgataatcgaatgggtgagagggtcgttaataaagacttgggtaggggaagtgaataagcagggctaagattaatgtggcatctaaagatgtacctgattagtactctatggtcgttcatcttggaaaagcttttgaaaagtggaaaggtcattttgtttgcattttccccatttctagttttttaaaagaccaacaaatctcaagccctatacaatggttgtattgaaccttttacattttgaattacaagatgttcacccagtgaagtctttcatgtattcaacgtgatttataaagatggcgcggtaggctacagaaacaagaacttgacaagtaagaggttaacgcagctgccggggcccgtgacacacgcctggaatccagcactttggaggcgggggggaggaacaccggaacaggggttaaaacaggcggcacatgggaacccgccataaaataccaaatgcgggggggggaggccgaacccgcactcgggagggcggaatgtgcaccgaggggcggggaacacgccccggaagagcctcaaaaaaaaaggcggccaaacaggggcaaaaataaaaagc

SEQ ID NO: 512710 - DNA, 233 bp, Homo sapiens
attcctcgattgtggccacctctgaccgctgcctgtgcccagcgctgcccggaagccatgatctgcgtcattgccaatccggttgattctaccatccccatcacagcagaagtttgcaagaatcatggagtgtaccagcccgacaaaatcttcggtgtgaccatccttagaaccttgtgggagccaacacctttgttgcagagctgaagggtttggatccagctcgatgtcaa

SEQ ID NO: 512711 - DNA, 349 bp, Homo sapiens
ggcactcaagcagatggggtgcaaaaaaaaaaatctacattagaccccttggtgggaaggcttaacactttccacagaacagaaactacaatacccggttctacaattagtcacaaatacagtcctcgagtttttggcccatacacatgagtattggtctaaaacatgtcttcttggtagcagctaggcccggccacccatggtgctgggctgagttcacaaatcgtgtggtaaccggtagtttcccggtcagttctcgggctctcctctccggctaagcttggtttcctaatgaaaatcttcggccattggcatagctagggcggctatggaaacttctaaaactagg

SEQ ID NO: 512712 - DNA, 652 bp, Homo sapiens
ggcctgatgtgcgcgaagtggtgagcgtgggcctggctgctcggagccgggaacatgatggtcgctgggagcactaaggcgctgagatagggagcacggcgcgcgctgcgtcgtgctagccaattgtgtgttgaacactgtaaggccagaaccagagtctcagtgcgttgcactaaagagcggtcggagtgtaaatccgcgcaactaattcgtttccctccgtggacatgtcacgtggctgggcctggcgcatgtccgtcccgctagtcccacgcgcaacgggtttgtgtcggacccttctgggcccttgggcagggcagtcctagttgtctccgggatctcgcgcgtgtgacagcaggctgcctccgcctgctgctctcactatggcccgtgtaggtctggcagtcccctgtgcttggacctggccaaggggcgttctctgaagatgtgttgtcgaccgtggttataattgatgaccatgggtcgtcgggtctccgacgtacagcgagagtgactcctgaaatgtcaccggaccaaaaacgggggccgcccccttatgatgtcccgggggtccccttgtacttcttcgaaaaaccggcgtgacttatagggagggcccgggtaaacttcatccttgatgtgtgggcgttgg

SEQ ID NO: 512713 - DNA, 869 bp, Homo sapiens
gcgagcgcgcgccgccgggccctcgccgcgcggtcctggatatgtcgccaacatgtacatgggtcggagactacgtctactttgagaactcctccagcaacccatacctgatccggagaatcgatggagctcaaccagacggcatatgggaacgtggaggccaaacgtggtgtgcttctaccggatggctgggacatctccaagcagccctcaatcgtccctggccgacaaagcacgcaatgggcgggggtgtcctggctccgatttcctcgggggctggtgaatgaagtcctcgtcacgccccccggtagtggtctgtctctcacgtggcagtcctctgcaagcgttgtcatggtgtggctgggtgtgggcagtcattgatcgaggcttctttttcccttctatgatgacttctggagactttccaggctggtgggaccctgcgtgactgcgacttgccaatgtctctctctttttaattttgcggagaggcttctgttgggattgctgagtagtgttttcaggaaagcagtcctctccttattctttacgattcaaacccaagtttatgtaaccctggctgggaggggctgcttgtggccagcacagcgtgtgggaggaagccactggctgcttgggaatgccctcagccttggggggacccatgcttctcccccgggcaacaggtgctctgcaggtggtgcgatgtctcctgtgccgggggatgttgacttcagagccaggagccagaggcaccccacgccctccgacatgctactgaccagggctgccgagcttgggcccacttgcccagaaccagtgttggtaccccacctgggggccttcatgtgtcggtgggggccggccta

SEQ ID NO: 512714 - DNA, 313 bp, Homo sapiens
gtagacataggccccgatgaagccgactgaaagtcaccaccatgtatcagtgtccctggcgtggtttcccccagcgcctagccacgtctgatcatctagtgtcgaagtcagccacgcatagtgtccgactgcgccttggtagacatacggcagcacagcgtaggccccaccaaaggtcagcaatgctgccttggtgaagaaccagcccatttgggtcagtgtgccttcccagccgaagaggacagtcaacatacccatcggtaaagcccatagcacggcgccggtgagtgcgagcgcggccaatttcaaccaa

SEQ ID NO: 512715 - DNA, 245 bp, Homo sapiens
cgctttgctgtcgtgatatgagacagacagttgcgggggtgtcacaaagcagtggacaagaaggctgcgggagctggcaaggcaccaagctgcccagaaagctcagaaggcgtaaatgaagtataccctaaacctgccaccccaccttaatcagggtggaagaacggtctcagaactgtgtgttcaattggcgcatttaaggttagtagtaaaagacgtggttaagtgataacaatgcacgtaaa

SEQ ID NO: 512716 - DNA, 345 bp, Homo sapiens
  misc_feature (250)..(250): n is a, c, g, or t
  misc_feature (326)..(326): n is a, c, g, or t
aaaataattcaaatattgtttacctgaatagtaatacttgaaaatccactccctatttttataactgaaatcaattctactatagaacatttaaagccatgcaaaaattaaaataatttagttaggcaggacatgaaaataactaaattatatacacaaagtcttctaggagtttgactattacctttatttgctgtcttctctaacaatctggaagtaaagtattgagaaggaaagtgttgtatatatncttcattaagtttccaataaactactaagttaatctaaattaaagaagggaaaacacatgggtttaatttttaagnatgtattttttttaaaaca

SEQ ID NO: 512717 - DNA, 441 bp, Homo sapiens
atcatggaggaccactttctgataggacataaccttatcttctatactgtattcttacccttgtttggcaacaaagccattatgcagggaatattttttaatctgtagtattcaagatgaatcaaaatgatgcgctggtaatacggcaataaggtagcaaaggcaggtgctttgcagacagaatgcttggaacacttgcgtctccctagaggtgaaaagtgagcagaggcccctagaaaccctcctctgaatcctcctaattccttaagatagatgcaaaatggtaagccgaggcatcgcgcaaccgctggtgcgatgcttcagggaaaatggacaacccacgcaagactaatgatcgcttccggttccaacaggtgtcacctacctgtatcagaccagttagactttccatcgccttatccttccatcagttgcctggct

SEQ ID NO: 512718 - DNA, 125 bp, Homo sapiens
gcaccatggcggactgcgagagaacatggcccagggccttgcacgcgcgagactgggtgtccctgtctggtgctcgtcgccatacggcaccgccgtgacctgcggccgtcaaccctggcgtcgtg

SEQ ID NO: 512719 - DNA, 1603 bp, Homo sapiens
  misc_feature (135)..(135): n is a, c, g, or t
  misc_feature (1215)..(1215): n is a, c, g, or t
gtgctggtagtccatcgtcgatggctgcagtattaaactgtcggccaagggctgtctcctttgtcactcgctgtctagtcgcttcctcatcttttctttgtttgtgcatgcctgctgggttcatttcccgacggnctaagcatgagggatcactcagcgctcttgtgttttgggtctctcctctctcttaaggggggagttctcctcacatctgtcccgggccctcccttgctgtttccccctcatatgagacggggtggatgagtcgttctctttagtgtgtttccttggcccagccggggagaccaccacctcgtttggcgggggccccccaatttgctgtggagcttcccccacagagggggcacacaggacagtgtctgatttaaaaaggagaaaagtgtgatgcgccatatttcttatagttccgaataattcttcccaagaaggcactcttgggggagaaaagctttttttgcgttggccaaacttcgtggccacaaattgtggtgtgccccgacgtgggaagaccccctgtcgttggaattggtccaggtggtttataaatccccctcccaaggggaattattcttgtcccacagaaaggggccttttggtctgtagagttttgtttggcctgcctgccaccactgggggagccactccttcctccacaatttggcgttgtgccccgcgttgtacgaagcatacccttgggggacccgttctgcactttataccgcagaattccccaaggctcagcccctttccccggggggagccccccgggccttttctttttggtggtttaacgtggacccccacccagtggcgtgtgaccccaacacacagcccgtctgtctcacgcgggagggcgcatctgtttaaatggttaacacacgtgaccggttgaccccattgcccgctttggtggtgaaccacacagaattcttctcttcttgccgcttttatgttggcacacatttgcgcccatctcctccaaagcgcacacacacacacacagagggagactctctcacacctcagatggggtgtttgatagttggttgtgataatctctgggcctccgggggaggattcttgccgcacatagcggtgcgcgcaccccattgtctcccgtgtaaccacaccccatggggagagtctcaagtcctctggatctctgttacattcttcacacagagagagatctcntggaagagagaaattgaaaaagaaagacccaggctgctgcttggagaaagcgccagtgcacccaagggaggaatattccagggtgaataggacatgctctcccgctcctggagattccacatgcgtacacctcacgacctggaggttcgccagaacatggtctgaagagtgtaccaggtgccctcttgtgccttattctagccaattccctactgaagaactggagcgctccagcctgcccccggaagaacatggtttgccagctccccactgctccaggcccacatgaatgggtaggagccaacccctgactggtcttaagactgtttttgcataggctcttaagccagcctgggaaaatggttgatggaaaataaacatccagttt

SEQ ID NO: 512720 - DNA, 375 bp, Homo sapiens
  misc_feature (144)..(144): n is a, c, g, or t
  misc_feature (203)..(203): n is a, c, g, or t
  misc_feature (206)..(206): n is a, c, g, or t
  misc_feature (209)..(209): n is a, c, g, or t
  misc_feature (281)..(281): n is a, c, g, or t
  misc_feature (305)..(305): n is a, c, g, or t
ttagggtacatcataaacagtgctatcttaatttattgtaacacttacatacttgagtgttgagaaaatgtcatgctaataagatcctttgctgcttagccaagtgtaaatgtttaaaaagaagctctgatatcagtagtatgncaattatcatggggtgaattttgcaggctcattcaggaactgtcgcctgataacactgnacnacnacctccccttcaaggcacaggcctctcattctagaacatcatctttagaatatgaatcggacctttacaggnaccacaagtaggggctagaagaancataatatccattatcatttaattttaaaggttcaacacaccatcaccatttaattttggttcttacctg

SEQ ID NO: 512721 - DNA, 258 bp, Homo sapiens
tggcgaaaccgtctctacaaaaaacacaaaaatcagcagggtggctgggagtagtggctcacgcctataatcccagcactttaggaggcaaacgtgggcagatcacctgaagtcaggagttcaagactagcctggccaacatggtgaaaccctgtctctactaaaaaatacaaaaaaattagccgggcatggtggcacacgcctgcagtcccagctgctcaggaagctgaggtaggattacaggcatgatgcactgcg

SEQ ID NO: 512722 - DNA, 170 bp, Homo sapiens
gtatataaggtctcctggcagcagagattaatttggaaatgggcatgttaaccaatcggggccaatgagatggagggagaaacaaaaaaagacagttgttcttttatttcactgcagaaagaagaagcgatcaagagtctttcttatctcccaccaccatgtatagccat

SEQ ID NO: 512723 - DNA, 1204 bp, Homo sapiens
gcaacgaacatgcctgctggaggctgacatgctacctgcttcagaggatggcggccgcggaggaggaggaaggggagtgagtggctgaggcgggaggtgcagtgagtgtgaccctctgccagtggtgtccactggtgccatagatgtgtgctggaatgatacctggcctggtgccaaacattgtgactactgctgcttcctgtggcctccatggcttgagtgactgtgctggactgcccggccctgtggccctgtgctggaatcgcgcctgcgaagtctttctgcaatgtcatggggccacctgtggacgctcagacacctattaccagagccccacaggagacaggatcctgaagcaaagttgagctgactctatacctgggccctgcgtgtgatctcaccctcttcgacttcaaacaaggcatcttgtgctatccagcccccaaggcccatcccagtggcggttgccagcaagaagcgaaagaagccttcaaggccagccaagactcggaaacgtcaggttggaccccagagtggtgaggtcaggaaggaggccccgagggatgaggagcaaggatgacactgacacagacccagctttcattccctgctccgtgggtgctgtgagaacttgtggaatcagcttctcaggggatgggcacccaaaggcaagggtcaaaagttgtgcaaagactgtcgagcaccatgacgcaacttgcccttcaacccggggagaacgcagcacatgttcaagcgggttgggctggctgggggaacgttgtgcgcccggccaggtagacacgcagcaggtgtatggggcctgggcaccgacacgtgcacaccggacgcggccgatatgtggcaaagcggagggtgcgcgagtagacaggagagagaccgacacccggagcttggtgcagagacgcgcaaagggatagacagagcgagggagaggcagccagagcggactgtgggacgagttcaagttgcaaggagacagcaggagcatgtgtacacacaaaaaaagagacgacccaagacgattcgtagtgtgagtcggtaagaccacgacgaagctgcaaatagatcatgaaggctcaaccaacctggcgccgacctcagtgaacagagagaaagcagcaggcaagactacccgtaccacagaagacatacagacgacagagggggagccggtgagaagagg

SEQ ID NO: 512724 - DNA, 642 bp, Homo sapiens
  misc_feature (223)..(223): n is a, c, g, or t
  misc_feature (296)..(296): n is a, c, g, or t
gctgcgcagaccagacttcgctcgtaactcgtgcgcctcgcttcgcttttcctccgcaaccatgtctgacctaacccgtatatggctgagatcgagaaattcgatgaagttcgtaaactgtaagatagactaggagacgccaggtagaaataatccactgcctttccctataggatatacggattggaatctaggtagtatagcttagtcaggcgtaatcgtnatattgtaggccgtggcgctcgccccatattatggccactgtgactcattgcctatctagctattgcccttcnttattgttacttcttttagctgtttaactttgtaagatgcaatagaggttggatcaagtttaaatgactgtgctgcccctttcacgatcaatagaacttactgactacgaaggccgcgcctgcctttcccatctgtctatcatctggctggctagggaaggaaagaacttgacatgattggatgaaagaagaagatggggtggaagaaaatgggataggatagaacaatgaataatatagaagataaaaccaaagattggaccacaagattattcctgactggttttaatgtctgtttaattttgtgtgaccattttatataatgagcgggatgaacttaataaat

SEQ ID NO: 512725 - DNA, 1195 bp, Homo sapiens
gcagggccgtaggcatgccatggcgcccagccggaatggcatggtcttgaagccccacttccacaaggacttggcatgctgtgctgctgtggccactgtggttcaaccaggcctggccctggaatgactcctgcatgactgtaaggtgccctggcaatgccaatggctgctgcctgacatctgcgtcctgtgccgcctgtgtcggggtcccaataccagagccacatctgttgctgacttgaccccaacggattactgtgtaacccacactgaatgtgtagctgcagccctggcctgccgtgactatcatgtccttgtgacggatgctcaaggtgtgagacctgtgacattccacaaagaaatggttggccctggaaccatacggacatttcttgtgtgatcccagaggagtgcggaaacaagtccacgggagtacccatgcatggccaaacgtagcagccgtgcttgaatggacgtaccaggtcccaaacattacattcctcattcacccagtgaagcacctcgtgaccccagaagaacggtgcagaccagatatcttgcatgcaagaagcatgaacacatggaccaccaccagcttgacctggacgcggtacatgcccgtccgggaacgttcttataaagaaggagaaagctcgagtcactcacttgacggacagagacgaattttcaacgccttcgactagtcatccgtatgtgccccggtgcaaacgcccaggctcttaccggaatacaggggccacacatgatgccaaggaacgcccggacacaaccaggcatggtccgaacaaggaacaaaattacaacgccactcctgtggggaccttggaaatcagtaagagaaacaacagtgagggtgcgacagcaccaaaagattcccacagagaggggacaaagattaacgagtacccaagacttcttgaccaaggttgtgcccacaatctaagtggcaggtcgaaatcaactaaagacaagcgacaggtgccagaacgtataaaaaccgtatcatatgctgttgtaaacccctcatcagcgtgcgacatcatttgttgaaagaacacattaatacggttgcggggccacttgggaacaacacctaagcagtaaccacgcatacgagacttaaatgaggatattgtggaaacaatagaaagtagaatgaaaatgatagcaatat

SEQ ID NO: 512726 - DNA, 229 bp, Homo sapiens
atattcagtcgagccgtgcaaccatgcccggcattgatatgcttttttctcatcgccttctgaaacggatgccttcaacgtcatgagccaactgccctttctgccgttctccaagcccaccattgatgaagccaccatctcggcggtgggcgacgtactgcgctccggctggatcaccagcggggccaaagtgcaggcgttcgaagcgcagctgtcggaatactttggc

SEQ ID NO: 512727 - DNA, 369 bp, Homo sapiens
aagcagtctgcccacgtaggcctcgcaaagtgctgggatgacaggcatgagtcactgcacctggctggaatttgaatttaatataatttttacatgtctcaaaatattattcttcagatatttttaaccttttaaaaatgtgaaattcataggctgggcacagtggctcacgcctgtaatcccagcactttgagaggctcatgcgggtgggtcacctgaggtcaggagttagagaccagcctgaccaacatggagaaaccatgtatctgctaagaatacaaaattagccgggcatggtggcccatgcctgtaatcccagctactcgggaggctgaggcaggagaatcgcttgaacccaggaggctgagg

SEQ ID NO: 512728 - DNA, 268 bp, Homo sapiens
aaccggatatctgcacacacagtatgtaaatgaaagtagggtttaccatccagggcattaaaaaaaattttccttgtcatcgagatccattaaatgatagtactgtatgagaagcatggaccttaagtattaaagatggctatataatcttcttcttcttatttagcgtagaaactagcaacagggaacaaggtaactgaattcacggtccactcgcaggcgcacacgtccccagggatccgagacaaatgttccctgcgtgcggccg

SEQ ID NO: 512729 - DNA, 393 bp, Homo sapiens
aatgtaagagaatgaagaagatattggagacacagcaggttcagagaagtttttgaagagactggtataaaatcagaattcaggtacagtcacatgagtattcaggcaacagcaccaaaatcacatggagcttttgggaagtcagatatgtatatcatctgccagctaaagcaatattcattcaacataaatttttgcaaggaagaatgcattagatgtgagtggatggatctcaatgacactggcgaagactgaaaatacaacatcaccatcaccagcagagttgataggatgctgcagtatgggtacagagaagggttttacaaaatttgaccagacatgtggaagacttcaagcagtttacacaggaatgttttataaactctatcataa

SEQ ID NO: 512730 - DNA, 533 bp, Homo sapiens
atatttacccccgcgaaaatccttttttttttaaccccccccgcccatatacatactttcctctccccccaatcttgttgcctcttctcgaaaaaaaaaaaaaactccccctcccttcttccccttctccctatccggcctatccctttcttctttgcaaaagcttgctccctcccacattggtcggcctcttccttttttgccccccttctttcctaacatccccccttcatttatttcccccccacaacccccttctatctctttctccgggtcctcttgtacaattatttcttcccccctcttctggcttcgcccccccccctctctattcaccttccgcctcttctctttttttttccccccccctcacattctcccggtcccacctctctacatcttcttcttgcgtgtaacatctaactctcctctctctcctcctctcctttcctccctccccttaccttatccttctccccctgcctctctccgcgcgggcaaccccccatacttcactttctcctccccttccc

SEQ ID NO: 512731 - DNA, 110 bp, Homo sapiens
tttttaaaacccattttgttgattgtggtaatttctatttgccctgggcctttccccccccgaacccttttgaagatggacttgggttttatttaaaagttccctttgta

SEQ ID NO: 512732 - DNA, 330 bp, Homo sapiens
aggggtaagttgggggttttcagggagcctgttaggggccccctttttttttttcctcaatttaagcaaaggggtttggcccccattatttcctgggaagccaaaggggtgcctttccaacggcttgggccggggaggggacactccagtttttttagcatggcctaaggtatggggtatgggcatgtggaggccagggtaaggtgaatggggaggctgggaggactggggttgccctttggagcttggtgaggagggggggcctaggggttggggagggccccttttggcaggtttggaaatttcccaataaatccttttgtttattta

SEQ ID NO: 512733 - DNA, 343 bp, Homo sapiens
ataataataataaatttaacggccgcttcgattgggtttgtcatagatagcacttattaaattgaggtatgttcctttggtgtctagtttgtagggagttttaacatgaagggatgttgaattttatcaaaagccttttctgcatctattgagataatcatgttgttttcagttttagttcaatttacgtgatgaatcacataacatatgttgaaccaaccttgcatcccaggaatgaagcctacttcttcatggtgcattggcttttggtgtgctgctgggttggatttgctagtattttgttgaggagttttgtgtctctatgttcgtcgacgcggccgca

SEQ ID NO: 512734 - DNA, 476 bp, Homo sapiens
cccggcgctcgttccccaccccggccggtcgcccatagccagccctccgtcacctcttcactcgcaccctcggactgccccaatggccccccgccgactgctccagtcgccgtgcagccaccgacgccgccgccgtctctccttagtcggcgtcatgacgatccgcgtccaccgtcggccaggtgcgccagaaggtagcaccaggactcagaggccgccatcaaccgccagatcagagcctggagcttctatcgccttcctaccgtttacactgctccatgtctttactacttgtaccgcagatgatgttggcattagaagagcatttgccataatactttcattcacctaaatctcgatgtcaggcgcagggcaaccatgctgacgaaacttgatgaccgcttgccacgcaacctacacgaggtggcaccgcaatcttccttcaggcatatcaaggaatgcagcactggtgcata

SEQ ID NO: 512735 - DNA, 104 bp, Homo sapiens
tttagaactggacatgaagtacaataaactactaacaaacatactaactgctacatatactaactaaaataaattagaatagtcaagttaataccagctaccca

SEQ ID NO: 512736 - DNA, 974 bp, Homo sapiens
caaaatagcttgcctaaagtcacacataagtaaatggtggctcacgcctgtaaacccagcactttgggaggctgaggcaagtggatcatttgaggtcaggagttcaagaccagcctggccaacatggtgaaagcccacctctactaaaaatacaaaaattagctgggcatggtggcatgtgcctgtaatcccagctactcgggaggctgagacaggagaatgcttgaaccaggaggtggaggttgcagtgagccaagatcgctctactgcattccagcgtgggcaacagagcaagactccatcttaaaaaaaaaaaaaaaaaaaagcctaaagctggggatttaaacctgattatgtggggcccaaagccttggctttaaaccaggggttctaaacttaaagggccaataggaaccgctggaggatctggtaaaacgcaaatatgggtagtatagatatcaggtaaggccgggatcctatagtcttaaagggcccccaggtgatgtggatgggtgctggtcatacatactacagtcaccatcttccctttctcctaaccgtattaatttggcagcagaaactacctttcccatgctgctgtgagggcttaatagtctcaaggtccagatgctctccttaggatagactcacattttcctcaaaaagcttatcctgcctgtgttttccttctaggataaacagacattcctgctgtgttcccctacccattagggtacccttgtaagaagcagaacactgattatggcctttttggaaatcttcggcggcatggggccacgctggatcccagaacttggaggcaggggggacacctgaggcgatcaacccgtgcacatggaaccgttataagaaaaatcgcagcgttggctgggcagacacacgaacgaggaatgacgggggggagatcctcacgggcattcaaaacacgttggacgaggctgcgagagctgaag

SEQ ID NO: 512737 - DNA, 124 bp, Homo sapiens
ttttttttttggggggggggggttttaggttttgtttttttaaaaccggcccttttttgggggaccccccccccccaaatttttgccccatttttttggccccctttaaaggtttttttgggga

SEQ ID NO: 512738 - DNA, 315 bp, Homo sapiens
cagcaagaaggagtgacactgggccctgctgtgagcaatctgaaacctcaaagcccacccccagagacacaacgtcctccaagaaggccacacctcctattagtgcaactccctatatgcctttttattcaaaccagaacaggcccagaaatgaatgcattatagcagaggatttgaacttgagctctttcctcaggaagcagcagattcatggagtccaggctatttcttccaggtccccgtattaaagttttctctagcaacatgaagccagttcgatatatcttccttctgcttgcactatagtcactacag

SEQ ID NO: 512739 - DNA, 796 bp, Homo sapiens
agcggagaaggccgcggcccgtgacccggaagagcattctccttagcaactgcgggactgcggcggtcggccgggcctccggggagaaacgcgaatgacatagtagagctgctcaacggcgtggaactctgagctaatgcagtggaggtttctctggatctggagagaagagatgaccttggagccaagtaatgagccatcctgactacagacatgaacctccggtccctggggacccacagaggtgtgtctgctgtggctggtccacatgacgattggtgcttcgccaggtgacaatagagtcacaagaatcaggtccacacgtggggaagaaaaatgagcatatttgaaagcttacatcgtccaacggaggatgtcatcaagaaggctgtgcaagagaggaacactcatccagggtgtatgtgagaattattgccgaagaagtctcatggaagcctctcattgccttccccggatggtgatcgagacattgagatcgatggggaagagctcgtaatacgagaccttaatggggatctggtggtctgtgaaacgtgcttccgcgaggagcatgggaatggtagttaaacacagagaactagtgacaaaggaaacagcaagcttgcgtatgaagtcagaatatgcgcccgtaggaggctctggtgagaacgagcattcttccccgcaaacaggtcccttggaaatagtctcactaattgaacaggtccctgcattgtcattgtcagaagcctcacagtttgattggcccgcgactcacagcaagattggccatggg

SEQ ID NO: 512740 - DNA, 163 bp, Homo sapiens
gaactccagaaatcatcaccacaaaactccactgatgtctaattatttctagagatccgctgcaattttaatacaagcctatgacttgacatctgaagtacacctttcgtgggtccgtcaaagcgaagccccattagaaatgcaaaacataactcgtaccaaa

SEQ ID NO: 512741 - DNA, 167 bp, Homo sapiens
taaagcaccgtggtgtagtatacacgtctgcctgaccaatgcaacatctctatttctattatgtaactcactcagtatccacttatctgaatggctgtaccttcatgcaccacgggcagccaggcactgccatatgctcaacaccagggcacagtgcaaactcatag

SEQ ID NO: 512742 - DNA, 196 bp, Homo sapiens
aagtatcccactgggtaaccgttcttactgcgaagcgtttctttatgactgagggcgatagctgctgtgtcgtggctgttcgcaggtactcgggatccgggatgaaggcgagcttccccctgggtctggggcagtggggagggaaatgaccaaagaagaagagctgcagcttcggaaggaaaagaaacagcagaag

SEQ ID NO: 512743 - DNA, 167 bp, Homo sapiens
ctatatgaattcatactttatcaaagctctctactatatataggaaaaaacgtagtatatatagggtagagatgcgctctagtggtatcaggatagtccactagggagtctatggaactatatcccctagccgatagagtaggtgactactagtataagacagcaat

SEQ ID NO: 512744 - DNA, 110 bp, Homo sapiens
aatagcttgttcatctttttccccaacacttgtttctcctcttcctagcagcttttttattttcatattcctttgggttttcaatgtagaaaataaaaaagctgctagga

SEQ ID NO: 512745 - DNA, 138 bp, Homo sapiens
tgacggagatttatgggtggagttgagggaactggagtggagagatggggtaggtggagttgagggagatggggtaggtggagttgagggaactggagtggagagatggcctgagctggtcagcacatgctgaagagg

SEQ ID NO: 512746 - DNA, 226 bp, Homo sapiens
  misc_feature (10)..(10): n is a, c, g, or t
  misc_feature (45)..(45): n is a, c, g, or t
  misc_feature (83)..(83): n is a, c, g, or t
cggaacgtgntccgcatcggcgtggaagagctcaagagcttccgngacgtacccagcaaagtaacgctcgacgaatgcgtggngctcgccaagcgcttcggcacggatgactcgagcagcttcgtgaatggcgtgctcgataaggtgcgccattcgctcgggagagccaacgactgatggccgccctcgatcccgcccgcaagaaagcctggaaggcggcgctggc

SEQ ID NO: 512747 - DNA, 237 bp, Homo sapiens
ttaacagacctggaacgtgtaggccagtgccatctgagaaccacccgtacaaatgtgtgggggtggtcccttagcaacccactctcgttccctgactcatgtatgggaaaagcaaggccaagaaaactactttcccagagctagtttgaggagaacaagggttagaacctaagggaactaattgataacttactcggggattattttgacaaatctctgcctcaccccaagggaaag

SEQ ID NO: 512748 - DNA, 335 bp, Homo sapiens
  misc_feature (11)..(11): n is a, c, g, or t
  misc_feature (49)..(49): n is a, c, g, or t
  misc_feature (151)..(151): n is a, c, g, or t
aaagtttatgnaatattttagtaaatttgattcaaaagacatttcttgnttatccacattggttctcaaagtgtggtcccgggaccagtgacatcagcattacctggggcacttcattagaaatgcacatttcttcagggcctactcctgnactcccaatccagaaacacagtgtggggtccaacaatctgttttaacaagtcctctggttcgctccagggctccagggtggggacagtcactggtgcttctgctgggctgggacaacagggccccactgtggaacttgaagcctgtgaccccctcctaacggctcctctcagttcccgtggtcc

SEQ ID NO: 512749 - DNA, 744 bp, Homo sapiens
gcgccgcccggccccgctcgactccggaggctccgcagccccggcgtcgccccgctggccctcctccgggggccagtggagggtgcccctgggtctagcggcctcaggttgggtgcatctcctccagcaggctgcctcgcgccgactaccatctccgttccggatgcccaacgttttctgcgccccaagagcaggaataccagcaggacttgttatgcgtggctgtgacggttctatgagcgggccctgggcttgggcctgagccttcattggtcatcctgctgtctacctcatccgctatctgggtggctgacggacccccgaagctccgcaccaggggtaccaagatccccatgcggcccgcggaggacggcgtagcagtacaatcgtgcgaagctgccatgagtcagcccgtatacttatgcacgggcatgcacctggcgatcggcagtgcgggatgctatgggaagcgagatgagaccagttgactcggagcgtggtccgcacagctcgagcgctcctggcgcttgctggccctagcccaagcgcgacaacactgccagccaccacatgtgaacgcacaccgtgggatgttggcgcagacccgggtggatgacggcgcctggcgcaaaagggccggcggaacgctggacaagactctagagacaacgccctgggacggaagaggtgttccaaggccagccgcatgcgggcagcatgggtgagcgtgcccggcccgcaggg

SEQ ID NO: 512750 - DNA, 630 bp, Homo sapiens
gagctcggtaaaccgtcagtcgttacctgcggtcgtaaccgtgatcactataaaaaggcggtagaagaggccgtcagccgccgcatccatcaccgatatggagcatggtcgaacaaatcatcattcccggacggtacatcgactaaccgttgcttcaccattgccgctgtggctaacagaccgtggtgcatcccggtctacaatggtaattcaccaccggcgaacatatccagcgcccacaaggcggtggcggcggtaaaggtaccgggcaaagccggctactctggcgaaggcatggataaattcgtattccagatcactcaggaagaattcctcgaattcatgttcgaagacctcgaactgcccaacctggttcaaacgcaacctgaccggcaccgataccttctagaccgtacgcgcagggaatcatcaacgagggcaacccgtcgcgcatcaacatcatccgcaccctgcgctcagcccatgcacggcgtatcgccctgtccggcagcagtcgcgccaaattctagcaggccaaggaagagttggcacgcttgaagcgcgaagacccggaccacttcggcgatatccaggacatagaggcggaaatccgaaaactcagcgcgcgca

SEQ ID NO: 512751 - DNA, 285 bp, Homo sapiens
  misc_feature (11)..(11): n is a, c, g, or t
  misc_feature (13)..(13): n is a, c, g, or t
  misc_feature (41)..(41): n is a, c, g, or t
  misc_feature (132)..(132): n is a, c, g, or t
  misc_feature (253)..(253): n is a, c, g, or t
acaaagcagtncngacaactacaaaacaccagtaacacatntagcccaggaactgctaacaaacatacagtgcagtggtggcttaagaagttttgcaaggaagagagccttgaagatgagggacgtgatatngggccatgggaaagttgacaacgacccaatttgagagccatcattgaactacatgaaaaatttacagaaggactcagcgttgactattctacgggtcattagggtccgttcagcattcgangcaatttggaaggttaaaaaagcttgataagt

SEQ ID NO: 512752 - DNA, 181 bp, Homo sapiens
  misc_feature (94)..(94): n is a, c, g, or t
gtccctatcttagtcggggttgtgtgtgtgtggctaaaaaggattcagacctagaagtcttggctcttgcggcagaacgaggaagagacagcanactcgcgccttttccacgcagacagggcatcaaggcttggggcgggaggggaacgcgcaggcagcgcctcccagcaggcaaagcaag

SEQ ID NO: 512753 - DNA, 929 bp, Homo sapiens
ttgtggtcaatgagagatagtggctgcaaatgggaatatcctgttgtgggttgtttacctggttggagttgtataatgcgtctgggtatataggtcagataagtgtgggtgtgtgtgaatgatagagtggtgccaattatgttgttgggtgtttttggagacactattttgcgacggttggttggaatgactgttatgccttatagttatgtagtcgtacacttggggttccgtggtgttgggtgtgatgggtgtgggtgttagataggttgatcagtcacgcattatcgggtagtgagtttggtgttcgcattccggtgcgaaaggtgtctgggcttcgtggtgtggtcccgaagttgcactgacccgtgggccccatatctgcctgctttccccaattccgggtgcccgccctggttgcccgtctaccgaagctgccttagtccgtggtgcgttgtgactacccagactgaacttccgtggcattaggctcgcgcaagccaccctggtcccgcttggcaaatggttgaccagggtcacgctgtgctggcgtcctcgtgcttcggctaacgtccgtcagtcccctggcagtctccatgcggtgccaccttggcactctgtgcttcacagcagcccttgttgcacttgaaggaacgcctcgcttcagtgatggactgtgtatgcggatgatctggcctgacgacactgcaagcacctgggtgctgctactggccacacctggggcaagcttcgtccaaggcacaacctgttgatggccatttgctaagacactacatgctacactgactcccacgacactcctggaaggagactgtatcccccccaagtctccctatcaggagttcactgaccacctcgtcaagacccacaccagagtctccgtgcataaagaactcaggctccagctg

SEQ ID NO: 512754 - DNA, 376 bp, Homo sapiens
agctccggggattcacagcaagtgacttggcaataagtgggtgagtggggtcaaggggtggctagaaagggatatagagacgctgtaattatttgacctactttacatcagtgcatgccgggcaaaatacaatgcgtaatgtctactgtcaggcctcagtaatatcaaaaaaggcagatctctaaggatcgtggaaggtcatgtggttgcaagtgaaaggtaattcagctccggtaataaggagaaactctgtctccatctaaactcatatttcagttgagcagtaacattaggtttagtgtcctctcttttttattttttacacttaaaaaaagtttgaatttagtccccatgaacaaccccaaaaaaaattaga

SEQ ID NO: 512755 - DNA, 111 bp, Homo sapiens
caactgtgacaggtcgggaaatagaaaccgtctgaactatctgcacgcatcatcctagtcctcatttccccctctattgatccccacctccaaatatctcatcaacaacct

SEQ ID NO: 512756 - DNA, 851 bp, Homo sapiens
cccaagggctcctcttccgcccacattagtggttctacaaaaacgtactttccccattctataaggagagctatacaccttgtcaaggtcaccccccctaaaaagccgttttcccaattgccttcctagtcccggtatgcccctggttccgagacacacttcccccacccaactttaactataatacctaacattttcaacaaaccctccactggaattatgagaccccctttgaaactaattcctgccccccccctcaatcctatggtccctcactcgcccttccaatccctatcgcactccctttaacaataacacagaacgaaggtccaacagatccccttcccttaaccacgtccaaatcacacttgggcccccccaagggtaactgaagacctattcgagtatcacccgagcttcgcgcggagctaatcttcacaactcctaacaaaacttctccccacttatttcctagagacccggcgaaccttcgaactccttgaacgttgaccaatcgagtatgtaactccccgagttgaaagcccccacatttgtataaatataattaacactcacccaagaacgttttgcacactcacatgagagctgtccccaccacataggcttataaaacacgaagccatttcccggaacgtttataacccaaccaccttttcacccgctaacaccgaccgcggggtataactacggtcacaatgctttgaaattctgtggaggccaaccaccacgtttcatgcccctcgtcctagaattaattccccttaaaatttttgaaatagggcccgtatttaccctatagcaccccctctaccccctttagagcccaccca

SEQ ID NO: 512757 - DNA, 232 bp, Homo sapiens
atacacacttgcaagggaggagatattcctggctgcacccatcatagtgcaaaattttatgacgcaggggcaccaaatggcgtaaatttgaggggatctctcagtgcatagtatttcatggtgtatatgtgccacattttcttaatccagtctatcattgttggacatttgggttggttccaagtatttgctattgtgagtagtgccacaataaacatacgtgtgcatgtga

SEQ ID NO: 512758 - DNA, 285 bp, Homo sapiens
agactatgaggcagactaccaaataagtccaaaaaatatgtgagtcttaaatgacactccttctagtaagagaaagaaccctgtacatatgactcataccccatggctaggccttcactgtggacgcctggcgacagaccgcaggccacctgccttctgtgtgccgaagtgaagcccactgcaccctgcgttggagaggcgctgacggagtgaggccgtgggaggtcgcagctggcgaactccaggtgtgggctgctctagcggctgcttagaattgcgaggatg

SEQ ID NO: 512759 - DNA, 196 bp, Homo sapiens
ggaggctggaatctagctctgttgccagcctgaagtgcagtcgtagtgtatcagtgcgcgtacggtgtgaagagaccaccaaacaggctttgtgtagagcacatggctgttcatatcacctggttgcaggcgggctgaggtcgacaagagagtcagcactgagtggtgggttatcattagtcctgacaggttttgg

SEQ ID NO: 512760 - DNA, 360 bp, Homo sapiens
acactgtagctgtcttcagactacgggtggttgtgagccaccatgttgttgctgggatttgaactcgggaccttctgaagaacaaatcagtgttcttatcccctgggccatctcaccagccggggcacacacattcataagagatactttgctaaagctcaaagcatacaacacaccctacacaataatagtgggaaacttcaacgccccactctcagcaatggacagatcatggaaacagaaactagacagtgacacattgaaactaactgaaattatgaaccaaatggatctaaagatatttatagaacatttcatcctaaagcaaaagaatataccttcttcttagctcatcatggt

SEQ ID NO: 512761 - DNA, 583 bp, Homo sapiens
ggtcgtacccttaaatcctatagatcagtgtctacactgtagttactatttttgagacggagtctcactctgttgcgaggctggagtgcagtggcacaatcttggctcactgcacctctgcctcccggttcaagcaattctcctgcctcagcctcccaagtaactgggattgcaggtgtgtgccaccatggctaattttttgtatttttcagtgagagatggagttttgctatgtcggccaggctggtctcgaactcctggcttcaagagatccactgacctggcctcccaaagtgctgggattacaagcatgagcccctgtgcccggctaggtgatgtatttctgacagtagtccaggcaggtaatgctaaggaccttaagttggtgatgtgatagcatgattgagaaggcagagggagaattaagtttacttaataggtgtctaatcaactggaccttacaagttgaagaaaagattttctggtttgagtacttatgaacactgtgaaactaacgtacctaggggagctcctaagtggagctgcccagtaggcagatgatagcccatttaggggtagacct

SEQ ID NO: 512762 - DNA, 733 bp, Homo sapiens
  misc_feature (360)..(360): n is a, c, g, or t
  misc_feature (733)..(733): n is a, c, g, or t
gcttcttccttctcgcctaacgtctgccaatcatggtgttcaggcgcttactgtggagtgttggccgtgtggtcttatgtctcctttggaacctcatgccggaaacatccggtcgcgatggtaacgatgttattgatcacgaacagggctttggtcgatggaccttgcactcaatgtgagtgagacaggccatgccttttcaagtgcatgcatgtcactgatttcatcctcaagtttccgcacagtgcccaccagagacgtatgtccgacatagccgtggctacgaaggctacgacatctaaatacaatacatggtgcagactacacgagtgcggcccatgcaacgcatttgaaggcctngcacgaacaggacacatgcccacagactcgacagattttgatacgttctataaaggttcttgaaaggcgaagattaatgaagtgaacagtaataatccctaatgaagtctaagatcgcttcaccaaggcagatctccgtgtcacagcttctcccaataaatagcatgctggtactaatgggtactgctgatggttgactgcttgctgctgctggtgctatagtatccaggcagggtaagatcacgcgacgtgagttacagaaggctcgcgagccctagaatgggttgcctgctccaggaacatgccataggccagaaagcagcgcctgtcccaaaagctcagaagggtcaaaaagctccagcccaagaaagcn

SEQ ID NO: 512763 - DNA, 756 bp, Homo sapiens
  misc_feature (690)..(690): n is a, c, g, or t
  misc_feature (727)..(727): n is a, c, g, or t
  misc_feature (730)..(730): n is a, c, g, or t
gacattgtagaaaaagatattaggaatatttccctgctttcagcattttagaagtgcaaaagttaaaaatatataaagtatgaagttcagtgtgaactcaaaagactatagtgctgaaagccacatggtgtgtttttgtcttgtttaatcaactaggcagggggaaaaatctagacagtttctgtactgccatagaattttaagaagtgtcaggttctctcatctgtatacatccctgtgcgcatatattggctcatctaaatattaagaacccaaaaaacattttctaaaaccatttgaaccagcgctgatgtactatatatatatataccctacataaccagccggggaatttccaacacatgccctgaagatctatacatgattgggctctttttctttctttctttctttctttctttctttctttctttctttctttcttttttttgcttaaaaacaatgaagtgtgcaagtcagatttcttaatgaaagtgaatgaatatatagaataatattcctgaaaattccacatattttaattcttggactgctaaatttttcatatgtggccatatatctatacaggtgtttgggtgtttatgtaaatttgccaggcttggtgtgtatgtgggtatgcttctgtaagtatctgtgtatgtgtataaaccatcaacagtaaagtatagnatttgtgatccagccttataagttactggcctcttgnggnaattatccataacaatcttcatgtaa

SEQ ID NO: 512764 - DNA, 398 bp, Homo sapiens
  misc_feature (11)..(11): n is a, c, g, or t
  misc_feature (50)..(50): n is a, c, g, or t
ttcaagtcatnctgggtgcacccagctgctgggaacgctgcttttggagnctcctaccctcaatgaaaatgcctgcaacctgcggggtcccactgcaccccaaaccccgcccgcagagggaagagcagggagggaatcccatcccccagacaacccatgcttgcagagacgaactccgcacccaaccttcaccgtgtctcccacgaccctagttaatcaatttaaaatgaggtcactagggtgggccccaatcccaatatgactgataactttataaaaaggagagatttggatacagaaagagacagagtgaaaaccatgtgaagaaacataggaaaagatggcagctacaagccaaggagaagcttgcagtgtgtattcatctgttctcatgctgt

SEQ ID NO: 512765 - DNA, 336 bp, Homo sapiens
aacgggtgatgcggttgctcacgcccgtaatcccagtgtgtccggaattggtgggttcttggtctcactgacttcaagaatgaagccgcggaccctcgcggtgagtgttacagttcttaaaggtggcgtgtccagagtttgttccttctgatgttcagatgtgttcggagtttcttccttctggtgggttcgtggtctcgctggctcaggagtgaagctgcagaccttcgtggtgagtgttacagctcttaaggcggcgcgtctggagttgctcgttcctcctggtgggctcctggtctccctagcttcaggagtgaagctgcagacagctttttt

SEQ ID NO: 512766 - DNA, 454 bp, Homo sapiens
  misc_feature (122)..(122): n is a, c, g, or t
  misc_feature (125)..(125): n is a, c, g, or t
  misc_feature (167)..(167): n is a, c, g, or t
  misc_feature (187)..(187): n is a, c, g, or t
  misc_feature (191)..(191): n is a, c, g, or t
  misc_feature (196)..(196): n is a, c, g, or t
  misc_feature (211)..(211): n is a, c, g, or t
  misc_feature (223)..(223): n is a, c, g, or t
  misc_feature (241)..(242): n is a, c, g, or t
  misc_feature (249)..(249): n is a, c, g, or t
  misc_feature (253)..(253): n is a, c, g, or t
  misc_feature (255)..(255): n is a, c, g, or t
  misc_feature (260)..(260): n is a, c, g, or t
  misc_feature (263)..(263): n is a, c, g, or t
  misc_feature (276)..(276): n is a, c, g, or t
  misc_feature (288)..(288): n is a, c, g, or t
  misc_feature (308)..(308): n is a, c, g, or t
  misc_feature (337)..(337): n is a, c, g, or t
  misc_feature (359)..(360): n is a, c, g, or t
  misc_feature (375)..(375): n is a, c, g, or t
  misc_feature (402)..(402): n is a, c, g, or t
  misc_feature (421)..(421): n is a, c, g, or t
  misc_feature (438)..(438): n is a, c, g, or t
gctcttgggccctgctcaggccgtttttgctgacttgcctggcttacaataaaagcccaataaatatttgttggccatatgtgttggacactgtggggccctgtccagtcccctttaccaanatnagacccccatccccaactgctttgagtttggggtgcaagtgntcccagcttttgttttccanaaantgganaattgccctcagganatgagagccatntcccctcccccaggagtnncttcctntttncnccccnacncctggttcatttnattaaaacgganaaaactccagggggctatgnctgctttggcccccttgggtcaggccaangtaaactttttttgagccttcnnccggggtaagctctntcccttttttatcctgtttcattcccncccccaaaggggttttccnaataaatccccctgtcnatcccatggttttgga

SEQ ID NO: 512767 - DNA, 1570 bp, Homo sapiens
  misc_feature (1140)..(1140): n is a, c, g, or t
  misc_feature (1327)..(1327): n is a, c, g, or t
agcccgtcgtcgcgccgcctcttgtgtggtcggcgtctgctgcctccccgcaggttgtaagtgccgccgtgtgtccgccctccgttatgtgggtgtgttcgccgagtgtagccccgcgcaatgtatcgccggagatgtttttattgagtggtggacaccccccgccgtaggatgttgagggagccctcttcgtgggaaagggggaggttctgcccacccccccagcggagtgtggtgggcgagcacaccgggataaaagctcctccaggaggcctctcttgtttttgataaataaatccggctctcccgcggcgccccgccggctgtttgttatcgttctattgttaatacccggcggctgtgtcctccttctcataagggatgttgtttatctgtcgctgaagaggccctcctcgtcggggtgtgggcgcggcgacaataattttcggcggcccaccaccggcgaaggaggtgcgctttctgcctccgcggtgaggcgccccccccttcggcgggaagattttaagaaggccgccgcctgcttctgcggcgcccccaccagttgtttcactaatgtactgcctgtccacagcgctcggcggcggttccacagcggttgtgttttctggcggcggtgatgagaatagaaggagtagtttttactgcttgtgttgttgtggcgcgctgtgttgctggcgaagagcccccccaacagcaaggagaggggggttggatgcaaccgcggcgcgtgcgctgccgccgctgttatttgtggagtattgtaaagagccagcttctcggcgtggtagagagaattttttgttgtagtagagtgtagaaatagttttgtaggagtgttccaccagtgtagagaacaaccccgtggtagagcaccccacagcgtcgtagagatgtgatagagaggagatcacgcgcagaacaaaccacaccagctggtcccacaccactgtggaggacccacaacatcatcacacaccagcgcgtgtgtggggagaatggttcgcagcagcgcagcgtgtagagatatcacacacaccatgcctcttataaggagcgcgtgtgtgtagagaaatattgagcccccccctctagtaagagaccaacacgcagagagacacnctcgcgtatcacacagcgcgtgtgagaacacgcgctcgagagtatatttcgcagcgagagaaatataccactcttcgcgtatttttatatatttctatcaccacagcaccacactcttacacctctcttgtgagatacacacactcacactcttgtggtaagatgtttgagacacctcatcaagagntgagaaattattataagaaaaagggagaagactgttgccacaggagaagaaggccacgcaggaaagaaggagaagaaggaaagaaggaacctggccctggcacagaaggaaagaagggggtcctatggccgatataatgttcttctccaaagatttccaaagtcatatgagatttgggatattttttgtcccggttggtgtttgttttaagtccctttttaatataaactaaaatgtgggacc

SEQ ID NO: 512768 - DNA, 771 bp, Homo sapiens
acgagtgggacaggctgcccaaggagagctgaaagtgcttcttaggatatgcatgaaaacaagacttctcatgcttccttgctgttcccgctttaccctccaaagcactgcccgcacccctgaccgcgcccccccccccgcgcacaacacaacactaatggcccggcggaaaagcaaaacctaaccgtggaaatcgtccataatgggggaagaaggaaaacaccgaggaatatccggaaagacttggccacgtgacccaagacatctaaatgaactggaacccaggcattataacaaagcgctatcaacaaccaacaacaatataccacaggttacaccacagcatgtgacacacagtcagtgggacaaaaagtgccacgttgcacaacaattgtgcaacagcaacagtgcaacacaacgacaaggaaaatgaaagtgatatacatcaacacaatgtgcatgtcgaggacaaacaccctctcaaacagcaacatgtggtgacacacacattacaacaaaagattaaagaaatcgccccatcaagcgagatactcaacaaactcaaggaaggacaaagatgtgctaccaaccctcatcgagaacactctatcaaagagcatacgatgggtaagggggatatccaaaatgggggcaataacaccagatgtgttgaagaagacggccataacaaaaaggaacaccaaaaaagccccacaggatcaccccattagggacacggcccccaaaacaataaaagtcaccagtccacgg

SEQ ID NO: 512769 - DNA, 166 bp, Homo sapiens
cacaccaaccccaacatatcatgccaggtgggtgtaagcaaggggacatgcagcatgttggccaggcgcatgcagcatgttggcacagcgcagcatatgcagcatgttggcaaggcgcgcatgcagccatgtatgcgacagggtgtccatgcagcatagttaggca

SEQ ID NO: 512770 - DNA, 277 bp, Homo sapiens
  misc_feature (2)..(2): n is a, c, g, or t
  misc_feature (8)..(8): n is a, c, g, or t
  misc_feature (10)..(10): n is a, c, g, or t
  misc_feature (40)..(40): n is a, c, g, or t
  misc_feature (62)..(62): n is a, c, g, or t
  misc_feature (66)..(66): n is a, c, g, or t
  misc_feature (83)..(83): n is a, c, g, or t
  misc_feature (85)..(86): n is a, c, g, or t
  misc_feature (112)..(112): n is a, c, g, or t
  misc_feature (114)..(114): n is a, c, g, or t
  misc_feature (130)..(130): n is a, c, g, or t
  misc_feature (132)..(132): n is a, c, g, or t
  misc_feature (136)..(136): n is a, c, g, or t
  misc_feature (140)..(140): n is a, c, g, or t
  misc_feature (170)..(170): n is a, c, g, or t
  misc_feature (186)..(186): n is a, c, g, or t
  misc_feature (203)..(204): n is a, c, g, or t
  misc_feature (213)..(213): n is a, c, g, or t
  misc_feature (215)..(215): n is a, c, g, or t
  misc_feature (219)..(219): n is a, c, g, or t
  misc_feature (229)..(229): n is a, c, g, or t
  misc_feature (240)..(240): n is a, c, g, or t
  misc_feature (263)..(263): n is a, c, g, or t
  misc_feature (265)..(265): n is a, c, g, or t
  misc_feature (267)..(267): n is a, c, g, or t
tntatttncngtcatattgccaactggaaagtcaaaattntctaacaactttaagtaagttntttnaagacttagtgctgttntnnatccagtttagaaagtaacttaattntnataccgctactaaaantncganaatntcttctttaatcacattcaatatggttaanagaacaacactaattnacattgcgtgggctttnnctccctttntntaanatgtcatttnttgagcaaganttgtatagtattatctacttacntnangctgttaatt

SEQ ID NO: 512771 - DNA, 181 bp, Homo sapiens
cgccgatattacctctgtggcattctctagatctgctttgtgattctcaaagataatagactggttattcttgttgaggtagaaagcgaagacataagtttacatgagtggcatgacactcgcagaggacatcaactgctttcttcagtaactgcatctcagtccagtacatgttgtgctg

SEQ ID NO: 512772 - DNA, 295 bp, Homo sapiens
cgcttaccagatggtcagattgactctgcggggtttgtttcacacctgcagatggtgggagtgggggtgggctgtttgacgctgtgagggctgctgccgtcaccacgtggccggctcacggggctccggactccactgaccgacgcactcatggcacgcaggcccagcttccggggccacatcatgacctggccgcaagctagtgatacgagatcaggtgtcgtgggtgtgtctgtggtgcgtgcaccgttgtctttacctacggaacgtgcaccagatgggagcatcaagacat

SEQ ID NO: 512773 - DNA, 488 bp, Homo sapiens
  misc_feature (2)..(3): n is a, c, g, or t
  misc_feature (367)..(367): n is a, c, g, or t
gnnggagaccaaggcttctgtatttaggtattgactttatttagtcagaggggagaggggactcacagctagcatgcctctatctgtatcaaacttcacagtcgatgttcaaagaatgaggcctgcgagggggacacgagaaactattctcaagagcaaagcaacaggccttccatgtcaaatcgaaaaatacaaccaagttaagcacaatcatgcacccgtgcacgtccaccccctacccacatattctgatgagactcaacatccagggggagagagaaaactgcgcgagcctggagctgcacgggaatgcggacagagacatcctctccagcagacgccagccaaagtgggtgcaacgggcggngagggcttgaatggttcagcatgaaaatcccccacttgattgtaccatacctgaagcacagcctcagttcctactcatttccaaccaggaaaaaaacatgcattctttagaagctcttccc

SEQ ID NO: 512774 - DNA, 101 bp, Homo sapiens
caattttttaaaaaaccaaaaggaatttgacccggtcctttttctttccacttggaaattttaaggaccaaattaaggccaacctttgcaggtttaaaaaa

SEQ ID NO: 512775 - DNA, 183 bp, Homo sapiens
ctcccaaagtgctgggattacaggtgtgagacactgtggtcaagcaagttagtcttacggaccatctgtgtactatgcacatgctttcataaatctctaatcaagaattagcttttgcagtcttctaagtaagcttacgctttggagattcacagtacgagactagggtttcactacgtgttg

SEQ ID NO: 512776 - DNA, 240 bp, Homo sapiens
tgtggagacggggttcacaaaaaaaacacagaaaaaaaagaaagccacaattggtgcgtgcacttggtatggaaccagttacttctgcttctctagaaggtcccagtgggggaatgcaagcctgtggctgaggtggcctttaatggtgttggattggactcagggcaggacatattcttgagaaacagccaattcaaatgtggtatttctggtctcaaaagggatacagggtatatcccc

SEQ ID NO: 512777 - DNA, 270 bp, Homo sapiens
ttcctcctttctccctctcccctaaagccaaatattcaccaagtcagtactattctaaaactctctttaatattctgtctttatccccatgctgcttctttgtccaggcttttatcatctctcatttagactatttcagtgattttcaatcttgcctttctgtctagtctcttaccatgccccccaacccgcttcgtgcagtctactgacacaaagtgaatttctaaattgaaaatttagtcatgccatttcactgcaaagaacaaatca

SEQ ID NO: 512778 - DNA, 136 bp, Homo sapiens
gtgggtgtacaataagaatgcttaattagggggggtgtcgattcacatgaacaacaacctatgtagctgttcagccaaacttgacccggacgagtgggcgagagggagggggagggaggtgggggtgaggtgaggg

SEQ ID NO: 512779 - DNA, 429 bp, Homo sapiens
  misc_feature (257)..(257): n is a, c, g, or t
  misc_feature (324)..(324): n is a, c, g, or t
  misc_feature (342)..(342): n is a, c, g, or t
  misc_feature (368)..(368): n is a, c, g, or t
  misc_feature (382)..(382): n is a, c, g, or t
  misc_feature (415)..(415): n is a, c, g, or t
acaagtaattttggaacagaccatacctgaggtaaggtagtgagcccacaggtgatgtaccacattatgtggcacaaaaaggatgagagatctctagcaaataaaagaaagaaggactcaaaatttgaggaaagaacaaaaagaaggagaggcaaacaatgaatattttgcctctcccttcctctaaattcaaatattagggagattaaggcacaaacaaggttccctctatttttcctatttgcttcacgttgtgngtagggaattatggatattgatccaaggcaagggtgagccatacactatttaacaagtctggggaantgttttatgggtctggantacattgttttattttgttaggagcnggatattaaaaacnggggtaatgtgtctccaggtttaaaaataggcnattttcttaaaaaa

SEQ ID NO: 512780 - DNA, 137 bp, Homo sapiens
acctccacctcccaggttcaagtgattctcctgtctcaccctcctgagtagctgggactatagggcgagactctgggggttcattcaccatctcatgtctcttcacagtcaaaggctcttttctagttctagatcgc

SEQ ID NO: 512781 - DNA, 139 bp, Homo sapiens
tggtcttgaactccttattcaagtgatcctcctgcctcagcctcccagagtgctaggattatacatgagagccactgggcccagcgtcatttggtttgtgtgtgaagatagggtctcactatattgctcaggctggtct

SEQ ID NO: 512782 - DNA, 171 bp, Homo sapiens
aaatacaaatctacaactactctgtagtactaccgaaatacaagcaccattgacgcaagattctttccatgttcgggagcacctacatctgcgaacagctgttctccattatgaaactgagcaaaacaaaatactgctcccagttaaaggattcccagatgggattctagt

SEQ ID NO: 512783 - DNA, 340 bp, Homo sapiens
gtcggacggcagcgcgtgccccgagctctccgcctccccccgcccgaccagcctgagtgcagctctgagccctagttcctgcgtgtgcccagacatgcagcgtcctgatgagcatgccccagtatgcatgcgccatggccagggtggaacgcctacatcgacaacctcattgctgacgggacctgtcatgtgacgcggccatctgtgggctacaaggactcgccctccgtctgtgccgccgtccccgggaaaacgttcgtcaacatcacggtactgcgaggcctgcgcggtccggggcactgctccggtttggaccctgagggagggacttgggtggggt

SEQ ID NO: 512784 - DNA, 524 bp, Homo sapiens
aatccacaaacaggaaagaaatactggtgagttggagaaactggaacctcctatactggtaacagaaatggaaaatggtacaaccactttggaaaacagtctgatagttcctcaaaaagttaaagatacaatgactgtatgactcagcaatttcattgctaaagtatatatgcaagggaaatgaaaatgtatgtccatgcaaaaacctgtacatggttcacagaggcgttattggtaatagtcacaaaaagtagaaaggacccaaatgtctacttactgatgaatggaaaaataaaatgtggtatatctatacaatgaaatatcatttggtaataaaaatgaagtactgatacatgttgcaatatgtatgaaccttgacattatgctaagtgacagaagccagtcacaaaagaccacgttatcatttcctttatatgaaatatccaaataggtaaactgtatgaaacagaaagtagattagtagttacttaggactagggtagttggaggggtgcaagctaaaa

SEQ ID NO: 512785 - DNA, 312 bp, Homo sapiens
acacgtttttattggcacaaagagagtgctgcttttggagccagaagtgtcatgtgtgacttatggtgactagcttaagaaccagatctgctgtcagaaagggcacacctacacgcttagagagccgatgtcttattagagcgcaggttgcgcgtcgtgatttgcgaactaacagtctccaaacattgcagtgcattgaaagtttcatccgctttcgcatataaagattgttcccatgtgagagacttgattctgacaatagcgttggagacgagcgtgagagctacagtgtgagattcagcatagccatct

SEQ ID NO: 512786 - DNA, 780 bp, Homo sapiens
tgtcgtgtggttagtatctggcggatttgtgtggtgactgctgataggaagatgtcttcaggaaatgctaaaattgggcgccctgtccccaacttcaaagccacagctgttatgccagatggtcagttgaaatgatatcagcctgtcgtgagcttacaaaggaaaatatgtgtgttcttctttctaccctacttgactgttcacctttgtgtgccccagcggtagatcatggcttgtcagggatagggcgaggaagaattgttaacagaaatctacaagcggtgccaatgtgcattggggtgtcattcctggtgggatatctactactttcttgtacatttctcagacattggagtcaatagttactaacctaaagtaaactacaggagggagcgtgtgacccatgaacgattcctttggtgatcatgacccgaagcgcaccatgtgctcaggatacatggggtcttacatgggctgctgaaggcatctcgttcaggggcctttttatcattgatgatgagggtatccttcggcagatcactgtagatgagctccctgtgtggcgctcgtgtggatcgagactttgggactaggtcagggcttccggttcacgtgacgaaacatggggaagtgtgcccagtttggtggaaatctggcagggatacatcaagctgatgtcaaaagagcgaagatattctccaagacagaagtgagcgctgggttgtaaagtgcaggctggggggcagcatgaaacaaacctctttggatttttttccataa

SEQ ID NO: 512787 - DNA, 577 bp, Homo sapiens
tcacaactaagacgagaaatgaacaggtgagcagacctcagtctcaggccccctccgaagtccgggcagcctcattgctttgacgcagccttggtgcgaggatggtaccaagcagagcacgttaattgtgcgagatgggacatgttagtcttcacttaaagctacagcagaggtctgcactcctgttatctcgcttcactctctatctattctccctcagtctcaatacatcattcaatcgcaaccctctggccttgttttaacttaatgtgtttagagctaaaaggcaggaaatgaaaaaaggaatggctgggggagccctgagagaggtcgcatcccatgtgaggaagatggtagagcaggagctaagtcggaggagaggagagccacttcctcctccaacacagcatggtaacagcacatggcaactggatcaccctgtgcatatactccctctccagtatgcccacattttaagtccccacgactgtactcaaaagctgggccagctgctgataagggtataaagaacactcagcggtacacgtctcctgtcctgggcaccttttcaagtatt

SEQ ID NO: 512788 - DNA, 294 bp, Homo sapiens
gcgtctgaggatcccgtctgagcagctgggaaaacggggatgagggttacttcttggatgtgctgtgaatacacaccctttcattcctcttgttgcaaaagaggattcagcctcgctggaggaaaatatgaaaaaataaactaaaactttttttccaaactacactcagattctaccttgtctttcgtgaaggggtaaaataaaaccgtttgtcttagccacacctccgtaattggatgaaagacaggggagtgtattagtttggaatacatttctgaaagcaagtatacatgt

SEQ ID NO: 512789 - DNA, 459 bp, Homo sapiens
tcatggaacgtgacacaatgaggactggcaggagaaacagaccagagagaggtctggagttaacggctgttgtctatcagatagcccctgagctcccacactagctctgccctagaaccatcctctttgaacctttacccaccctgaggccagaacttgcaggccctctgcagatctcctctggccactgtagcccctccaatgggcttcttctctcatgcattccctggcgctggaggcgtcagggaccccacatcctccctgctcctcagactcacagcccctccatgttacctcccgcacctcctccctggggcagctgctccctgggcctctgaggatgtcagctcctggctccctgcctctctcccactccactcctggctcagtcttagagatttctatgccctcatggattctacccctgccttcctggcctcttgattcttggcttgcctc

SEQ ID NO: 512790 - DNA, 427 bp, Homo sapiens
acaaacaaaaagctcaatagcacctgagtttcgcaaagatggagttgctgcagtgtcttgaactaagagagcagaagatcactgcttaaaaaaatgttgagtttattctcacaaaagatttctaaggatttaggtaatgtgtctttaaagctccaacaaaccatggaatcaacttgggaaggaggccgaattagcctttgttgtgtggttgaaagcaaattagtgctttcagaacactggtaggggctgttgaaacagacatctattgttcaaagttttcttttcccttcaagaatggtattttgttgaattccaggaagccagtttgacttcctctttagaagaaggatttctgagacacattcaagtgattaaattcaaagcaaattgtcaacatcacaagggggatgcaatgttgcatctttcg

SEQ ID NO: 512791 - DNA, 2514 bp, Homo sapiens
tgctaaataaagtgaaatacccaacctcagccgtgtgactgtcctgaggggcttgctttgctttctcttctaatgacttccagcccgccagtgctttagagctttcagctcgtctgctctgacctgcagagtcccggaggatgggatgggttgccctgtttcccagctggggacacacggctctcagaggtcaagtacagcttgcccagtgtcacctggcaagtgatgttttggggatggggccctgtgctgtctcccacatgctctgggcctctgggtaaaaggatgggtggtaaggggcaccacgtggaggcttggctgggcaggcgggtacactgacggggaactccggggggctctgggatgatgtgcaaggggctggaggatggtgggggtggttgtggcagtccctttggggcacctcaggggacaaagatgataacggggagtggaggaaaggcagcagctgaaggcatggcaccacccccggcagcttccataatcgtcgcccccagctgtggctgcctccacctcgcgccgtggagcagcatgtcccgtcccgtcccaagccacccctctggctctgatcccaactctagccctccttggacaccttgctgagccgatgatcttgtcttcctcgtccccttcccactccccgttcagttgcatttgaatctcccaccttagaagccagccgtccctcctttcagcagccaggcttttggtaattaacactatcaaacagattatcattgcaaaaaatatagagagacatgagtgagagtaaggactttaccctctgtctctcattctccagagctcttcactggtccactgtcacccgcctctcgtgtcctctgtgtttcctccttcaacaggttagacgtctagagattccacacagtgactgagaggttcgagtttgtgctgctttcacgggtttgggagcctgttcgtgaagcctgaagagtaatcatgatcctccttattgaagtattttattaacacttttcccaaagcagttcctttccttgaaaaggtagcagatcgtgtgtttatgacaggccctgcttcggagcgattgaggcacataactcatttcatccacgacgctcacctgtcaggtgctggagggctttaggccaggtgtgtagagccgaggcccagagacgagctctccacggctgctacaatcacgtcatcggcaccacgctcaccaggcttcacctttaatttttggctctaaattggtcttcaccgaattcctgaattactaggccaattagtgtcccatactagatggttctcagccttggctgtgtattggagttccctggagaactgagaagagcctgccttcttctccagttctggctgagtgtgtcaggtggagctggggcaagggtggcttcaaaagcccctgcagtggttttaacaggtacccaagcttgagcacaagacggagttagggcccatgctgtggcagcaggtgttaaaggtcccacgctgtggcagcaggtgttaaaggtcccacgctgtggcagcaggtgttaaaggtcccatgctgtggcagcaggggttaaagtgatcgtgccggtctctacttggctgtcacggtgggcacccctttccattggaacatagccttgttgtacctaagaaaagttgattgtttcaaaattcatacctagaggtgcttccctagaacgatcgatgtgtattctgacatccgcatttcacacacgcaggaccgtgatgccatagtctatgtttttgccatgtgtgtctaaaaatttgaggtatttcatcatacaaaagttaaacgtgaatgtgtggctatggacctgccgtgcgacgtgagaaatatcacggacgcacttggatccctctgtctcctcctgccaaaggtgattgctgcaggatctgactttttgtgtctgtctgaaaatttttaccacagggatatgtatctctacatacattgtattgttttgaatttctgaagactaagtggtacatggacgtattcctcaacttttgcaattcagcatggttggtgagtctttggattacatgtggctcaagatgggtgtttctcactgtgaggtatgaacagactccagtttctccattctgctgctgattggaggtggtttagggcttttgctctgctacatgatactgctctaagcactcctggatgtgtcttatttatttatttatttatttatttatttttgagacagagtcttaaactctgttgcccaggctggagtgcagtggcacagtcttggctcactgcaacctctgcttcctgggttcaagcgattctcctgtctctactaaaaatataaaaattagccgggcatggtggcaggtgcctgtaatctcagctacttgggaggctgaggcaagggaatcgcttgaacccaggaggtggaggttgcagtgagccgagaccgcgccatccattgccctccagcctgggggacaagagcgagacttcatctc

SEQ ID NO: 512792 - DNA, 270 bp, Homo sapiens
tttttttttttgggggggtgaaaaaaggagaaaacattttagaccccaaaggtgaattcctgtttttggcaaatgcctttggaaacagcgaggaaacacaaaattcgtgccctgaggtttttctatggccacttggggtaaacccccccctgggggtaacttttgcttattttgctggacagttttttacataaagcaaagggcatgtgaggggtgggattccttgttactcttactgcaataaaaatcaattgtttgaaaaaaaaaaaa

SEQ ID NO: 512793 - DNA, 353 bp, Homo sapiens
attactgcgaccagtgactgggggattaatgaaatgcattttgaaatgcattgccaggtatctctgaatagacgtaaaatagtatcatcttgtttgaaatttgcttttccttaattaggaacaaagctgacccttccatatgcttattaagtcagttgttgctttttttcctctataaactgattgtgtatatgcttgcgcctacttttcctggtgagtttatctcgtgacttaggaaatatgtgaagtgaatttgccttattaaaggaaattaagtaccttactgcacatattacagatattttctccagtttgccattgattttgatggtgtttttactccatagattttg

SEQ ID NO: 512794 - DNA, 162 bp, Homo sapiens
aataagaatgacagcctgaacagtagaatggccagacaggagaaaggcatatacacgacacatccccccacatgcacatcagccacagtctgattatcatggacagcacattgcaattgctgcatcgctgggaattagcccacatacatatctctggcacca

SEQ ID NO: 512795 - DNA, 382 bp, Homo sapiens
  misc_feature (190)..(190): n is a, c, g, or t
cacgaggtgttttgttttgtttgagatggagtctcgctctgttgcccagggtggagtgcagcggtgcgatctcggctcactgcaacctccacctcccgggttcaagcggattctcgtgcctcagcctcctgagtagctgggattacaggcatgcaccaccatgcccggataatttttgtatttttagtanagatggggtttcactatgttggccaggctggtctcgaacacctgacctcgtggtccacccgcctcggcctcccaaagcactgggattacaggcgtgagccacccggcctggcctagaatgacttttaaaagataaattaaatcaggtcactcctttgcttacaacgcagtgcgttagaggtaacccatgtct

SEQ ID NO: 512796 - DNA, 341 bp, Homo sapiens
  misc_feature (1)..(1): n is a, c, g, or t
nggcccgtacatctggatctctgaggtagtcacaagactgggtagtcacatgggtagtcacagactgtgactacccatttgtgaaaaaaaaaaaaagggggttcctctagaattcaactggcgggattgaatgttgggaatgggcggttttataaaaaggtagaatttgtgtatgtaaattttatgtatatatataaaagataatatatacaataacatacacacatatataaactagtagtctcgctgatatataatacacacattataaacttatttatatataaatatctatggaacaatagctatcacgtactttctctaatctgggtagtcacaga

SEQ ID NO: 512797 - DNA, 157 bp, Homo sapiens
  misc_feature (144)..(144): n is a, c, g, or t
cggaccgcagtcatgcttcataaagtgtttttttctcctcctctattgtgtagacttttagctactgtgctattcattttccagaatgattcactcattccatccggtctctcccagtttaactttcttgggtgggttttcttnggcattattggcc

SEQ ID NO: 512798 - DNA, 443 bp, Homo sapiens
gtcagagtgaactttggggatgtccaggtttggttgaatcactgtgggaggaatggaatgccactttgttagagtctgtctcgttcgctgtgatcgctggcatccatgctattaggtggtctgttgtagaggtcacccctcctgtaagaaggtggtggtcccttggccaggcacggtggctcatgcctgtaatcccagcactttgggaggccgaaggggtggatcatgaggtcaggcattcgagaccagtctggccaacatgatgaaaccctgtctctactaaaaatacaaaaattagctgggcatggtggcgggtgcctgtaatcacagctactcagcaggctgaggcaggagaatcacttgaagtgggaggcagaggttgcagtgagtcgagattgcgccattgcattccagcctgggcaacagagtaaactccgtctcaa

SEQ ID NO: 512799 - DNA, 144 bp, Homo sapiens
  misc_feature (100)..(100): n is a, c, g, or t
cgcgccatctctgtttatttctgtaccttcacagtgaagtgttgtgatttttttagttttaaatggttcaatcggggacgcatcagttggtcaaaaattncctttaaagcacttatttttattgtgacatcatcaatttgcaaa

SEQ ID NO: 512800 - DNA, 270 bp, Homo sapiens
ttagaggatctcggctagcaagcttgcaggttggaatttggcagcggggcgaaggggttaggaggttggaggtggacctcaggaccgttgggcgtgcttgggcttccagagggggttaatgataccctttaatgccttgtgttgtgaagcagactgggtctctggtggagggcatcctgggtccgaggggagatgggcgagtgctggtgggcatgggagtgggaggcggggcggttgctgctgcccccacccccgccgctgctgccgctg

SEQ ID NO: 512801 - DNA, 327 bp, Homo sapiens
aatgctggcagaaatgtggagcaagcagaaacccttcttcattggtgctggcaatgcagaatggtacagctactttggaggacagtgtggtggtctctcataatcctaaacatactcttagaatatgaaccagcaacactgctccccagtatttacacagatgggttgagaaacttctgcccacaaagaaatctgcagcgtgcacgtttatggcagctttctttatcactgccaaaaacttggaaggaaccaagatatccttcaataaatgtcttactacattctggtggttgtaacaaaataccatacaccgcgtagctgaggcag

SEQ ID NO: 512802 - DNA, 258 bp, Homo sapiens
gctgaggctggcacgctggttaattctgcttcacaatgatcggaacgagcccgagcatcgaacgatcataaagcgacttccctattaacgctttgtccgcctcgatccctagttatccccttttgtaacttttctgtcccccacatgcttaaaacccaaaaggtcagaaggatcgtgaggccccgctttcacggtctgtattcgtactgaaaatcaagatcaagcgagcttttgcccttctgctccacgggaggtttc

SEQ ID NO: 512803 - DNA, 266 bp, Homo sapiens
tttttttccccggggggccctttggggggatttggggggttaccagggggttaatagggcccccccccccccccccccttttaaaaacccccttttttgggggttttttctaaggggaaaaaggggggggggggttgcccaacccccccccccccccctttttttggaaaacccccggtttttttttttttaaaaacccttggccccttttttttttgaaaatggggttttttttttaaaaggggggcctttgggggcccccccca

SEQ ID NO: 512804 - DNA, 973 bp, Homo sapiens
gcacatagcgctcggatcaaattatcctgtatgttggtgacctaaagagaattacggttttcattcatttcatttcccccgtagcaagatggaagtgagaaaccgtctgagaaaatgaaaacatccttaaccactatctttccctcccatatgattattttatgtcagaaatttgcaaaagtcctgtctgcctccttctcttccttgtggcttaactttttaattcatgccatagtgcaggatatccaattatgtgcatcctgtgaataaaccacgtcttggtcactgtcatattttgaaccatctcatcagaggatgaataagtatctgtgttaccagagagagaacgaatgtaaggcacatgcccaagttaacaaagaaaaaatgtgctcaaggttgtcctttgggttaaatctggcccttccttggcaaaagcacataaattctcgcgccctgagagctcaacatcgttcgaaaagtacaaccagcaggaaaaatgggccaatctgccagtttaggcgttaccagcatataatttttaatatctttacttctatcatcccaaatcaagagaactcttctctattatgtataatcaattgcgagcaaatagatttttcttgtaacaatctgtctgccagaaggtgttttcacttttccttgtcttttgcttctttctgtcgtttgcctttctctttcgtctggagaaatcacttagactctgtgtgcttcttctaagttgattactggtctgctatgttaactgctaagctgttcctagggagcccttatggattgatggatgtgggaacttacacttcacttgacgaaagcaaggcctttggaggcccactgaagctaacgcgagtgtgccaaggaagggaagcattcaggtagtcccccaacgggggatcagacaaagcaacccagaggaaggctgcgcacaagaggagatttacacggacggccaacc

SEQ ID NO: 512805 - DNA, 215 bp, Homo sapiens
ctggccagatatcggcttgatagtgactctagtaactcctggtacctgcgtcatgacccagctttggacattgccttccgtgccttctttcactccgactctgtgtgcttgtactgactggttcttcatcgatttcatgctgctgccgccagctgggcttgttgtgtgcttgcctgggtggaactcctgttcttcaagctctggtacttgattca

SEQ ID NO: 512806 - DNA, 822 bp, Homo sapiens
  misc_feature (788)..(788): n is a, c, g, or t
agggccactgtatacaagtaggaacttccgggtccgtcacttccgcttttaacccttagtcagagcatctcagccgtttgatacctcgattctctcctgcgttggacagaggcttggtggcagtgcacagcctgattgcttacgacttaccgtgccatctgatccgcgccttcaagatggatggacagtgtagcttggctatttgataggagtggggacatgggtagtgggcattctcctctctacccagggctgcgctgatccccgtactgcaacgtaactgttgccccgccaagcccgaaccacccaggttgaggagttgagagagtgcaggctggggtcaggacagcgctgcggatgctgtgtgcctatgggtgagttactccggacccacctatgtctgtctaatcgtccatggcctttgcaaccaaaatcgctccaccgcctgccaattgcggatggggacatgttcaccagccgttgtggtaacgggatcaacacccataaggactggtcgccagtagtctatgaggtagccgtagccacgcctctgccgttgtacagtaactcccgaccccttacaggatcaggcaaagggaatagcacctagaaccccgtgcggtagggaaagaaaggagggacaaaccataaaaggaatacttataatgagaaggtttgtaaatagtccatgatgaagtcgcggcagagtctgatttctatatagaggtgactttttatttaagtactgtgcaagctctgtgcttctataatgtgggaaatggcttggntaaatcgcctgcggggagcatgtaatggatagtc

SEQ ID NO: 512807 - DNA, 281 bp, Homo sapiens
tgtgcgatagatagttttatggaaattcattgagcggacacattgaatatgtgcctctgctatagaagctttgacaaaattattatctccatgtgatattacatgaccatgatccagtgattcacgatgcattactcactggacccctagggagccaggcgacatcgagtcccacccaacaggattaatattagtctagcatgcaggagtatttctcaaaaattacccaaggcataagagctcttctagagccatttgtaatacatacagaattccacgag

SEQ ID NO: 512808 - DNA, 576 bp, Homo sapiens
  misc_feature (10)..(10): n is a, c, g, or t
  misc_feature (94)..(94): n is a, c, g, or t
  misc_feature (128)..(128): n is a, c, g, or t
  misc_feature (141)..(141): n is a, c, g, or t
  misc_feature (182)..(182): n is a, c, g, or t
  misc_feature (210)..(210): n is a, c, g, or t
  misc_feature (259)..(259): n is a, c, g, or t
  misc_feature (339)..(339): n is a, c, g, or t
  misc_feature (346)..(346): n is a, c, g, or t
  misc_feature (354)..(354): n is a, c, g, or t
  misc_feature (369)..(369): n is a, c, g, or t
  misc_feature (391)..(391): n is a, c, g, or t
  misc_feature (423)..(424): n is a, c, g, or t
  misc_feature (436)..(436): n is a, c, g, or t
  misc_feature (443)..(443): n is a, c, g, or t
  misc_feature (561)..(561): n is a, c, g, or t
ctggcctgtntccggcccggggctcccggcgggtctcaggcggcagggacaatggcaaggccgctcaccacttgaggaagaccatcccggccangacggtgtagcccagcaccaggaagaggaccttnagcagacggtcantcttctcctccagctccttggccaggatctccaggaaggtnatgaagaggaaggtgccgcccgccaggncctgcagcagcacggacgccacgctgcccggcacgccctgggcgctctnaatgcccaggcccaggccgatgcccagggggatcatggcgctcacggtgaccgccagcttggccgcgtcccgcagggcantggcacntcgggcantgcatgattgcccangggccacggccaccaagatgtnttgttgacaggccacccccgacagaacaggcnntaccacatttcntcccccntcctccctgcgaggccccagggcccaggcccctctaaaggaccggagtggggccggacagcgccgaaggcccagggcttgacgcacggcgcaccggggggtgggcgcgcgagacggcncttgaccgctcacgg

SEQ ID NO: 512809 - DNA, 728 bp, Homo sapiens
  misc_feature (25)..(25): n is a, c, g, or t
  misc_feature (81)..(81): n is a, c, g, or t
  misc_feature (94)..(95): n is a, c, g, or t
  misc_feature (107)..(107): n is a, c, g, or t
  misc_feature (109)..(109): n is a, c, g, or t
  misc_feature (126)..(129): n is a, c, g, or t
  misc_feature (138)..(138): n is a, c, g, or t
  misc_feature (143)..(143): n is a, c, g, or t
  misc_feature (146)..(146): n is a, c, g, or t
  misc_feature (174)..(175): n is a, c, g, or t
  misc_feature (180)..(181): n is a, c, g, or t
  misc_feature (183)..(183): n is a, c, g, or t
ccgccatggccgacaaggaagcagncttcgacgacgcagtggaagaacgagtgatcaacgaggaatacaaaatatggaaanagaacaccccttnnctttatgatctngntgctgacccatgctctnnnnctggccccngcctnacntgcccagtggcttccagcatgtaaccannaccannangggaaagcattcccacgccctccatccgccctcgctcctgcgcggcacccaccaccctcgcccctcgccccccccccactctcgctccctacgccacgtgctgcccgcatcccctcacctgccctgcctgccctcccgctcccgccctgccgcctctcccaccctcacccaccccgcctgcacgcaccccccgccgccccctccccgcccgcgctccaccgcccctccgcccccgcctggcacccacaccatccgccccacctacgccacccaccccacccgccaatcaaaccccccacccgcccacacgcggcaccccacccgcctcacccacaccccgcgccccccccccgccccccctcactccgccccccccccccctcccccccccccccgccccctccactcccgcacccccccccgcacctcccctcacccccccccgcaccgcctacccctcccgccccccctccccccccccacccccccccaccccacccccacccccccccaccccacccttccccccctcccccccccacccc

SEQ ID NO: 512810 - DNA, 872 bp, Homo sapiens
tttgtgaggaggttccctcgctctacggaagattgcttcgagcaatcactatgtctaaacaggcaacatcacgagtgttgccctatcctgtcataatgaggacacgcatcacgcgctactcaggaattcacttgcgaacaatgcgtagaaagacgggccaccagttcgtacccggttggcaattacgcagggttttgcatctacccttggtgtgcatatcgcgcaaggttatataaactcgacagagcagtggttaccattactaagagatgctccactatgcatcctgatccatgatgcgtgctggcagcccaacggcgttagtatgctaggacgcagagtgacttgaccggtagtgcgcgctattccgatgctatcggggcaattctgatgctataatagcccataaggccttatgaacgaaggagatgctagtcttgggtcttgtccgcgaagagctccgcttgaggtagcatcgtcgttattattaaatgttaccctattatggttcggaaataaaagctagacttctggtatgggttttacgataggtcaacatcggcattttgacactattttggcttcccatttcttgcatggcttgatcttgcttaggtggaccgttgtttactaagctgactagttttcactagctaggtcattcacggcaggtcaagtctagttagacatgtcaccttggtgtcacttgctggggggtttggaatggtccacgttctgtaattccctaggatgatcgtggtcctttcaaggttcccgggccggccaagggtctcctgttgctgcgactgttcgccctccgggcttgggaagagcccaatgccccggtcccctccggcgccttacggacggcg

SEQ ID NO: 512811 - DNA, 140 bp, Homo sapiens
gggtgggcggcggctgtgcgggatggtcgcctggaccttcccaggtggactgggtgggcggccggctcttcccagggtgggccaggtgggcggccggctccgcaggacggtcgcctggaccttcccggggtggactgggt

SEQ ID NO: 512812 - DNA, 1198 bp, Homo sapiens
gccggagccgcggcgggagaggaacgcgcgagtcgagcactatgggaagtccaggtccggcgagtccactggtcggtggaaggaggaactgaaatgtgtgataagttcttggctctacgtcctcctcgctggagctttgtgacgccttgatgcgagatgggactgatttgccggtgggtgtcggggctcagcttgtcctgtagtcagaccataatccatggggctatgccctgagctctacgtgattgtccagtggtcagtcatcgcagtgggtgttttcctcttcctggtggctttccgttggcgcttgctagcagggagctctgcaagggagaactattgtcttatgatcacgtttgccagtcttactagtctctcatcatgtaggtggaggtagtgcgcagcacatgtgcatggcatatgtgttcagagataaggtgatgtccagacgtcgaaataagcaaacttccaggacatgcagcatcggacgaatctgagcacgcggatggaagaatgcaacagtggacttgtctcatcctgggtgcagcgatgcacgggcaggaatgtaaccctgctagtggggattggtaaactaggagaagatttggggagaagcatcccttaccatgtcgaagaaaccgaagtaccgcgactctgtgcctgcattaatcgttaacttgtcgggcttgtggaaggaattaactttttcaacacgagaaaggcgaactcccaatacaaggagggcatgtgatgaaagaagcacttggggcggcctgggcttgacggcacgaaccactggttagctagggaatgggtaagactggacaacagggaacccattggataatgtgcccgatttgatcagaacgagatctttgggggcaatttgggtctatttggtccaatgtcatgcacttcggatgccacagaagcgaatcccaggcaaacgttggcgcaataccgacggggtgaagtggcataggggaggccaacagggacctacagcgcaagtgcaccaccccacaaaccgggcggagaaaagggacaaaaaacgtgaaccaaaccaaagggcgatgtgccaaaagtgacagaacgacattattactggaagtacagaaacccacacgaagacacaaaaaacaacagaacaacgacgcggaggcagacaacatacggggagtcgagggaaacacagtaa

SEQ ID NO: 512813 - DNA, 454 bp, Homo sapiens
ctattcagtgactcacttgcgtcattttaacaagtggtgcacatgctggagatgctggccttggtgacttactactcataggatgttttagttttatgataaaactaactggcctgacagaaacagcaatgaactaaaatccagatgaaccaagtactagcccctgcttcattatttggcagttaggtaacaatggaaaagttcccttttttgtctcaattttcttctatataaaacaacataataataatgctttgttgatatataacaggtctgaggtaagatgtgattgtcatttgtgtataaaagcaaaccctcagaaattcttcctacaaaatcaaagtcattactttaaaatatatacacattatttgttattgcagagtattaataagtttctaattaatgcatcatataaaaatcagcttttatacatgggcttttagattagaat

SEQ ID NO: 512814 - DNA, 283 bp, Homo sapiens
cttttgtcgcacgttgatattctctacaaacccaccaagcacatgggcaacactcatacctattatacggcgcatgagctggagtcctaggcacagctctacgccatccttatacgagccgagctgggccagccaggcaaccttctaggtaacgaccacatctacaaggttctcgtcaccgcccatgcttttgtaataaatcttcttcatagtactacccatcatcatcggaggcttaggacaactgactagtacccctaataatcggcgcccccgatatggc

SEQ ID NO: 512815 - DNA, 679 bp, Homo sapiens
gggggaaaaaaattaaaaaaaaaattttaaaaaaaaaaaaaaaaaaaaaaaaaaaaaaaaaaaaaaaaaaaaaaaaaaaaaaaaaaaaaaaaaaaaaaaaaaaaaaaaaaaaaaaaaaaaaaaaaaaaaaaaaaaaaaaaaaaaaaaaaaaaaaaaaaaaaaaaaaaaaaaaaaaaaaaaaaaaaaaatttgggccccctttccccccaattttttaaaatctcccaatttttttcttggggccccaatttggctctctttgggaaaaaccccccttagggggcttttttaaaaattatggggccggtttttaaaaaactgggctgggaaaaaccccggggttcccccaattaaaacctcttaaagaaaaacccttttcccaagggggggtaaaactcaaaagccccccccctcaccccttttcaaaaaagggccccccctttaaggcgcggggaaatatgggcgcgtaaaattcttggaaaaaaaccgggaaaatttttggtaaaacaccctttttttttcaccaataggcccaaaatggaaaaaccctcttaaaaaaaaaaaaataaccccccaatggggcgtgtggattttcccattttgaaaacaaaagccccctttttaaatcggcttcccaagctaaagggggtcctctttattagggccgtcccccccttcg

SEQ ID NO: 512816 - DNA, 333 bp, Homo sapiens
atttttttttaaggtaaataacaacataatgccacagggctaaaggcatttatgatagaatgaaaaggcagccaaattaatttacttgagaatttagccaagaatggattttaaggtacttgaggtaattcgtttcccaaagattatgattttaatgtctttgaaggagatattttatcaacccaaacagtaaaccctgaataaaatgacagttgggtctctttttgggaggtcaaagggagttcctcctaaatgggaccagtttaaattttacccctccttcaaaagattggtcaagttgaacatcctcaataaatcctatggctggtccca

SEQ ID NO: 512817 - DNA, 412 bp, Homo sapiens
cacaaaggatgcttagacatattacaggctgcctaaggtagcatctgtgcccttgtagggacacaatgttgtacattcatccctgacaactaccagaacataacgacagctttacaagtggtgtcacgggagattaaggtgattgagagccttactgaccaccccctgcagagatagtatgcatctctgagctctggtctaagttgggctctcataatcatagatagcatagcaggaatgttagtagtaggttggtgcactctgtattgtggcctataagtccagggtgcttccctatgtgctcaggtccccactaagaggatcctctcggcctagggagtggagcataaggaacatggctgcactgcagccaagcagtcataggccgaggtaggcatcctttgtggcagca

SEQ ID NO: 512818 - DNA, 228 bp, Homo sapiens
cgttagcgtaatccgtttcatccccaatacaacgcgcgaggaccgtgtgccatgcctgctgccacttcgcttaactttgagacaaatgatactgtgttaccttctgttgacgcatataaaatattaattttgaccatgaccctcttatcccttgtaacgtgatgtgcttaaatcgagcaactttcacactcgttcacaccagattccttggtgattcatccgaaaatt

SEQ ID NO: 512819 - DNA, 319 bp, Homo sapiens
tcccctcttttttggacacagagtaaagaggacaaataggtgaattaataaatgaaaggctggaatcccacttccgccgctgtcccagagcacagcagcaggagggacaggaggcagccaaccacccacagagatgaaactcacccataaccactgcactgactggcatctctccacggtaggaagagaggagcaggcgaccatgcgccagtacgaacccgcctccaaaccccgcttttactgttcgggatgcaccatagactttcctgcatcactctgacttgttgagtacattgggatcagtcttgtgtaaactgat

SEQ ID NO: 512820 - DNA, 341 bp, Homo sapiens
  misc_feature (103)..(104): n is a, c, g, or t
  misc_feature (136)..(136): n is a, c, g, or t
cccccccccgagttttttttggttttggggttcccccccccccccccgcttgttttttggtcaaaaacccgtttgggaatggggcaacccagggggttttttnnttccccccctttttcctcccaggagtgagganaccccctggggcaggggtccacccccccccccttgttagggcctgtttgggaatggccttccccccccaaccagttaggccccctatggtttttattagggttggaacaaaaccccccaaaaaattttttcctcccccccccttcccttatgccgggggccccaggctgatttttaggcccaaataaaaaagggtttattccgga

SEQ ID NO: 512821 - DNA, 178 bp, Homo sapiens
tcaaaaactaacggagaagtcagaacgaaagaagccagacgcatattacatgattacacttatatgaaatatccagaatagataaatccacagaaacagaaaacaggcggtggatcaccagtggaccagtaggtaagggggaaacagagaaataatcaccatacgggagtatagaagt

SEQ ID NO: 512822 - DNA, 166 bp, Homo sapiens
caggtgggccaggcgggtctcgatctcttcacctcgtgatccacccaccggggccactcaaggggctggggattacagggtgtgagccacggcacccagcgccagctcggtcctttcatttcagggctctcggcccccatttaagaaccaaatcaagccaaatccg

SEQ ID NO: 512823 - DNA, 494 bp, Homo sapiens
actatggaaagaaggaggtaagctctatcaattgttctaagctgggtgaagcctaatgtagatggtgatgaagtaccaggagaggaatccaggaggaacatacttggtggggcagatagagtggagtctatagggaagggtctatagagatgtccagtaggtaataccaatcaacaactatgtggatgggcagaggagtcatccagccggggctcggcgggggagctgggggggctgggaatagaggtcctccctggctcagggttgtaggggcgggagtccaggcgggatgtggatcttccccatttcattatctcaaatgagcaccagccttgggagaagtcaagggctttgggagctgcaagcagcaccgggtcagcgccaaaactgggaggggaatggaacacactaaaagtggtaaaactggacagaggagtgacacacaattttctaaagaggtggccggtccccctccctttcccttactctacttt

SEQ ID NO: 512824 - DNA, 335 bp, Homo sapiens
aagctcggcaccgtgtatcagtctgactgcagatgattgccggacgatctgagaatacaagttataattaattaaatttctgcggagaagttgtaaattcgtgcgcttcattgttgatccaaacttttacttctaatcaccttccccatttctagtacatctactctaccttattttccactttgtctttcgcatctatctattgaagttctgacttggattgatagtccttagagccagttgcattgttgcgccattcgcgttaagttaaccgctgaatgttttagaagaatctggccttagcttattgcctacgcctgccactatgcaccatg

SEQ ID NO: 512825 - DNA, 212 bp, Homo sapiens
aatgccagtcactaggccatctatatcagcgctctgcaagtgtctgggcctcgtgctcgcgtcctcctgtgatcccaaggccacgggtgggttaatggcttgatagccggactcctggcccagaagacgttgacaatgccgatgggacaaatccagctcttctctccaagggcatgcttggaggtgacgatggcatgacaatggcatcccta

SEQ ID NO: 512826 - DNA, 386 bp, Homo sapiens
  misc_feature (29)..(29): n is a, c, g, or t
aaattacttccctggtcctgacagtcacntggggtcccccctttccctggttccaccttttttaggaggagcctggagtcaggggtgggttttggattaacccatccttcctagttaacccctttttgtttttaatttatttaaattttgtttgttttccccgggggggggttttccaaatttatttacctctgtttcccctttttccttttttttttaataaaagagcaaagcttttttatttactttgtaatttaaaaaactgaaaaaaaaaaactgaagaactttggggggaattttggacttttttcctgggtaaaaattggacttttttgagctttatcgtggttgttaatttgaagtaataaagtagaaagataaagtga

SEQ ID NO: 512827 - DNA, 108 bp, Homo sapiens
ggactttgcgcttcagaggctcggacacgccgccatccagatgtcgatgttgttgggcgtgccatactgctcgatcagtttcctcgccaatttcaggttcctcagcac

SEQ ID NO: 512828 - DNA, 405 bp, Homo sapiens
gctctattctactacggcaccttattagactatgaatagggacggctagctaaacccgactcctactaccaggtgtcatcccctggtaaagagagcgctagtatacccgcacgcaccgcagtggtagactaccgtagtacccgtgatacaggccctatatgactagtacgccccgtggtacccacaaacgagaggaactactagatacaaccgccatgtgagaactaccgcacactagaccaatacgatagtaggctatacaactgtagaggcacacacgatagacactagtacccagacgctacctacatagccaatagaggtaactacctaatgagcgaacacagacgaagcacgaatagttagataacgaccctactcaggcaccaagataccccgaacctg

SEQ ID NO: 512829 - DNA, 570 bp, Homo sapiens
  misc_feature (13)..(13): n is a, c, g, or t
  misc_feature (24)..(24): n is a, c, g, or t
  misc_feature (37)..(37): n is a, c, g, or t
  misc_feature (49)..(50): n is a, c, g, or t
tggcctaatttgngctgacaactnttagaaaccaccntgggcttgtaannaaaagcagtgacgccgagtcgattagcacagccgacagccaggagacaggcagcccagcgtgacagtgcagagagctgaacgtgatcggactgactggactgctgctcagtgtctgcactcacactggaccactggagactcacgggctccggcagtcggctgcttgggtggatccgggtgcccgaggggctgtgggagggccggggctgactgtcccccgatggctgtcttcctcacggcggggctgaccctgtgtccacgtgctaatctggagggacgccccatctgcctcctgccctgccgcactccggggagcggggccttcgttccagaggacgtggctgtgacagcgtcagggcttgtggtggtcagcgatcccatccatggggctgtccatgcactccagcacacagcccgggaccccgggggccactgggtgacagtgggcaccttcctgtctccccgagggctggctgtggatgccctcaaccgcctcctggtgacggactacttgcctgg

SEQ ID NO: 512830 - DNA, 242 bp, Homo sapiens
gcttgattgtaccggcacgcagtcctcgctgcggattggatcacggtgtacgtcgggacgagcagagattgtggggcgccccagcacatgccacctcgtcctcctccttgagcatctcatagttggggggctggccactgttgacaggagagaagaaggtttggacagtgtgattcatggtgtccagcgaagaccagcggcggtcgggttactgggatggttctcccccggtacatgcaagg

SEQ ID NO: 512831 - DNA, 1278 bp, Homo sapiens
attcctacaagtgcaacgcggaggagcacgtccgtgtcactgaaggggcgttttcagatcaactatattcacaagtgtgtgtgtccaagagcttatcaaggctggaaggtggccagttatggcctctgtgtgagtgagtagtctcgctggactgaggaacagcatgcgttgatccccaatcgcgtgtgggctggtgcccttggacgggcgcttgagtccttcaatcgtccatcatcggccttaccatcgtctggcaggaagagggagtcacgcaggcataccaggacatatctacgccttggtgcacgcagggcacagctaggcttgcagggggcctctagtttcctttgtctcttgcgagctataggggtcctagtccgaaggggagagagcaccactatatctgggcataaggtaatctcgacgattcttgcttcgattccaatggttgaacgtttcacttctttgccaggccattttaacctaattgcaccaaccaggaagtagactaattcggaacattgacggctgtccaatttagtgcataagctggggttcaaaccttatttgcgggcattaacctggggcttaaaacaatttacttatttatacccataacgtagcgaatcttctgacggggctgccaggcgctgcctcctactcctgcagccggagcgtttggcgaggttgcccggacgtggttcctccttgaaagggggggcgttggaccgatggttgccccggcgttgcgttcctcctagaaaggcgcccgctagccgcgggagtatgcccccggggtctatcactccatagcggcgcagagtttagtgggcatgtgcacccgcgtgtgacctctccttgcacggcgccgctacgtgcagactcaccgcggtaccacaccacattaaagaaggcgaaaattgggcaggagtcttcacacgcgccaccaaacacaaccaagaaaacgggcgtgttggtaaaactggcacgaggataaaccatcattaagagagggaccgtctcaagaggagaaagacaggaacacccacacaacatggggggatcgccgagatcacatgcatggcgcgaccaaatcgaagagagacgccgcacgagatcgagagaacgaccaccaccacaacacaccacacgggggacacacagaagcaaataaaacccctctcatcacaaacgggggaggaggaagaactcatcgtacagccatcccacacacagacagagacatgcgacacaaaacggcaacaccactccaggagg

SEQ ID NO: 512832 - DNA, 170 bp, Homo sapiens
  misc_feature (19)..(19): n is a, c, g, or t
  misc_feature (81)..(81): n is a, c, g, or t
  misc_feature (116)..(116): n is a, c, g, or t
  misc_feature (127)..(127): n is a, c, g, or t
  misc_feature (169)..(169): n is a, c, g, or t
gtgcagctcagtgtcactnaggacagcttctgctgctgcaagctcagcgccggtggggctgtgccaccacccagtcctggnatctttcctccctcagtgaacatggtgatcaaggntcggccctcanatgggctgggcgtgccgtcctccagcagcggcatggcttccna

SEQ ID NO: 512833 - DNA, 602 bp, Homo sapiens
gagtgacatatatcgacctaagggaaaggggaagagcaacagtaactccaaagtgtcagagagatagttaacattcaaaaaactggttttcacatggaccaaagagatgtgccatataaaaatacaaagcctctggtcatcagcagccgggaccactttagaaatgaaccagttcatggcatgctgaagcgacatggtgggtcaagaaaccagtttctggcatagcgctataggtagttactttggcttgctctgagagactgcagataataagatgtaaacatcaacacctcgtgaatacgatgtaacttccatttagctatagcttaagtcagcatgacggtagataaggatagcagcaaacaatcatgggagcttaatgaccatgtttaacaataattaccagggcctcccttctacttgtgagttctgaaattgtccttttaatttgcagggataccgtctaatttaattatatgatctgtctgcactcagtttatgccctactcaaatctcagccccatgtggtgctttgttatggtcagaacctggtgagttgttttgcacagaactgtgtttccccttcctgtaaggatgtcgtg

SEQ ID NO: 512834 - DNA, 4720 bp, Homo sapiens
  misc_feature (3015)..(3015): n is a, c, g, or t
cccctccagagcgttgccagagccacaggaggcccagaagctggcagcagagcgggcccgggcgcctgtggtgccctacggcgtggacctgcactactggggccaggagctccccacagccgggaagattgtcaagtctgactcccagcaccgcttctggaagcccagcgaggtggaggaggaagtggtcaatgccgacatctccgagatgctccggagccgccacatcacttttgccgggaagtttgagcctgtgcagcactggtgccgtgccccgaggccagacggccggctctgtgagcgccaagaccggctgaagactttccacagctgcccaagaccttccggctccagaggagggacggagccatccccacgtccctgtggctctcaggacgccctcctctgaggggcgcgtgattccagtgccctttccatgggaagattgttccacgggacgacgaaggacggccgctcgacccggaagacagggctcgtgagcagcggcggcagctgcagaagcaggagcgcccggaatggcaggaccctgagttgatgagagacgtggaagcagccacagggcaggatctcggctcatccaggtacagcgggaaaggcagggggaagaagaggaggtaccccagcctcaccaacctgaaggctcaggctgataccgcccgcgctcgcattgggagaaaagtcttcgccaagtaagagtggctgctgggtcacctcccaccgcgtggcccccccgtgtgagggtgttcgaggggggccatctgagcgccaagatattccagggacttggggcctccaggggctcccctgctttgagttcccctgggggaccacccagcctttccccggggaggggcagtgccagccagcaggggcagcaggcaggtctgctcaggaacgccccccagcattccccaggataagaggggctcgaccgccaggcaccgccatcctcgcttcctgggggagccatgccaggacacaggccttggctggtgcagagtgagcccctcgtctctcccttgcctggctgtacccccaggtcagtgcctgcgtatttctgcagcggtgacttcagggagggcgatgactgcaaaggcgggcagaacgggggtccacgcgtcagccccagcagagcccagccccagcatgtcttctcggagcactggctctgggaggctggcctggtgtctctgcagcccagcatgggcctgtgtgactggtgaggacttggcagggccagagtgcgaagcccaccagcccggcgtccctgcgtgcagtctgtcagctggggcaccagccactcgcacggccttgtgtttctgtcttcatattgccttgttctcgcctaagaaaatccagaatgcttgtttagaagccacctgaggctgttgactccctcccaaatctgtgtcaagtccctgctggtgcaggtttgtctggtagcaccagtgaggtggcccccacccatcgccatcccagaaaccctcccttggacacacctggaaggtgctaagtgcaccgggcagaggaggcccctcctggccagcatgaccgtgcaccggcctgagtgggctcgggtgggaggcgccttcacagcactcagaccaggcttcccccaggcttgtgggtggtacatccacagccttgcttgggtggggcaggggcgctggtgggggctgtggagaggctgcctggggcccctggcacagggctggacccatcccgtatgccagccacccaaggcaccttagcccttggagctcagggtgaggctgttttcccgtggatcagccaggggcagaggccagccttggtgctgatgcccaggaggaggaatggccagtgggcccatgccaggcctcctccctgtgtctcatggggacactgaagcccatggcaggagctggctcttcgccacagctgtgtggcccagacccctccctacagaaaggatctggggtgaccacaggcaaaaccctgcctcgaggggcccccacagcagcgcctggcagccccacaggggccgcagctgagcggcagcttcaccacattgtggcctcaggccctgctggctccacagctccacaccctcgtgggtcgcagcagctgagctggtcagcacagcacacctcatcctgctccccggaatgcctgcctggcccgtgccccccctgctgcagccctccaggtttccagccctggccgtggagccgtgcgtgcagcagcgggcagggctgtcctgacgcctcctggctgcatctcctgcgaggccgctccccgggaggccaagggggaggctgccctcatcctggagtgcgggaggccacgggagaagtgccaaggtggggctggggccaccttcaccgcgcagaaccacccgccgcagactccgcttctgggacctggggcggccctttctaagcctgtctgtctcgggccagggccaaggggcccgtcgcccatctgtctctgaaggtggcacccacaggcagtctgtcagtgtccgagggcagcagttgccccaggaccagtgcctaactttggtgatgccgccactgggagcccaggcccctggcggaagcctcccaggtcacatcttgccttgtttccccacagggcagctgtgcggagggtagtggcagccatgaaccggatggaccagaagaagcacgagaagttttcaaaccagtttaactacgcactgaactagagagcggggcccagtgcactggccatcagcactttctccctctgccagtgtctcaggacagcagagtgggcgtgggtctgggcagtaaccatgctttgtctattactgtgtttgatgtaaagaaatggtgtgttgcaatgccctgaaggtacggccgctctgctgctacagggttcggcatcgtctggtgatgggtctggcctcgcagaagaggccctcgggcctggagatgtgaacacaggcagcgaccctgttccagagggcttctgcgagtcctcgtgagnccagtgcttgtcgtggtgtggggttcagcacggacggaatgtgtgtgcagctcagccttcagagcgtgcattccccagccaggaggcgaccactcagaggaactctgggaaacccacttttgtgcaaatgctgtttttaacacaaacacaaaggctagtgaaccgttcagtcatctgctttctgtttctggatgtgccttttcatacatgtgtcctcttgtccctggcttcttacacttggcgttgtttttaaggtttatccatgcagttcccctccaatgtataaaacaaaggaggtgaaaacctgtccatgcggaagcttgtgcacccatgttcacagcagcattggagaaggataccgaacatcttctcgtgggcttactggccatttgtgtatctcctttggagaggagtctattcaaacctcttgcctatttttaattgaatgatttatcttgagttgtaacagttgttttttttgtttttccttttagagatgggcttttgctcttacccaggctgagtgcagtggcagaatcatagctcagtgcagcctcaaactcctgggctcaagccatccttccacgtcagcctcccaggtagctgggactacaggcacacaccacaacacctggctaattttttaaattttttgtagagatgaggtctcactgtgttgcccacggtgatctcgaactcctagcctcaagcgatcctcctgcttcggtctcccaaagtgttgggattacaggcatgagccaccactcctggccaggagtttatatgtatactgtggatactagatcctcatgtgatttgcaaaaactttatttatttatttatttatttttgaaatggaatcttgctctgtcgccaggctggagtgcaatggcgtgatctcggctcactgcaactaccacctcctgggttcaagcgattcgcctgcgtcagcgtcctgagtagctgggactacaggcgcgcaccaccacgcccagctaatttttgtatttttagtagagacgggatttcactgtgttggctgggatggtcttgatctcttgacctcgtgatccacccacctcggcctcccatagtgctgggattacaggtgtgagccaccgcactcagctgatttgcaaaaactttcttccatactgttgtttcactttctggatagtgtcctctgaagcacaaaagttaattttgatgaagtacagcaatttatctgtttttttcttttgttgcttatgcttttgctgtcacatttcagaagccatcacctaatccaagatcacagagatttacacctagtttctaataagcattttataatttcagctcttatgtgtagatctttgatccattgtgaattaagttttgtgtgtggtgtaagagcccacattcttttgcatgtggatatccagttgtcccagcaccatttgttgaaaacattatttttccccattgaattatcttcgcaccattattgataatcagttgaccaaaaatgtacaggcttatttctgggcacttgactctattccattgacctgtttaaccttatgccagtgccacagtgccttgatcagtgctgctttgttgtgagaagttttactttgttctgcttcaaggctgttttgactcttctgcatctcttgcatttccaaatgaattttaggatccactcatcagtttcttcaaaaaa

SEQ ID NO: 512835 - DNA, 213 bp, Homo sapiens
gggcagagggggtaggcagaatgactgcaaacagaccaaacgcgatggacgcgcatgagagccatgaggaagcagaaggaagacgaaggcagctagggcggcgggtacatggcattcttaggcttgtgaagctctcacccttctttgtctttcttgattacatgctttctcttctccccctgtatgtgctgtttatcccgtttctggctgtgt

SEQ ID NO: 512836 - DNA, 2022 bp, Homo sapiens
  misc_feature (45)..(45): n is a, c, g, or t
  misc_feature (317)..(317): n is a, c, g, or t
accactgattaccgaatttcgagctccggtaacactggagggcanggacacttggccatcagcactttctccctctgccagtgtctcaggacagcagagtgggcgtgggtctgggcagtaaccatgctttgtctattactgtgtttgatgtaaagaaatggtgtgttgcaatgccctgaaggtacggccgctctgctgctacagggttcggcatcgtctggtgatgggtctggcctcgcagaagaggccctcgggcctggagatgtgaacacaggcagcgaccctgttccagagggcttctgcgagtcctcgtgagnccagtgcttgtcgtggtgtggggttcagcacggacggaatgtgtgtgcagctcagccttcagagcgtgcattccccagccaggaggcgaccactcagaggaactctgggaaacccacttttgtgcaaatgctgtttttaacacaaacacaaaggctagtgaaccgttcagtcatctgctttctgtttctggatgtgccttttcatacatgtgtcctcttgtccctggcttcttacacttggcgttgtttttaaggtttatccatgcagttcccctccaatgtataaaacaaaggaggtgaaaacctgtccatgcggaagcttgtgcacccatgttcacagcagcattggagaaggataccgaacatcttctcgtgggcttactggccatttgtgtatctcctttggagaggagtctattcaaacctcttgcctatttttaattgaatgatttatcttgagttgtaacagttgttttttttgtttttccttttagagatgggcttttgctcttacccaggctgagtgcagtggcagaatcatagctcagtgcagcctcaaactcctgggctcaagccatccttccacgtcagcctcccaggtagctgggactacaggcacacaccacaacacctggctaattttttaaattttttgtagagatgaggtctcactgtgttgcccacggtgatctcgaactcctagcctcaagcgatcctcctgcttcggtctcccaaagtgttgggattacaggcatgagccaccactcctggccaggagtttatatgtatactgtggatactagatcctcatgtgatttgcaaaaactttatttatttatttatttatttttgaaatggaatcttgctctgtcgccaggctggagtgcaatggcgtgatctcggctcactgcaactaccacctcctgggttcaagcgattcgcctgcgtcagcgtcctgagtagctgggactacaggcgcgcaccaccacgcccagctaatttttgtatttttagtagagacgggatttcactgtgttggctgggatggtcttgatctcttgacctcgtgatccacccacctcggcctcccatagtgctgggattacaggtgtgagccaccgcactcagctgatttgcaaaaactttcttccatactgttgtttcactttctggatagtgtcctctgaagcacaaaagttaattttgatgaagtacagcaatttatctgtttttttcttttgttgcttatgcttttgctgtcacatttcagaagccatcacctaatccaagatcacagagatttacacctagtttctaataagcattttataatttcagctcttatgtgtagatctttgatccattgtgaattaagttttgtgtgtggtgtaagagcccacattcttttgcatgtggatatccagttgtcccagcaccatttgttgaaaacattatttttccccattgaattatcttcgcaccattattgataatcagttgaccaaaaatgtacaggcttatttctgggcacttgactctattccattgacctgtttaaccttatgccagtgccacagtgccttgatcagtgctgctttgttgtgagaagttttactttgttctgcttcaaggctgttttgactcttctgcatctcttgcatttccaaatgaattttaggatccactcatcagtttcttcaaaaaa

SEQ ID NO: 512837 - DNA, 832 bp, Homo sapiens
cttatacagggcccaatacgctcactgagtctcaattctcagattcaggtgatcctccccccccgccctcctgagtagctgggactacaggcgtgctgccaccacacctggctatttttttttaattattatttttttgtagagatggggtctcactttgttgcccagcctggtctcgaactcctggacttgagcaatcctcctgcctcggcctcccatagtgctgggattacaggtgtgagccaccgcactcagctgatttgcaaaaactttcttccatactgttgtttcactttctggatagtgtcctctgaagcacaaaagttaattttgatgaagtacagcaatttatctgtttttttcttttgttgcttatgcttttgctgtcacatttcagaagccatcacctaatccaagatcacagagatttacacctagtttctaataagcattttataatttcagctcttatgtgtagatctttgatccattgtgaattaagttttgtgtgtggtgtaagagcccacattcttttgcatgtggatatccagttgtcccagcaccatttgttgaaaacattatttttccccattgaattatcttcgcaccattattgataatcagttgaccaaaaatgtacaggcttatttctgggcacttgactctattccattgacctgtttaaccttatgccagtgccacagtgccttgatcagtgctgctttgttgtgagaagttttactttgttctgcttcaaggctgttttgactcttctgcatctcttgcatttccaaatgaattttaggatccactcatcagtttcttcaaaaaa

SEQ ID NO: 512838 - DNA, 322 bp, Homo sapiens
  misc_feature (168)..(168): n is a, c, g, or t
  misc_feature (259)..(259): n is a, c, g, or t
  misc_feature (261)..(261): n is a, c, g, or t
gctcgacctcttcggcaccaccgaccgcgacaagtacgagcgtgaactgctcaatgcccgcaaactggctgaagccttgttgcaggaaaagaccgccactgaagtcgcgctgcagcaggcccaagctgaactgagcagcgcctatgaaatcgcccagcgccgggcttnattgccgagcagatggtcgcgattgtcagccatgacctgaagaacccgcttaccgcgatcaagatggcctcggagttcctcgcccgtggcngncagccgccaaggagcgccaactcctggggcatatcggcctgtccaccgaacgggcgtcgac

SEQ ID NO: 512839 - DNA, 309 bp, Homo sapiens
  misc_feature (154)..(154): n is a, c, g, or t
  misc_feature (177)..(177): n is a, c, g, or t
tgctgtaacctctttcagcagtatgttgtggcacctggttcagtcaacgtgctgagtgggagggttccattataggcgaaatacacagtttacataatttcatgaagaaagatttcttacagttaagcagagtagtcaggatatcgtgtacatnatccatttgatgtagaagttganttttatgatgtttagaagctgtaacaattaggatggaagatgattctagaaaaattcatacattccagaaatactattgtaataaaagtataaaatttctataataaagaggaagtaatcccaaaaaaaaaa

SEQ ID NO: 512840 - DNA, 224 bp, Homo sapiens
taagttcatgtatggctaatcaagtacctgccatcagtcacttgtatgtcacacaacctcactgcttactagaaaatgctaaacactggaaacaatggaattaatacataggttttcttacattcggacagatattcttcagacagttaaaactgccttccacaaaatttggtgtgtatatggcacaaggtgacagccaaaaagtgtgatcgtatcttgcatgc

SEQ ID NO: 512841 - DNA, 117 bp, Homo sapiens
aagatggggacagatgtgaggagagctcagagcatggtcacccaccgccccaggctatatcagatagtcaccaccaccccgccatcagtggagattacccaggaaaacatgtgagca

SEQ ID NO: 512842 - DNA, 331 bp, Homo sapiens
attcactcacttccttaatgattgtaaaatacagtcccgatctgcaaggttgcttattgtttcaaatccagtgcatatcttgacctacgtggcttgagtaagataattggttttcccaatatccgtgttattgcaagtggttgctatctggattcagcccgattccgttaccttatgggggataggctggcgagttcacccttttagctgtcatggctgtgtcctttggtgaacatggagattccagtgtgcctgtatggagtggaatgaatgttgctggtgtctctctgaagactctgcacccagatttagggactgataaagataagga

SEQ ID NO: 512843 - DNA, 228 bp, Homo sapiens
ttttattttttccccccccccccttttttattgccccaatcctaccataaggttctgtttgcctttaaaattaaattcaaagccctttggaatttggggaccaaaaaattcctttcctttttaaaattttaaagcccgttttttgttcctaaaatttccttttttttttttttgggccccttttttttttgaatttaattaaaagggccattaaattttttttcttta

SEQ ID NO: 512844 - DNA, 344 bp, Homo sapiens
  misc_feature (31)..(31): n is a, c, g, or t
  misc_feature (46)..(46): n is a, c, g, or t
  misc_feature (63)..(63): n is a, c, g, or t
  misc_feature (70)..(70): n is a, c, g, or t
  misc_feature (158)..(158): n is a, c, g, or t
  misc_feature (193)..(193): n is a, c, g, or t
  misc_feature (215)..(215): n is a, c, g, or t
  misc_feature (217)..(217): n is a, c, g, or t
  misc_feature (266)..(266): n is a, c, g, or t
gaggtcaggcgttggagaccagcctggccantatggtgcagccccntctcttctaaaaatacnaaaattnagcccaggcgtggtggtgcacgcctgtaatcccagctactggggaggttgaggcaggagaattgcttgaacccggttgcagtgagctnagattgcaccattgcactccagcctgggtgacagngcaagagtctgtctcaaaaatngnataaaataaaaataatagaagaaaacataggtctttgtgaccttgggtnagaacacaacacttaaaagaacaaattcataagtagaactaaatcaaaattaaaaactgcttttcaaaagacacttta

SEQ ID NO: 512845 - DNA, 131 bp, Homo sapiens
  misc_feature (85)..(85): n is a, c, g, or t
ggtccatggtggcgggtagacaagggatgcctgggctgtctgggcagagtaagctctagctctgactgtcactcggctctccctnaccatttggctctggaagctgcttggcacccccaagatcagggcct

SEQ ID NO: 512846 - DNA, 365 bp, Homo sapiens
  misc_feature (2)..(2): n is a, c, g, or t
  misc_feature (172)..(172): n is a, c, g, or t
  misc_feature (255)..(255): n is a, c, g, or t
angtctgctacaaaggcactacacctttggcaaataggggtgagtgaaggcgtgcattcatgagccaagaccttctcacaggagtgaaactggcattttgctacgcagggcatatttcagggtaacacacaggcgactggaacataaacgataggtgtgtctattgcctctnaggtagcagcgattaaggacttctaagtgtgtcagcagaagcgatgcttagggccaccgagggcagctttactccctcattcnaaattatggatgttgcactcgccagtgatcatgcgatcgttcatgctataaaacaagtcaggcgtaagaaactgctctctaacaaaggatctcaaccttggcggatcctc

SEQ ID NO: 512847 - DNA, 1057 bp, Homo sapiens
gacgctggtgggccctcaacgcgtgcctggttgccaggcggtccggtgtgtgatcaaggagactgcgcacccgacacctgtgttcccgagactttctggcaccgcacctgcgcgctgcaggcgcgcttcgatgacgtgccagtgttccggatgcatttgctccatgccctcgcctgcctgcagggccccggtgtggccccggtgctgcgctgcgcgccagacccccgcgggtctgtctactccaactgcgagcggtccgccgtactatcgagcgcgtcctcagcgccgttggcctgcctatgccacggcccgcctctgccttgcctcgctagggccagacgcgtctatactacactgcccaggcactagcgcagataccccctagaggcactccggcattgaagccagcttgcgtactggttgctcgtggccagatacacctaggagcagagcccatagagacgcatcacgagggagtgcgtgcaggcctaggtgccagctgtgcgggggaataccgaacatgctagaccttcctggcggcaaatgcgggtggactggcccggatgcgctcggagagagcttacctaaccaaaagcctgaggagccaacgcccctctgaagaaacattaccatctgcttacatgacggggagggacaacttgtacccctgggcaataccataagggcaagcacctggtgacatgaaagggacggctgcgtggaaagacaccaggggccggcacaagaatggtcttatggaccccgaaaacctggaacaaacctgatctgagtggaactgagaggacatcaaccctacaactgttggctgggcatgaaccatgcaaaagaattggacttccttaattggacaattagggaacccaggagggaacaaaggcaaaacaccaaagtagccacatgagttaaaggagaagaccaccaagggcccaatagtaagaggtacaatacaaaagacagacaaggaaataaggtggaagcattacccagaaggagaaatataataggtaccgacgcacataaaaggcatagaaggagc

SEQ ID NO: 512848 - DNA, 838 bp, Homo sapiens
gtgagtgagtgaagatctggcaagagctacttaaggttactatcaccaataacatggttctgtggcacgaatgtgtgctgtgaatgagaaaataaacagagtcgtctttgttggaaactttcttacgtgtcaataccctctcaatgagactttggcatatgcactggattactggtcaaaaggtcaactaaagagcatagtttctagaacatgagggttactttggagcagttggtgcacttcttgggctgccaaaatttcacgctaaagcatcaggtctctctctctgctaataaatgtcatccaagaggaactacagaaccagaggcattattactgcatagtctgtcactgggaaccaaaggataacagagtagcataagctgctgaatgtcgccatattcaacaggacgagcacactccggttatcgcgacgtatttctcattgaaatgctatcccttcttgtatatagccagtgttacagccttaactggcagacggctctgatgattgagctcctcttaaaagatcttacttaaatgtaggccaactgcaagaaccggttgcttcaaaccgacatcctaacggattggaactgtacgctcatgaaaacaaccgggccgacaattggaccacgccgacacgggcgggagcccaggtaacagacaaagctcctggatccaccactgacgggggaaaagactacggggccacaaggcggcacacagctgggatacccaacgcatcaggacacaccgtcaacagagaaagcgaacacacacagaaccaccgaccgaccaaacacggtgcccgtctcttctcccatcatgcacggga

SEQ ID NO: 512849 - DNA, 620 bp, Homo sapiens
gtgcctggaggggactcgccgccatctcaggtctcttggctttgccaggcccaccggagaaaactgacgacccgtttctgtaatccttatgggagaccaaccttgtgcctccgggagatccattcttcccacctggaaacggcacggggaagccaagcttccaaaaaagcgctgcctcctcgctccggcgtggggattatccggaaggaactcccaagcggagggtagtaccattcttacccttcggaaccttcctccgttgcatcaaggcggggccttgaaagttcggcaaccccttccctcctccgggagaacgtagagacaataaatttctcccaccctaaaccagtctttgagttgattggcaagtatgactccatttccctgtgtgcattcatataaatagttcacctgctgaaacccaattgaaagcattatttaccaagtgttaccctgcttttacgtggtgtcctgaacctggaagtggtggctttaacgtcttatgatgtactcagcacgaatttcatttcctgaaattcgatgaattctaagactatggcaacgatcgggttgtaagacctctgagatttaaggcaatgtctggatcatggtgaacttac

SEQ ID NO: 512850 - DNA, 823 bp, Homo sapiens
gggccggccgagggcgcgcctctgctctggctggactgccgcggagcgaggcgagaaggaatccgatcgctggggggcttgctcgggcggcagcgactgctgctgccggatgggagcgggccggctcggcgcgcccatggtgcgccactggtaaggtcgttccgcgcgaacctctcgtgctctgtctggcatgggggatgcaggctggcctgggtggagcccctgaagggcggtcggcagtgagccacgtgcggcgccgtggcgacgcagcgcgtcggtggcccgcggtcggggcctcgggtgtgggcacgaggcgggagtcgactgagggctcttgacagcgagaccccatgctcgagtctccctgccagcgcgtcgataacgcctgaggaaatagtgcggccgtttatttccactggtgtgggactgagtactcggtgtggacacctcctggtcgaggctggtgataatttgtgaagcctcatggatcatttccagtgctgaataaagactgagggacagaacgtggaaagtcttaagagcattcggaagttaaccttgacctccaatgttggcatttatggggtctagcaaggctatccggggagctttgcaaccctcgaggcgtgaaaggacctagactctgtgtgggatcgcaaatggcaagcttgcacttttatacgctttcccacttcatgacatgccttgctttttattcaaaatggggcagagataaaaacttctcgagtctcccacactgtcttttggtggcccttgggaggtggaagcgtaccaaattttgacgcaggattttcttcacgat

SEQ ID NO: 512851 - DNA, 491 bp, Homo sapiens
  misc_feature (263)..(263): n is a, c, g, or t
  misc_feature (367)..(367): n is a, c, g, or t
  misc_feature (383)..(383): n is a, c, g, or t
  misc_feature (405)..(405): n is a, c, g, or t
ctctgctcatcacatgaagctgggattggcacgaggaacaaacagcagatgccctgccttccagtccaagaaactgcttcttgaaatggatttaacaacagccacttaccttttcctcctgagcctgctctctgatcagctggatccccacgttgagcaacagcgtggcccagtgaaaggctgcctgcagcaggacaggtgtgttggcgcgtgttgacgagccttgacagtgactacctcgtatcttagaaatctgagtacangagcctgacggctttgtgctttatgtctttttttagatgacgggctcactccacgcttcatatggctgccaacgacgttgactgcttctgacggttggtctaancatctctggatctttnagagccaccagtatctctctgngcccatacaaatatcagagcagacggaaatttctccctgcaagcgctcagtctcatcccagcaagtcaaagacctcctggccaagt

SEQ ID NO: 512852 - DNA, 330 bp, Homo sapiens
tgacagagctagtattcagaaactaatctaatattgacaaacttctattacagaaataccgacatacaaccaccaaatgtatactatgcagcaaatgaaaggaatcatgtctagagatactcaaacacaagacatgagcacatcatgtacaaattcattgtacacttacaaaataagtttcacaatttctgcaaaccctcacatatacaaactcagaatcctctttatttatgagacagggtctggctctgtcaaccagactggagtacagtggcacaatctcagcccactgcacacctccgtctcctgggctcagtcaaacggcactgg

SEQ ID NO: 512853 - DNA, 308 bp, Homo sapiens
  misc_feature (272)..(272): n is a, c, g, or t
gctcattgtacccattctaatcgcaatgggcattcctaattgcttacccgacggaaaattctagggttatattcaacttccgcaagggcccccacggttgtaaggcccccagcggctaatcacacaccccttgggtgtgagggcacataaaactctttcacacccagggggcccctctaaaaacccgcacacatatccctttcacctctctcaaataagcgtccccgggcccgtgtctctccactatgtctcttactactagagcgcgcccnctccaaataccccaccccgcggcaaaatccaaatca

SEQ ID NO: 512854 - DNA, 113 bp, Homo sapiens
tacagcaaactaaggccccgagctcagggcagctgtgctcggtgagctcttccaggagccaccttgcccacccattcttcccgttcttaactttgaaccggcggtgcggcgtg

SEQ ID NO: 512855 - DNA, 494 bp, Homo sapiens
  misc_feature (269)..(269): n is a, c, g, or t
aacacagggctattatttagctttgaggtgaagttatgaggaccacattaaattatgttgtgaaagcactgctggaacactgcatggcacctgacatacattaaacttcaagattactaaccacgggtctgatttctcaacatcagcaactgctacaaaggacaggagatggacctttggatagttcagacactaagagaaaagactggcacaaggacagccagccccaagaagctggctagagaggagtgtgatttggtaaggacatncagctcctgctccaaaactaatgtttctgggaagccacttaatggtctcaaagtgcccccaacagtggctctgggaggaggtgcaggagacaccagacacacgggcctgatgctctttcagagggcacctcacactaccccctcctgtaggcatttccctggctcttccctggcacaggagagcccaaggatctaacagctaggaagcaggcctaaatcaaagaa

SEQ ID NO: 512856 - DNA, 393 bp, Homo sapiens
agaggccccagaggcatgcagctggccagatccaggagatgattggcagcgtagaggagcagctaggccagctcgctgcgagatggagcacgcagaaccaggagtaccagatcgtgctggacgtgaagacgcggctggagcaggagatcgccacctaccgtcgtctgatgaagggggaggacgcccacttttcctcctcccagttctcctctggatcgaagtcatccagagatgttgacctcctccagccgccaaatccggaaccaaggtcatggatgtgcacgatggcaaggttggtgtccacccaggatcaggtccttcgcaaccaagaactgaggctgcccagcccggctacaggcttaggaggcccccccgtgtggacacagattccca

SEQ ID NO: 512857 - DNA, 929 bp, Homo sapiens
gaggtcaggagttcaagacgagcttggccaatgtggtgaaaccccatctctacaaaaatacaaaaattagctgggcatgatggcagtgcctgtaatcccagctactcaggaggctgaggtgggataattgcttgaacctgagaggtgggggttgcgggagctgagattgtgccatgcactccagcctgggtgacagagcaagactccgtctcaaaaaaaaaaaaaaaaaaaaaagccaaaaagcaaggggggcccctcttcccggccagggggggcggcaaaaaggtggggggccggaaatgtgggaaagaggggctccctctccctataaaaccgcaacgcatagtgggggcccgcgggaactcaccgagaacttctccaagctcctcacagaacaccttgatggacaacaactaagtggtgttagcgccgcagattatagatagataattattctgttattataacggcctgtggagccaataacttacagaagacagtcggggctagagggcggcacataagacaatatttccccccctcgaaaagctctaaagcaggaaatgtaccaaaaaactccaacgaggggttccccatctccaggaggtacaagggggccacaaattatcaaggggcacaaccagagggataaccaggtagggggcccaaggaagaacaaatataagatatagcgcacgagggtccagtgtcaccccaaacataaaggcggcaggggggaggagaacacataaggcccagtgggacagcctcaagacctgggggccaaaggtaaaccaccggggcccaaaccccctgggagttgctgggaaccggggggtgcattcacgcatatccgatggcagagttcaagcattaggacaaaggggagccgcgtatatggtcacgatgggctgaaccagtgtctaggc

SEQ ID NO: 512858 - DNA, 313 bp, Homo sapiens
aacacgcacgccctaaccgggcccccaacctgatagttttccaaagccttagatataaataccccgtgggcggctaagcaaacccttcagggagccatttgctggctgtgaagaaaatgcagcctcagcagggcccccagcctttcccccagtccgagcttggctgcctgtcggaatccctgggggagcggttaaaagatacagatgctgctccccagccccgtcaactcaacccaaatttttgcaagaccccaagggccctcagcatttttataaagctttttttctgatttgaatgtataataatggttta

SEQ ID NO: 512859 - DNA, 518 bp, Homo sapiens
  misc_feature (498)..(498): n is a, c, g, or t
gttagaggatcccctcttaaccaccatgaagctggaaatgctccacacaaatgcattagtttagaaaaaagcactccaaacatacccaaatgtcatgctcaacgcatgccaacctgccacatctggcacgttttaatgagtcctgggtacagccctcttgaaatattccgcctgattggcccaatcacctaccgactcgacctggcccaatgtcttgacctttctcaggttgtatcacacatatcccagcacaccccagtcatacgcgcattgaacctctgattccacatgacattcatccatgccccctcagggttgattgattcacctacccatacaacacactgttgataatgtctacgaaatacagcacacacccacacactcagcgcgccttacgccgcgcacgcgggtgcgcgaattaataaacctgtggaagggtactgaaaatccaattgagtgtagatctgggccggcgtgatgtccggatgacctaanatctcctgcacaccacgcaa

SEQ ID NO: 512860 - DNA, 664 bp, Homo sapiens
  misc_feature (1)..(1): n is a, c, g, or t
  misc_feature (135)..(136): n is a, c, g, or t
  misc_feature (141)..(142): n is a, c, g, or t
  misc_feature (196)..(197): n is a, c, g, or t
  misc_feature (209)..(209): n is a, c, g, or t
  misc_feature (221)..(221): n is a, c, g, or t
  misc_feature (225)..(225): n is a, c, g, or t
  misc_feature (250)..(250): n is a, c, g, or t
  misc_feature (281)..(281): n is a, c, g, or t
  misc_feature (287)..(287): n is a, c, g, or t
  misc_feature (290)..(290): n is a, c, g, or t
  misc_feature (294)..(294): n is a, c, g, or t
  misc_feature (296)..(296): n is a, c, g, or t
  misc_feature (303)..(303): n is a, c, g, or t
  misc_feature (307)..(307): n is a, c, g, or t
  misc_feature (311)..(311): n is a, c, g, or t
  misc_feature (318)..(319): n is a, c, g, or t
  misc_feature (324)..(324): n is a, c, g, or t
  misc_feature (326)..(326): n is a, c, g, or t
  misc_feature (332)..(333): n is a, c, g, or t
  misc_feature (342)..(343): n is a, c, g, or t
  misc_feature (346)..(346): n is a, c, g, or t
  misc_feature (348)..(348): n is a, c, g, or t
  misc_feature (350)..(350): n is a, c, g, or t
  misc_feature (352)..(352): n is a, c, g, or t
  misc_feature (360)..(360): n is a, c, g, or t
  misc_feature (369)..(370): n is a, c, g, or t
  misc_feature (377)..(377): n is a, c, g, or t
  misc_feature (383)..(383): n is a, c, g, or t
  misc_feature (385)..(386): n is a, c, g, or t
  misc_feature (390)..(391): n is a, c, g, or t
  misc_feature (395)..(396): n is a, c, g, or t
  misc_feature (398)..(400): n is a, c, g, or t
  misc_feature (405)..(405): n is a, c, g, or t
  misc_feature (407)..(408): n is a, c, g, or t
  misc_feature (410)..(411): n is a, c, g, or t
  misc_feature (417)..(417): n is a, c, g, or t
  misc_feature (429)..(429): n is a, c, g, or t
  misc_feature (434)..(434): n is a, c, g, or t
  misc_feature (442)..(443): n is a, c, g, or t
  misc_feature (451)..(452): n is a, c, g, or t
  misc_feature (454)..(454): n is a, c, g, or t
  misc_feature (458)..(458): n is a, c, g, or t
  misc_feature (464)..(464): n is a, c, g, or t
  misc_feature (467)..(467): n is a, c, g, or t
  misc_feature (472)..(473): n is a, c, g, or t
  misc_feature (475)..(476): n is a, c, g, or t
  misc_feature (480)..(480): n is a, c, g, or t
  misc_feature (482)..(482): n is a, c, g, or t
  misc_feature (485)..(485): n is a, c, g, or t
  misc_feature (489)..(489): n is a, c, g, or t
  misc_feature (496)..(496): n is a, c, g, or t
  misc_feature (507)..(507): n is a, c, g, or t
  misc_feature (510)..(510): n is a, c, g, or t
  misc_feature (513)..(515): n is a, c, g, or t
  misc_feature (517)..(517): n is a, c, g, or t
  misc_feature (522)..(522): n is a, c, g, or t
  misc_feature (525)..(525): n is a, c, g, or t
  misc_feature (533)..(534): n is a, c, g, or t
  misc_feature (537)..(537): n is a, c, g, or t
  misc_feature (539)..(539): n is a, c, g, or t
  misc_feature (556)..(556): n is a, c, g, or t
  misc_feature (661)..(661): n is a, c, g, or t
ntacacagctttaaaaacatcataaattaaaacatggagtcttatttatagtgtccccccgtatagagctttacggtttataaaaaacaaatgattgcagaattaagcttaaaaaaaaaaaaaaaaaaaaaaaannggatnngcttttgtcaatacagaataaatatatcccccaaatacttgggaggtacaactnnaaccaacacccngcacttgcagancccnctaccaatttcaatatttgcaaggncggtgattttgtttgtttaaaaatctgcagnaattgnaantccncnaaaaaangccngagnaaaaagnnccacncngggacnngtatcagannacncncngnagcagaanccaaccgcnncaggaanacaagncnncaanncaanncnnncacanannannaacaancagcccacaaancccgngcaggcgnngccccggnngncggnggcagnggncaccnncnnaccncnccncgcncaccacnccgcccaaacngcntcnnngncaccncgnacaccagnngcncnccgcacaaccacaacancccccaccaccgccgctacgtccaccccacccggcgccaccaccccagccgcccccgccagcccaagaaagcaggccgcccggcgcagccagtccacaaaggtanccc

SEQ ID NO: 512861 - DNA, 567 bp, Homo sapiens
  misc_feature (394)..(394): n is a, c, g, or t
  misc_feature (512)..(512): n is a, c, g, or t
cttattattattggctaagcagcctaataaggggggggggtagggtagtaaaaggtgaaagggttttcatggcagtttcttggtaaatctcttccaggtcaatttaaccaatcgcaattacatttaaaaattgggttctatcttttttgctggtctcaggcataggtccttgggcactaggagaaaggtatctaataaggtcccatagcaggcaaataatttaaggctggtagggtttttaatggtgagaagattccgctcggcttaagaccattctttaaaatgggatttgaggtgggacctgggaaattctggattggcaggtcgttaaaattggatgtcaggacccatttaaggggggtgaggattttggacacactggatgggggagggncaatattttttaaaaaacaaattaaagggtataattcagagagttactacggctaaaaggctaggtgaagtgtcacccatttaaggtagaacgaggtgtccctagggatcatcctggntccagaataattgatctgaagccctttataaccataattaaacggcggagactac

SEQ ID NO: 512862 - DNA, 206 bp, Homo sapiens
ccgtcagagccttcgagtacaacctgacactaaatgatcagcacagcacttatactagttaccattttaatcctaggctgatttatgaatgagcctaaaaaggattagactgtgttgaattgtaaatagtttaagtcaaaataaatgattttgactcattagattatggtagaccatatttaccaaatccctgcgattagggttag

SEQ ID NO: 512863 - DNA, 94 bp, Homo sapiens
tcgacccacgcgtccggagctgtcttagctcaaatctgttgtgtttctgagtctagggtctgtacacttgtttataataaatgcaatcgtttgg

SEQ ID NO: 512864 - DNA, 164 bp, Homo sapiens
ctagaggatcacccctgacactgctgcctccctcccagcattggtcaggaaggtaaccctgaagcagggggtggcgtggtagcaggggcttgcccagtgtcagcttatctcttggaaactcccattttgggtcctctggaagttcatactcggagacccctgcc

SEQ ID NO: 512865 - DNA, 1755 bp, Homo sapiens
  misc_feature (453)..(453): n is a, c, g, or t
  misc_feature (775)..(775): n is a, c, g, or t
  misc_feature (779)..(779): n is a, c, g, or t
tttctgtgttgtattgatctatctgcttctttcctgcattacggaagcacgctgctgttgtcttgctgctcgcaggtcgtcgttcgatctccctgccggctcgtagcattgtagtccatccccctctgtgtatgtgtggtttgcatgtgcagtcgtggttctggtgcgtgttacttgcggtcatagctatctgatgtgctgctgctcgctgattgaccactggctggaatgtccctgctaccacgctatctactcgatgctggcgtttcgtgtacgtgcgacctgcagctgtgttctgactatgtcgggtgtagtgggctgctcgctgttggatctgccccgcgtctactttgtaggatggtcgtgctgtactccgtgctagctgcgctacgcatgcatgtctgtctccgtacgacagcagcagacgtgcgggagggagggtattctaataanaaccggacaggtcgtctctgtttctggggtggcaaccgccccgcccgcttcgttcgctctccgggtgtggcgccgcccctcccctccgcccccgcctgggtgttggttgccccgcccccctcatagtatgatgcgcccccccctgggggctgcgtgatttactctagacgctctctcgccgagatggttgtttgtgcgtactttagtggagctgccccgctggggccggggtagtgttaacaactcattgtcgtttctccaccaaccacgtgagatcaagacgcctgttgttggttccccccctttatgtgggcgcgccctntatntgtgggggggggtcgtccgcctctctgttgtggtgcgccacacaattgttgggttctgcccaccacaaagatgtaccgcgcgctgggggttgtttccctcctctgctctccgcgcggtatttttttctcccgccgcgcggtatattttttctgtgtggcccccactcccgcgcggtttgcgcgcctctgtttttacagttgtttgtcgtgtcgtcgcgccgcggtggataatatatgatatagatgggtcgagtatgcggggatttttttgtgcgcctacaagaagagatttgtggtttctctagagaggggtgtacacgctctcgcgagatatatagaagagggcggaatatctcgcgcgtggagtggagacagcgctctctctctctctgtgtggggggcgcaacatatacacacgctctcgctctctgcatctatatatatccttcggcgcgcgctgctaatatatatcaactctttttttcgccccgacacacacacacttatttcgcgcgcctctcttctcgcgcgagagagcacccgcgcgcgctgtttcttcgcgcggttccccccgcgcggagcactcacaccccccctcgtcggtatcactctctctctctttcttctgtgtggggggcctcttctcctcttttttcttcaccagcccgcgcgtatatatattaaagaatattgttctcggtgagattgtgagagaagacctctctctctctctctgtggagagcgcggaaaatgatcttctcataaatgtagagagagagacacacctcccctctcacacccgcggggggaacaaaagagagagcccccccccccccccccccactcgcggagaaccccgtagaacacacacaaaatatttagggacccaaaaagagagaagagagaaacaggcacccccccccaaagacgggttgccaaccaaaccccccgggcccccacgggttttttccccca

SEQ ID NO: 512866 - DNA, 1016 bp, Homo sapiens
  misc_feature (15)..(15): n is a, c, g, or t
  misc_feature (98)..(98): n is a, c, g, or t
  misc_feature (100)..(100): n is a, c, g, or t
  misc_feature (102)..(102): n is a, c, g, or t
  misc_feature (111)..(113): n is a, c, g, or t
  misc_feature (115)..(115): n is a, c, g, or t
  misc_feature (122)..(122): n is a, c, g, or t
  misc_feature (124)..(126): n is a, c, g, or t
  misc_feature (519)..(519): n is a, c, g, or t
  misc_feature (525)..(526): n is a, c, g, or t
  misc_feature (591)..(591): n is a, c, g, or t
  misc_feature (614)..(614): n is a, c, g, or t
  misc_feature (628)..(628): n is a, c, g, or t
  misc_feature (640)..(640): n is a, c, g, or t
  misc_feature (646)..(646): n is a, c, g, or t
  misc_feature (653)..(653): n is a, c, g, or t
  misc_feature (661)..(661): n is a, c, g, or t
  misc_feature (689)..(689): n is a, c, g, or t
  misc_feature (710)..(710): n is a, c, g, or t
  misc_feature (741)..(741): n is a, c, g, or t
  misc_feature (750)..(750): n is a, c, g, or t
  misc_feature (818)..(818): n is a, c, g, or t
  misc_feature (840)..(840): n is a, c, g, or t
  misc_feature (906)..(906): n is a, c, g, or t
  misc_feature (908)..(908): n is a, c, g, or t
  misc_feature (944)..(944): n is a, c, g, or t
  misc_feature (994)..(994): n is a, c, g, or t
tttatttggagcagngctaattcacaatttcatggaacttgcctgacacccccacccccttgtattaaaaaatgattatttatatgatgatttcaganananctgcatctnnnangtttggnannngggagacctacatctgctgctcttggggagcgtgggggtgggagaggagtgctggagggggctccagggctgggcccggttgtgggggaacaggggcccctaggctggaagggagaaggcagttctcgggagtgcttctgcgtgtgtgatatgcctctgcacacatgtcttgtgcatgtgggagtgtcacatgctgcacgaggctcacctgtctgcccatctgtgctgtgggtttggttttgtgtacacttccaagtgattcacatgtgggcacatgagtgtgtgcaggcagatgtgtgggcacacattcaagactgtgcacaagtgtgtgtgtgaatatagtgtgcgttaaagggtgatgtgagccggcctgactaggtgtaaaagaagcanatagannttatgatggggcggggggttaatctgtctcccccagcgccacgaggggcaaaatcttgggagtgngttgtatgcccagtgccccatgngaaagtgtactccnaagatccgtgcntgggangaggggnatcaaagngtgcggggttcaatggcccactccctgngcactagttcctagggccccnactggggttgtcccacagtgcctaagcctcnactttgcangccccgcctacaccctgcaaaagctggcagggaacttccagagaccttgggcccctccagccatcaancactgaccctcggggtctattnatcccctctccttttcctccccctctgttcccctcgctggccctctcccccagtggaaggcaagtntncagatccccacaccatgttcctctgaaattaaaaanatttgttagctctggacagcaggaagagtaaaaaaggaaagtaggggggnttcctctgagcagatcgccagc

SEQ ID NO: 512867 - DNA, 818 bp, Homo sapiens
attgacttctaaagactcttggtatgtgaggaagaaagctggaagaggaagaggaaagcacaggagtcaggatggctcttcctcagggtctattgacattcagggatgtggccatagaattctctcaggaggagtggaaatgcctggaccctgtttcagaggactctatacagggacgtgatgctggagcaattcatagtgaaccctggtctcccgtggacgttgtcacggggcatgtgtccattggcagtacctgcctacctgagtgtactcccaggccatcgaccgatcagtgcccagggagctcgaggtgtggcatgagcttagagggaacgcccccaagcacgctgggtcctgtgtgtgtcctcagctggctcctccctggtcggatatcattgttctcatgtcacgtgaccggcaagtggagcaatctaaaaattaccagggaatgacagaaatgactctgggactactgttctgactgctgagtcaccgagggcaccagagagtcgcctgacgcggacactgctgtcccttccctgatgtgatctgcctggggctcatgctctggggcagcagctccagtcgttatgcatcctgcgacaggcacaaagcggcgggtccagcaccattcataggaccagcgtgtccccaatcctcccctggaagtccggagctaccaaaacatcctcttggagcaggaaacggacaaggaggtccccgaagtctgacacttgcagattcatggggtttgagctgacaggcggccaaaaaggctgctgatgggatctccaatctgtcaggccagggtggaaatg

SEQ ID NO: 512868 - DNA, 126 bp, Homo sapiens
taggtgaatcatctcccacactggttgttccatacggaaacatttagtaggaaaagaagcactacgcactataagcttcagaagaacccagagttttttcccttcaggaccatggagtaatatgca

SEQ ID NO: 512869 - DNA, 95 bp, Homo sapiens
ggatttgctggtgcagtacaactaggcttaatagggacatgcatgaaaaactttcttcaccctctcgtaaaagaacaattgcagaatctaagaaa

SEQ ID NO: 512870 - DNA, 1014 bp, Homo sapiens
  misc_feature (108)..(108): n is a, c, g, or t
  misc_feature (110)..(110): n is a, c, g, or t
  misc_feature (213)..(213): n is a, c, g, or t
  misc_feature (434)..(434): n is a, c, g, or t
  misc_feature (483)..(483): n is a, c, g, or t
  misc_feature (848)..(849): n is a, c, g, or t
  misc_feature (912)..(912): n is a, c, g, or t
  misc_feature (915)..(915): n is a, c, g, or t
  misc_feature (917)..(917): n is a, c, g, or t
  misc_feature (936)..(936): n is a, c, g, or t
cgggtgagacgagggaatacaataggtggcatctagcggaaaacgcaggaatcaagaaactccgtaggattcctcccatagtcgaactgggatgcgactatggagagncncgtaacagaagcgaaagcctatggcaacacgtcagccagagcggccggtttggcggagctggaccatcggtgggcatattagacacaagaacactcttgggtnaatgagcgtaattatgggaatagacagtatatgacctttggaggaggttgatacagttaacggcagtagctacgatcggaggtataaggaggcagttaagtaaggatccttgaatcagccctcacgtaaagggaaagggaccgcagaagctcccgcgcgtgtaggccaaacgggggccagtttaattaattttgagggaggcggcatgcggcatggacagnattgatatccagggttcagttatttaggttacacggtctctcgtctttnatgagctggtgcagcagaagttcgtattgtagttacagggtccgttaaagagaaggaggtacggaagttgtccggctgccgtaggattatttctatatacagccgaaagagagccgcgcattgagtaaatttctggtcgccgccatcgagccaataagatgggcagaaccactatagctaacctgaatggaagctatttgtaacatgcgctggataattctgttatctatactgttgtggcgatcgggactattatatatgctctctcggaatcttttatgaattgagagctatgactctctctcttgaagtctgtgagcatcacataaggattgatccgtcattgaatgattcattcatagcgnnctgtcttcgttgagtggtcttcacaaatctcagcagattgatgatggcggcaggtgttatccnggnangcgactagcagccccgatncgtctgtgtgacgactaacaatgtagtttctctcgacacttcatgtggacaaagcacacatccctgtatagtcacaat

SEQ ID NO: 512871 - DNA, 291 bp, Homo sapiens
gcctgatccgcgtagcacgaggtcaggagttcgagaccggcctggccaacatagtgaaaccccgtctttactaaaaatacaaaaaaattagccaggtgtggtggtgggtgcctgtagtcccagctacttgggaggctgaggcaggagaatctcgaacccaggaggcggaggttacagtcagctgagaccgcaccattgcactccagcctgggtgacagagcaagattccgtctcaaaaaaaaaccaagaagaaaaggagtgaattagaacttcttctgcttggacttaagc

SEQ ID NO: 512872 - DNA, 319 bp, Homo sapiens
  misc_feature (43)..(43): n is a, c, g, or t
  misc_feature (99)..(99): n is a, c, g, or t
  misc_feature (108)..(108): n is a, c, g, or t
  misc_feature (255)..(255): n is a, c, g, or t
cgagagggggaattgattatttcttttctgagacccttatatnaagagaaacagaaagaacacatccatattggggagatgaagcagacatcgcagatngcagcaganaatattggaagtgaattaccacccagggccactcgatttaggctagatatgctgaaaaacaaagcaaagagatctttaacagagtctttagaaagtattttgtcccggggtaataaagccagaggtctgcaggaacactccatcagngtggatctggatagcttcctgtctaggacattaaagaacaccagcaaagagccatctgtgtgtg

SEQ ID NO: 512873 - DNA, 359 bp, Homo sapiens
  misc_feature (1)..(1): n is a, c, g, or t
ncatatgtaatttgtgctgaatttgaaatgacagctaggcatttcaggcagtgtccagtaagaggatataaacttggaactaactcttgaactgagtctaaattttagagtcatcctgcttataaggctatagttggggctatgaaaatggccaagccctcttaaagaatgtgtaaatagaagactatgactccaaggactgagccctggggacagcttgcgatgaagggttggaaagaggcttgtggagggaattataggtaacaggaggagtggttgggagttacaagaagatttacaggagtttagttgtggaagccaaggaaagggaaattttagttgtgagagtcaagaaaaga

SEQ ID NO: 512874 - DNA, 327 bp, Homo sapiens
cagataattagcaggatcctggaagtaaatagcatggggttctccctgtcatataccatattcagagcaagtgaaagatacatgggagtcacaatcaaaagaggattcagaagctggaatgccatccgctgcattccttgtactagacagtgaccttctgcagtcctcctctgaagaagacctcccatggtctgcactagcagatacttgggtaactagggcgaggtgtgtagagcctctccacttcttcaatagaaagtccgagtggaggagaagattccagtggaatctgcccaatcggctgctttaggcgcatccctggtctag

SEQ ID NO: 512875 - DNA, 138 bp, Homo sapiens
tgcagttacagacagagtgtttccaaactactctatgaaaagaaagcttaaactccttgagttgaacgcacacatcacaaagtagtttctgagaatgattctgtctagtttttatacgaagatgtttccttttctaca

SEQ ID NO: 512876 - DNA, 443 bp, Homo sapiens
gcacgaggattttattaattagaggttaaatgttctttgactattgtattataatatagttttaactgaggaattacaatgaagatactaaaaggaagcttaaggtttctggtattaactaggttctgttaaatgattttacttgttttagaatatatagaaatatactgagttagaatgagtggcgtattttctaaataattcaaataaaatgggagagagaggaggagattggaaggaatgaaattttcctgttcaagctgtaaacactaaaacctttaattttgtaggaagacattatatactctggtcattcaacttgtgtatccttagtctatttagtagtcaaaaacttctaagtaaatatgtgtgatttaatttgtgctgctgagaaacagtgatcaaaaatggcaataaaagtcacataacgaaataagaatact

SEQ ID NO: 512877 - DNA, 111 bp, Homo sapiens
gggaatgctgcctagggtatggccactgtggaggtacaactaaaggctttctcctcattaactctaagacttgtactggttttgctgtcaatagcaatgaatttgtaattt

SEQ ID NO: 512878 - DNA, 341 bp, Homo sapiens
gtaattttgtgtttggggtgtgggggtggtgaaagggaagtagaaccgaaacaagattagtcctgagttaacaatggctgcaagctggatacatggaattcagcagcacttttctccctcgtactgattatgctgtggaaatgtgcgcttgtaaaacatgtagaaaacaaagacggaaaaaaatgtgattggtttctgtcttcaagatggcattagaattgttgcactggaggaggattgtcccttgcttctgcataaagtgttaactccataacttataagctcactctttattgttactttgtaattgacaaatggaaattggatattggaaaaaaaaa

SEQ ID NO: 512879 - DNA, 328 bp, Homo sapiens
  misc_feature (252)..(252): n is a, c, g, or t
  misc_feature (296)..(296): n is a, c, g, or t
gaggataaggtggcgtgaaaggcagccggaaagagcgaaagaaagaagtggtggaggaggaggagaacggggctgaggaggaagaagaagaaactgccgaggatggagaggaggaagatgaaggggaagaagaagatgaggaagaagaagaagaggatgatgaagggcccgcgctgaagagagctgccgaagaggaggatgaagcggatcccaaacggcagaagacagaaaatggggcatcggcgtgacccntgccaacaggctggggttgggaggcctctctgggctgggaggtnggggttggggcagccaagtccagccactcttc

SEQ ID NO: 512880 - DNA, 464 bp, Homo sapiens
caggatcatttgtacctcaaacctcagcatcatactataaacccagataacaaacttgcacatgtacccctgagtttaaaataaaagaggccaggtaccatggctcacgcctgaaatcccaacactttgggaggctgagacgggcagagagcccaagagttcaagaccaacatggtgaaaccctgtctctgcaatagccaggcatagtagcatgcatctcaggagggtaaggtgagaagattgtttgagcccgggaggcggaggttacagtgagccaagatctcgccactgcactccagcctgggcagcagaccaagactgtgtctgaaaaataaggctaggtgcggtggctcacgcctgtaatcgcaacactttgggaggccggggcaggtggatcgcctgaggtcaggagtacgagaccagcctggccaacatggtgaaaccccatctctactaaaaatatc

SEQ ID NO: 512881 - DNA, 329 bp, Homo sapiens
aggggccctcccaaaagtaaatgggccttcctgttgctccagggttgccgatgcccttttggccagcaaaggggcctacctgctcatggagttagccaaaagccaggacaagactctcaagatttatgaaggtgcctaccatgttctccccaaggagcttcctgaagtcaccaactccgttttccatgaaataaacatgtgggtttctcaaaggacagccccggcaggaattgggtcccccccctgaatgcattggccggtgcccggctcatggtttgggggatgcaggcaggggaagggcaaaaatggcttttcagatatggcttgca

SEQ ID NO: 512882 - DNA, 587 bp, Homo sapiens
gaaaagcaaaattcatgctccctccagaatcagagtctacacatgccttcgtaatttagtactcacaaaataaaaaacctgaggctcaagtcactattttatatagataaatggagagttgactgtaatcatgtaatgactttagtctctttaacatgaaaaaattcacaagaaagcatataataaaaagattaaaaagcactgccatgacatctaaaagcatttatttaatgcaaaacaacttaaatatgattatgtgtacacataaagtgcacaccattacctatgctgaacaatgccaataaacataatatattgatgcaacagtttactaaaataaacataaacacatgagcccagaccatcagacaaaagcaaaacatttatttccaaatagcacaatgctgaaaatggatagcaatcctaaaacacctccaactttccttaaaagctagccaaagtccaactattaggaaaaaattgatttcacttacattaataacaatctggtgccaaacataataaaaccaaagtgctggacagactttactccttataaattccaaatataccaacatactcacagg

SEQ ID NO: 512883 - DNA, 412 bp, Homo sapiens
tactacgccatccaccctccactgacctgccaggatactcctgatcttgtgtactctctgtctattcctgacaccccttaaactataggtgactgccagacttccaaacttggaccctgatcatcaggtacttggataggtctcataccatataacagggtaatgcagctagcctctcaagaagaggatccaatcctgaccccagcccggttgcctgctagattccacaacaccagacaaacccaaccatcctctctccattactagttcctgttctatctctcggtaaatggcatcgccaaccatccagtccccttccctgcagccaaagagatacatggactatctccctctaaccattatcctctctccctatacaccccagatgataatcagtcagcgactttgatgt

SEQ ID NO: 512884 - DNA, 252 bp, Homo sapiens
gtatcccctagcggtatgaggtggtatttggtcgtggactgatccggctacgctatctctggtcccactacaatgactgtatttgaagattagagtaccagttctcgagtctcttctacaaagagcgaactgagacaccccaaacctaaaaatgccaagggtcacctgtcccccgagacagatactttttcattgggcagtggtgatcgtgctgaccatctggaaaggcctttggctgtggatgcatcataa

SEQ ID NO: 512885 - DNA, 438 bp, Homo sapiens
ttgtccatttgcatgtcagcttctgaaactttttgctgttgtctctcacattcttccgtggatttgtgtctttaaaaaacaaaaaggtggaaatgtatgcccttagcctgcagtcaccccactttcttggaagacatcattctccttctctgcctctgccagagcatggggctaggtttttacttgatcagcatcataaggatttgttgtatacttaaaatgcatttgtgtaatcattggttccgacacgtttttgctttgaggcataagggacttgattgtatattttataaatatttgccagataagatagccaatggcttgcagtcatcttaaagataaaaattgatgttatagccttgaattaagttgaagtactgtatttgctctgagtggcatttaacctaataattctgaacttaaactttgaaatggaaa

SEQ ID NO: 512886 - DNA, 157 bp, Homo sapiens
gccagtgacaatcatgagcactgtggtgtgggtgtgtgcatttatcacatttaacattattccgatcccatagaaatcacaatatgggatgcacatgttgtaattttgctgagaaaattctataaataaacatctgatccctctgaggcctgactta

SEQ ID NO: 512887 - DNA, 161 bp, Homo sapiens
atgtgatttttggagataaatgtgtagattgtgagttgtgttttgcgtggttgtgtgttgttaatatagtaaattagaaatttttgataagaagtttaatagaaaaaaaaaaagtggttaatataaaatagatggtagttatatattaagaagagggaaat

SEQ ID NO: 512888 - DNA, 318 bp, Homo sapiens
gctaatgcactttgctgtctcctggattccatatctactggatgctgccatcttgcctctagccggacagcaagcaggcacaccaactctttcctttccagtatacctgggcccagagtttcttctcactcagttacaatatttgctctacgaacattccacttaccaactgatcagaacagtaaaggtgactggcatggtgtagcagtgagaggtgcagcgtaacctcagaggtgaacatcagtgctgggaccattcggagcagcatgtgagtaaccacccaaaatgggaaccacggccttctggctcgacctagag

SEQ ID NO: 512889 - DNA, 382 bp, Homo sapiens
gtgaaaaacagagtgtatagatggaatatatgtctttgtaattacttgtgatgtgttaaaataaaaattttattcagatttgtgtaaaaaaaaaaaaacaaaaaaaactcttgactaggtcctcgtgccgaaatcggtacgaggggcccagggtctggggcaccagagccattgcattatgtttcccagggcaacttgagggctgacttttggcttcctcgccctaagagggtcttcctctcttttggtcaatcacctttacaccacttgtgagctgacccccaggaacagtttggctgttccaccagagcagagggaatcattggtggactggaattcttctgtggggaagcaccatgatggtgccagagcttcatgctgg

SEQ ID NO: 512890 - DNA, 376 bp, Homo sapiens
  misc_feature (79)..(79): n is a, c, g, or t
ggtccccctctaagtaaaacaaatattcagaccacaggctttaatgtaaactgccaaaaagtgggatgtggaggatttntgttaagtgtcaatcgaagttaaaaagcaagggtttttggccaggcgtggtggctcacgcctgtaatcccagcactttgggaggccggaggcccggcaaatcaatctaggtcaggagtcgaacagcctggcacatgtgaaaccgtctctactaaaataaaaaaatacccggtgtgtggcagtgctgtagtcccactacttggagctgagcagagaactgttgaacccggaggtaaggtgcagtgaccacgatcatgccactgcactccagcctgggcacagagcaagactccatctc

SEQ ID NO: 512891 - DNA, 103 bp, Homo sapiens
  misc_feature (3)..(4): n is a, c, g, or t
  misc_feature (22)..(22): n is a, c, g, or t
  misc_feature (56)..(56): n is a, c, g, or t
  misc_feature (59)..(59): n is a, c, g, or t
ggnnggattaaggagccaacanatctcttgagctgcccagcaatagtccaagaccntancaatggcaacatcacatgggctgatgtggaggccagtatcctct

SEQ ID NO: 512892 - DNA, 786 bp, Homo sapiens
  misc_feature (3)..(3): n is a, c, g, or t
  misc_feature (9)..(11): n is a, c, g, or t
  misc_feature (14)..(14): n is a, c, g, or t
  misc_feature (20)..(20): n is a, c, g, or t
  misc_feature (23)..(24): n is a, c, g, or t
  misc_feature (33)..(33): n is a, c, g, or t
  misc_feature (36)..(36): n is a, c, g, or t
  misc_feature (64)..(64): n is a, c, g, or t
  misc_feature (66)..(66): n is a, c, g, or t
  misc_feature (73)..(73): n is a, c, g, or t
  misc_feature (75)..(75): n is a, c, g, or t
  misc_feature (86)..(86): n is a, c, g, or t
  misc_feature (90)..(90): n is a, c, g, or t
  misc_feature (135)..(135): n is a, c, g, or t
  misc_feature (138)..(138): n is a, c, g, or t
  misc_feature (146)..(147): n is a, c, g, or t
  misc_feature (149)..(149): n is a, c, g, or t
  misc_feature (151)..(151): n is a, c, g, or t
  misc_feature (155)..(158): n is a, c, g, or t
  misc_feature (160)..(160): n is a, c, g, or t
  misc_feature (183)..(183): n is a, c, g, or t
  misc_feature (191)..(191): n is a, c, g, or t
  misc_feature (197)..(198): n is a, c, g, or t
  misc_feature (205)..(205): n is a, c, g, or t
  misc_feature (212)..(212): n is a, c, g, or t
  misc_feature (237)..(237): n is a, c, g, or t
  misc_feature (242)..(242): n is a, c, g, or t
  misc_feature (265)..(265): n is a, c, g, or t
  misc_feature (276)..(276): n is a, c, g, or t
  misc_feature (278)..(278): n is a, c, g, or t
  misc_feature (280)..(280): n is a, c, g, or t
  misc_feature (294)..(294): n is a, c, g, or t
  misc_feature (297)..(297): n is a, c, g, or t
  misc_feature (300)..(300): n is a, c, g, or t
  misc_feature (307)..(307): n is a, c, g, or t
  misc_feature (316)..(316): n is a, c, g, or t
  misc_feature (318)..(318): n is a, c, g, or t
  misc_feature (327)..(327): n is a, c, g, or t
  misc_feature (331)..(331): n is a, c, g, or t
  misc_feature (346)..(346): n is a, c, g, or t
  misc_feature (354)..(354): n is a, c, g, or t
  misc_feature (363)..(363): n is a, c, g, or t
  misc_feature (373)..(373): n is a, c, g, or t
  misc_feature (378)..(378): n is a, c, g, or t
  misc_feature (381)..(381): n is a, c, g, or t
  misc_feature (388)..(388): n is a, c, g, or t
  misc_feature (397)..(397): n is a, c, g, or t
  misc_feature (408)..(408): n is a, c, g, or t
  misc_feature (415)..(415): n is a, c, g, or t
  misc_feature (421)..(421): n is a, c, g, or t
  misc_feature (425)..(425): n is a, c, g, or t
  misc_feature (427)..(427): n is a, c, g, or t
  misc_feature (431)..(431): n is a, c, g, or t
  misc_feature (434)..(434): n is a, c, g, or t
  misc_feature (440)..(440): n is a, c, g, or t
  misc_feature (444)..(444): n is a, c, g, or t
  misc_feature (447)..(447): n is a, c, g, or t
  misc_feature (452)..(452): n is a, c, g, or t
  misc_feature (457)..(457): n is a, c, g, or t
  misc_feature (473)..(473): n is a, c, g, or t
  misc_feature (502)..(502): n is a, c, g, or t
  misc_feature (514)..(514): n is a, c, g, or t
  misc_feature (529)..(529): n is a, c, g, or t
  misc_feature (541)..(541): n is a, c, g, or t
  misc_feature (547)..(547): n is a, c, g, or t
  misc_feature (675)..(675): n is a, c, g, or t
  misc_feature (686)..(686): n is a, c, g, or t
  misc_feature (747)..(747): n is a, c, g, or t
tanaaaaannnaangtctgnaannaaaattganaancaaaaaaaaaaaaaaaaaacttgcatcnanacacaananggcaggagtcnccangtcttcttgagcagtgagtttgcaggcccccacaggcccccttcncanggtaaaanngngncccnnnncncaaaggagacaaaaacccggcancccaaacnggcccnnccccccnccccccngcaccccagtgcccccaactgggcncaggnaaaaaaaaaataaattgagtggntggggaggaananangggaaggggcaaanccnaanggagccngacccccanantggggaaanccangccaacaaaacgggnggccaaanccacccccngggaaaaaanctttntanttcaaanttcgattantgtgtccttangacaaangtccancccnanaaantanctgggngaanaangcaantgtcncgacagggcttaatcnccacccccaggcatggaaccattcagggngaagcctgggangtgggcacaagaaantcaagctgaaanaaaaanaacaaaatcagtaataaaaaaattataaaacctgttgcttgtctgaatagatttgagcaacagtcttgcttttgttaaaatcctggagccgttaagtcctgaatattcttctggacatcattgctggntggagaaaggngccccaggcccggctcggctgacatctgtcagggtttggaagtctcatccagctgcctgtnctcctgagagatccttagggctgctgggagcaggccggg

SEQ ID NO: 512893 - DNA, 182 bp, Homo sapiens
gggattaagtcagctcccccaagatgagctgagcccccagagagagctctgacgtcacaagtaacaggcccagctccaggccccaactccgcccagctctccccgtctggatctgcactctaacattcgactctgctgctcatgggaagaacagaattgctcctgattgaacacaccacggt

SEQ ID NO: 512894 - DNA, 189 bp, Homo sapiens
tagaccatataccgaatattatgagtcttatttgttattgttcatagtagtctaatatcatcaaaatatcacaatcttataatgtcatatttaatttcaaagattaaatgaaacctatattgaaagtggtttgagatagtggtatcagaaagcatttcttatgacttattttgtatcatttgttttcct

SEQ ID NO: 512895 - DNA, 726 bp, Homo sapiens
attctaatatatttatgggaatgattaatacattttctgatgtcaaatgagagggagaggattttattttataaatatgttaatgcatgctcacttgcttaaaaactgggtactttatgactgccagtgtaaataaattaggcaagtagattctcattgcatcacactctattcattgcacaatggtgtttataaactggattagaattgcgtgctagtgcctcatcttgtaactctgactgctctacctatcccctgctatgtcagggaatgttgagatggcaagtgatagaaataatgttgttaatattctttttttctttcacatcactttttttcacagtgtttttatgtagaatttgtttctttgtttttagctggacatcactgggaaagtcagcaaggtttggtgtggtagttatcacttttagaatggttttcacattcggaatctggattttggttgccaaatatggggatggggcataataagttgggcagagtccaattttttgatctcttgatattgtcttttagattgaagttagttcaaaaagtttcgtgaatggtaaaccatgggtgcgaatgtacgtaaatgagtaagcactgggggggacaggtgcgcaggataaatggggcaggtgattaggtatgtgaatacttacgagagaaaattcggttatattaatatgaaattgtacagtattatttgctgctgtttgaaaa

SEQ ID NO: 512896 - DNA, 132 bp, Homo sapiens
gttggtccagaaccatccagcttctctccctgtgactagtgtcatgttccctgtgggttcctagcttcaaactcgtacaagacttgcattttcagtggctggcttggagctgtgacagtgggtacctgtgct

SEQ ID NO: 512897 - DNA, 665 bp, Homo sapiens
  misc_feature (56)..(56): n is a, c, g, or t
  misc_feature (168)..(168): n is a, c, g, or t
  misc_feature (177)..(177): n is a, c, g, or t
  misc_feature (180)..(180): n is a, c, g, or t
  misc_feature (188)..(188): n is a, c, g, or t
  misc_feature (212)..(212): n is a, c, g, or t
  misc_feature (217)..(217): n is a, c, g, or t
  misc_feature (219)..(219): n is a, c, g, or t
  misc_feature (230)..(230): n is a, c, g, or t
  misc_feature (255)..(256): n is a, c, g, or t
  misc_feature (337)..(337): n is a, c, g, or t
  misc_feature (362)..(362): n is a, c, g, or t
  misc_feature (375)..(375): n is a, c, g, or t
  misc_feature (385)..(385): n is a, c, g, or t
  misc_feature (395)..(395): n is a, c, g, or t
  misc_feature (429)..(429): n is a, c, g, or t
  misc_feature (460)..(460): n is a, c, g, or t
  misc_feature (545)..(545): n is a, c, g, or t
  misc_feature (547)..(547): n is a, c, g, or t
  misc_feature (562)..(562): n is a, c, g, or t
  misc_feature (564)..(564): n is a, c, g, or t
  misc_feature (573)..(573): n is a, c, g, or t
  misc_feature (578)..(578): n is a, c, g, or t
  misc_feature (595)..(595): n is a, c, g, or t
gggcggcggcggccggggaggcggctcgggcacagtaatggcagcgctgtgagcangggaacgcgagctgacagccgccgcgccgccgctccgcccaccttcctcgccggggcttcgtctttcactccttcgggctgctccccctccccttgtcccctgcccttgccntgttctgcngangatttcanactacacttgcacaatgtctttgnaaacnangagtagtagcnttgatgaaacatggaacaaactttnngacgacaataaaagccgtggtcatgttggaatacgtcgaaagagcaacatggaatgaccgtttctcagatatctatgcttnatgtgtggcctatcctgaacccctnggagaaagacttnatacagaaantaagattttntgggaaaatcatgttcggcatttgcataagagangtttggagtcaggaagaacaagtacttggtnatgtatcataggtactggcgaacgaatacagcaagggtgcaggactaatactggacctgcttataataggtatctcaaaaaccangnttattaaaaagaatnanttacagaangggancttcagtatggctatgnggggtagatatgatgaaccatttatggaataggagactagcatggatatgtggggaaatgtggtggaccc

SEQ ID NO: 512898 - DNA, 101 bp, Homo sapiens
aagaagagattgcctttttggagaaactcacgagaggaaatccaagagctcaggctcagattcaaggacagcatgtccaaatcgatgtggatgtttcaagc

SEQ ID NO: 512899 - DNA, 308 bp, Homo sapiens
tgtgcagacgggttctcagagagccagattatgatcctaagagaacctgagtaccagaaaagttacattgtccctactcaggtaatcaaaatgggctgggtgcggtggctcacgcttgtatcccagcacttggggaggacgaggccggtggatggcttgagctcaggaatacaagaccagcctgggcaatatggcaaaaccccatctctacaaaaaaatacaaaaattagccaggcagggtggcatgtgcctgtcgtcccagctactggggaggctgaggggggaggatcacttcagcgggcgaagtc

SEQ ID NO: 512900 - DNA, 701 bp, Homo sapiens
gcctctttttccggctggaagccatggaagggtgtagaacgagaagaagaaggaggtacctgctgtgccagaaacccttaagaaaaagcgaaggaattgtcgcagagctgatagatcaacgcgcctgagaaagaggttcgcccaaaaggatgcttcgaacaggcaagggaggaatgcttatctatgacctagcacagcactatcatcaaggaatataggcagatgtacagacactgatgttcgaatggcgaggatggctgagaaaagctggctagatttctatgtacctgcagaacccaagattggcgttggtcatcagagtcagaggtatcaatggagtgagcccaaaaggttcgaataggtgtgtgcagcattcttcgaccttcgtcgaaatcttcaatgggaaccttatgtgaagctcaacaaggcttcgattaacatgctgaggattgtagagccatatatggcatgggggtaccccaatctgaagtcagtaagatgaactagtcttacaagcgtggtttatggcaaaatcaataacgaagcgaatagctttgacagataacgcttggatgtgcgcgatctcttggtagatacggcatcatctgcatggaggatccgattcatgagatctatactgtctggacaaccgcttcgagagaggcgaataattcctgtggcccttcagatggtcttctcca

SEQ ID NO: 512901 - DNA, 432 bp, Homo sapiens
ggggtgtctagaggatccctgatggtcaccgctccaaataattttctatttgtagtagagacaggctttctccacatgggtcaggctggtctgaactcccgacctcaggtgatcctcccacctcggcctcataaagtgctgggattacaggcatgtgccaccacgcccggcctaattttccactttggatgatctctgccatttctctttatggagcatgtgcagtgttgagaatacgtatttggatgcagtacgtgtagtacagctctgaatggtgtcctttaacttggggtaagttcttttttagtagacctggcttcttcggaatatttcttctcttatagtgcctaacacaataattatgcccaaattagacaaattaacattggagtgttcacagatttattactgtatttaaaccatggatcttca

SEQ ID NO: 512902 - DNA, 966 bp, Homo sapiens
ggaatcttggtatggagttgcctcataagcaggttaaaggacagtgattagaatgattaaggcttaaaggtatcgtttaatacgatgttcagttggatgattggaaacaatcttaaatgactcaggtgaaaggcaaataataaagttcgtacttcgttctatagctcgctgtcaatgcacagggtcactgaccagaaaatgatctggattcgatgaaaggtcgattttggggcaagtcattgagaattgcttttcagaatgtttcatgctctcttggatctccttattaacgatgacctgggcatcgggcagcattgccacaatggactgggatagatcagtcagatgtgttcaatgactaggtcatccccaggatgacttctaactgttagtaatccacgctgaaagaagaaaagaaggcgcttgaagatgaaaaaccagaaccgaagcagaatgccctagggcaaatgcaaaatatccaggtttctatttgtatgcagtcagcattacaatgaaggaacagtaatgaagtttcagaaaattacaggtgatgctagaattcctttgcgcatcgtcgactgcctgtatcctggtgcgccacgttgtcgtacatccacgacgggcttcaggaacattccgagcaacaacgtaggagtcccagctactgagcagcggcaggagtcttttgaaggattcattgctagaatgtgttctcctgtcagccagatgcgagcttctggaactggaagtcaaagaaaagaagaggagtggtccagaaatagcagatcttcttcagagaataagaccaaaacaggggatataccgacagacactctgataagcaacagcctggaaaggacctgcattctctgatctgactgtcctgaaaaccagaaaagcaaagaaactagggaaacatagttctttggttaatgaaccaaattaaaagtaggtctatgaaaaaat

SEQ ID NO: 512903 - DNA, 250 bp, Homo sapiens
gatgcagtctgcgaaagtgagctatgacattggagagaggcagttcccaaaccaagtcccagtcttatggtgccaacttttcttggaccaaagaaccagagtattcccaaataggttggactgactatatctctggttgactgtgaataaagtccggtatgccggatttatagtccctgttttatacaatacctctcttaatctcctaaataaaattggacctttagaactaccaaaaaaacaaaaacaa

SEQ ID NO: 512904 - DNA, 104 bp, Homo sapiens
ctagaggtctattggaatccaatgctagcttagaatatagcacagttctgctggagtgtgctcacatgacacactctggacgcagccctgaaaccagcaacatg

SEQ ID NO: 512905 - DNA, 309 bp, Homo sapiens
  misc_feature (65)..(65): n is a, c, g, or t
tttttggactcctgtgttttggggggggggggtggctttcccaacaaagccccccctcctgtaangattggaagccccagggtaagaaccctccccccccggcttgaagaaaggcccctccctgaccccccccttttggtttacccctgttgggccccatcccaaaaagactgctttttaaaaaacggccccgggttgatttttttctttcccaggaatgtgactttgggttatccccctttgggggccgggggcccgttttgtacccaagtgagttgtgtgaaaataaattataaatgagttgtttga

SEQ ID NO: 512906 - DNA, 700 bp, Homo sapiens
tctcaattaaaggattggatttatccaaggtttggtgaaaactttctacaagggaaactcttattagatgcggcatggtacggggctagggaccacgcacttacagccaggcggtttcaaaagatctttgaaatgtgccatgtgattagttttaaaaactctacacccgagtggagaactcgaggaagacaatttaagtgtttcactctgaactccagagggtgcactcaagattaaagtgacagcctccacttgggcaaataattagcgggttactggagggtactccaagaagaaagggtgtggctgagtggataaattcagaaagtgcttccccaaagggtggggtggctttttaaaaagttttcaggtcacaaccctggcagaaaacacgtgatgcccaacacacgtgaattcgcggctccaggaaacacgggtcttccaagttcccaaggggcgtggggttcccccaagcgatcaagttccgtggtggcgtgtaatcaagagggtccttgggacgggatagggagcactggggagctgtacaccatcagtcataagggagggcagtgtaaaagatgatccaaatgaccatgaacaaggcaaaagaggtcataaacccttccttcgtgagctcccaggtgccaccatatgcttcctcatcaatctgtaggtaatgctgaagtagaggtacaggacc

SEQ ID NO: 512907 - DNA, 149 bp, Homo sapiens
ggggtccgtgtagtctgtcttggggggcgggaagtcccagtcgtcgttcgaaggagccggactccgcctggctgtgtcaatcttcacctcataggtgtggtctggccgcacaagtcagtgtgtacaggtgtgtaaactcatcatccttg

SEQ ID NO: 512908 - DNA, 498 bp, Homo sapiens
taataaagcagaaatgtatttataaggcacccttgtttcttacagtggagcaagatccacgcctgagcgcctgggaagtatatcgaggttgcgggaatctacacaaaacatacggggtagccagggcccacccatggaacactatttggctgaagttgagaccggcgaggtgatcccggcatgaggctgggggtggctcctaggctccacaatacactgaggagtgggtggggacacccatgacagctacccaaacactggcagagagggaggccctagcacatctgatgcacatgttggtgggcctgccagggcgaggaggatcctggatagttcatcgcacggggccaggttctcagggccctcaaaaaatacgaccgcctatactcgacaccgttgacttacaaacacacgttggggttgactaagacctgagaggtctcgacgttttttatctgtgcgggcgaccactgggtgttggccgggtacatgcattta

SEQ ID NO: 512909 - DNA, 610 bp, Homo sapiens
  misc_feature (581)..(581): n is a, c, g, or t
  misc_feature (586)..(589): n is a, c, g, or t
tccataataacttctaggcatataggtccttacctctttggtcaggtgtattccgaggtatttgattttgtgtggtacaattttaaaaggtatcgtatttttgtattccttttctaatgtttcattgctggtatacagaaatgcaactgacttctgaatgttaatcttatatcctgccactttgctgaatttattaatcagttcaaggagttttggggttgagtccttagggttatgagggcgttttctcgtgtgaatgagggtttgatgttgttaatgtggtgggtgtattttcctcgttgtgtaataattagtatgtagagagagtagagagctgtaattattatgtttattcctatgagaataattgtgatgttggatcatgaaaatgatgctgtaatgataaataattctccgattagattgatggatgggggtagggctaggtttgtgaggcttgctattagtcatcatgttgctatgagtggtaggagtgtttgcagtcctcgggctaggattatggttcggctgtgtactcgttcatagttagtgttggctaggcagaatagtatggaggatgncgacnnnncaggtctaattcgggtgtgat

SEQ ID NO: 512910 - DNA, 141 bp, Homo sapiens
catcatggggatgggggtggactgcacaggacgaacactggccacaggcttttcatcacccttcaaagttggctgccagtttctctggctgaaggcggggatgctggtcaggctctgatcgctggcagggtaatactgcgc

SEQ ID NO: 512911 - DNA, 421 bp, Homo sapiens
ccgtaaaaagctgactttcctgaggtcacagagtgaagtggcagcagagcagctctccccacttcaggccctggattttccctggacaaaacactcttggattcttacatccacgaaccgattttttcgatcccttttagaaataggcgaacggatcacattcagtaatctcccttactctgagccttgcctacactggcacattcctgaaaagtgtaaagctgtgtgggactagccacttaatcataaccaaacccctgcccaggtccctccacagaagttagtcaccatccctgggaggagggctggatcttcccttggggccacaccacgctgatccctggaccacaaggatgcttatgaggtctgctcactggaatcccaaggactttataaaaaatgccaaggggcaaattccact

SEQ ID NO: 512912 - DNA, 484 bp, Homo sapiens
  misc_feature (455)..(455): n is a, c, g, or t
  misc_feature (460)..(463): n is a, c, g, or t
gatctgaaaccaggggtgagaccaactgaagcatgacttggaaagtgaagaggaaggctggacatgggagagcgcatgccgttgagggattaaggagtgggaatgaacatgagggcgttttctcgtgtgaatgagggtttgatgttgttaatgtggtgggtgtattttcctcgttgtgtaataattagtatgtagagagagtagagagctgtaattattatgtttattcctatgagaataattgtgatgttggatcatgaaaatgatgctgtaatgataaataattctccgattagattgatggatgggggtagggctaggtttgtgaggcttgctattagtcatcatgttgctatgagtggtaggagtgtttgcagtcctcgggctaggattatggttcggctgtgtactcgttcatagttagtgttggctaggcagaatagtatggaggatgncgacnnnncaggtctaattcgggtgtgat

SEQ ID NO: 512913 - DNA, 341 bp, Homo sapiens
caatttgccctgcctggagttccccctgggtttaggacactttaacaagctttgtccacgggtttccccatttccaccagggcctggacacacccactccgtaaccttttccctggacctgtgccaaacctagcacttgttatgcctccatgccccgagggccctttttcagttttgggaggatgactccagtccctgcacgccctgggacaccctttacggttgctacccaggcggccaagcttcaaaccgtgccaaacccaggtgccccagtgcctttgtttatattttgcttccagcctgccaggcccaggaggaaataaacatgccccagtttttta

SEQ ID NO: 512914 - DNA, 701 bp, Homo sapiens
  misc_feature (78)..(78): n is a, c, g, or t
  misc_feature (594)..(594): n is a, c, g, or t
  misc_feature (663)..(663): n is a, c, g, or t
  misc_feature (679)..(679): n is a, c, g, or t
  misc_feature (690)..(690): n is a, c, g, or t
ggggactaggctgagagtgaaggcgtaggatacggtggttttaacgtagttagggtaaaggttagttttgtagatgtntgacgttggatattataattgggatggttagaatagttagtgtggttaatgtgagtgaggcgaatgggtttattacttttatttggagttgcaccaattttttggttcctaagaccaacggatagctgctatcctttaaaagttgaaaaagccacatttttaagtgtggaagcatgagttagcagttcttgcaaactttttcggtagataagaatatttaattttctattactagattcacaatctagggtttttattaaactatatctacagtaaaggggtcctaggattattttagggtttaaggtcagtagtagtagtggtagaatatgtagggctatgagggcgttttctcgtgtgaatgagggtttgatgttgttaatgtggtgggtgtattttcctcgttgtgtaataattagtatgtagagagagtagagagctgtaattattatgtttattcctatgagaataattgtgatgttggatcatgaaaatgattaaagctacgatccccancatgcatgtcttcatgggcactcctggttttggtaacctgcacttatcatttttaggctgacacatcanttcaggattacgaggngttcgcctganatccggtgcag

SEQ ID NO: 512915 - DNA, 599 bp, Homo sapiens
  misc_feature (78)..(78): n is a, c, g, or t
ggggactaggctgagagtgaaggcgtaggatacggtggttttaacgtagttagggtaaaggttagttttgtagatgtntgacgttggatattataattgggatggttagaatagttagtgtggttaatgtgagtgaggcgaatgggtttattacttttatttggagttgcaccaattttttggttcctaagaccaacggatagctgctatcctttaaaagttgaaaaagccacatttttaagtgtggaagcatgagttagcagttcttgcaaactttttcggtagataagaatatttaattttctattactagattcacaatctagggtttttattaaactatatctacagtaaaggggtcctaggattattttagggtttaaggtcagtagtagtagtggtagaatatgtagggctatgagggcgttttctcgtgtgaatgagggtttgatgttgttaatgtggtgggtgtattttcctcgttgtgtaataattagtatgtagagagagtagagagctgtaattattatgtttattcctatgagattgtttgggctactgctcgtagggccccgatgagtgcgtattttgagttggat

SEQ ID NO: 512916 - DNA, 198 bp, Homo sapiens
  misc_feature (141)..(141): n is a, c, g, or t
gcttcgtcctgatcactgtagccctggccctcatgcactgggtcttgattcctaatcactggcgtctgggggttaccaaatggcccctggattcctggattccttactccgggtccttaatcaaatgggtcctctgcctcnttgaactttccttggacgtccggggtccgtcaatcaatccattccgggttcccttaa

SEQ ID NO: 512917 - DNA, 623 bp, Homo sapiens
  misc_feature (78)..(78): n is a, c, g, or t
ggggactaggctgagagtgaaggcgtaggatacggtggttttaacgtagttagggtaaaggttagttttgtagatgtntgacgttggatattataattgggatggttagaatagttagtgtggttaatgtgagtgaggcgaatgggtttattacttttatttggagttgcaccaattttttggttcctaagaccaacggatagctgctatcctttaaaagttgaaaaagccacatttttaagtgtggaagcatgagttagcagttcttgcaaactttttcggtagataagaatatttaattttctattactagattcacaatctagggtttttattaaactatatctacagtaaaggggtcctaggattattttagggtttaaggtcagtagtagtagtggtagaatatgtagggctatgagggcgttttctcgtgtgaatgagggtttgatgttgttaatgtggtgggtgtattttcctcgttgtgtaataattagtatgtagagagagtagagttacgtttgtgatagtgttagtataatatttagtactctttttcggagtttaccgaactgattgtattgcggtcccgtatattgcgggtcggggatcctctagtattc

SEQ ID NO: 512918 - DNA, 694 bp, Homo sapiens
gcatcagataactcttttggcacagccatgtcttttctttcttgttcaattcagtttgttgtactcgtgggcctcttgtccatcatcttcaccacattgtgttgctccatttccattgtgcggtcattatcccattccagttcatcgtcaggttgcattttttgcaaacgggtcccttttggacattctactggtactcttagtaagacaatgcatgcgcaccaatttctcacattgttatttcccaaggttggggttctcattcacgtcctcattttggggcgcttgccatccaagcacaaatgctccttgggcagcacaatcaaatctcgtctcgcgccactctcagtcgcaccctgctccacttcctcttcaaacaacctccaagggggcacacaacaatttcggggccaccccaattttgtccaagcacgtggccccaattttcccacaaaccgaagcaaccaacttgggcaaattcacagatttgtcctaaccaccaccgaaccagcttggcggccccatcaaggcttctcgggcaacaattccgttcaagttgagggcgggccaattcagccatccgttaaccggagcaagggtttataatccgtcgccccctcataatgcccaagccaaaacaccagccaatatcgcgcgatcggacaattcttatgcaacaatctgtccacaaata

SEQ ID NO: 512919 - DNA, 755 bp, Homo sapiens
ctcgctctgctagctatccctgtgcagcaccccggcctggagctcctgagaccaccgccctgcatgggggcttccagaggcgctacggtggcatcacagatcctggcacagtgcccatggttccctctcatttctctcggctgcctcttggagggtgggcagaagatgggcagtcggcatcaaggcaccctgagcccgtgcccgaagagggctcggaggatgagctaccccctcaggtgcacaaggtatagacaaggctgagcagggttcctgtggcccaggatggaggccaccgctgccctgccatcccgtctgcctgccatgggacggctcctctgagtgttccctggccccacgtgtgatggtgtaagtgtgtctgtgactgaccaagggaggtgacaaacactgggcttgccacagccccaggagaggaattagggagctaggaacccgagggcacacgggactctagacctcatccccaggacccccttggctcagaatagtgggagcagctggtcccacagcccaggccaactccagccacgacaccccaacactgcaagtccccacaggctccccagagacgagctgccgccaggagacccggccaacgtgcacgcgcggcggccagacccaaccccgcccgcgcctgaccagaccctaccggcggaaggcccgacccgcgcgaggacagacacaggccagaaggaatcaccgaccgcgcccccgcgccagcccaccgacgagcagag

SEQ ID NO: 512920 - DNA, 537 bp, Homo sapiens
gaatgcaggggtattggaaggctcgtgtgtgatagtgtgtttgggatcgaggatactcaccagacacgacaaatgcgaaacaatcaatgtccgagtatacaccatgcgtatgcagagctgggagtttgcaatccagccatatacaactggaaaacagctttttgatcaggtggtaaagactatcgtgctccgggaagtgtggtactttggactccactatgtgcctcatcacaggatttcctacctggctgaagctggctcagaaggtgtctgcccaggaggtcaggacggagaatcccctccagttcaagttccgggccaagttctaccctgaagatgtggctgaggagctcatccaggacatcacccagaaacttttcttcctccaaagtgacggaaggaatccttagcgatgagatctactgcccccctgagactgccgtgctcttggggtcctacgctgtgcagggcaagtttggggactacaacaaagaagtgcacacagtctgggtacctcagctctgagcggctgattcc

SEQ ID NO: 512921 - DNA, 127 bp, Homo sapiens
cccacggttgatctgttcctgcagctacttagatgtttcagttcattgcgttcgcttcccttgccttatgtattcagcaagggatgacccattcgggccgggtttccccattcggatatctgcggat

SEQ ID NO: 512922 - DNA, 586 bp, Homo sapiens
  misc_feature (265)..(265): n is a, c, g, or t
  misc_feature (365)..(365): n is a, c, g, or t
  misc_feature (380)..(381): n is a, c, g, or t
  misc_feature (536)..(536): n is a, c, g, or t
aaaaataaaggtctgggtgaggggcgcggcatttcatctgtcctcattctctgcgcctttcgcagagcttgcagcagcaggatgttgggccagagcatccggaggttcacaacctctgtgctccgaaggagccactatgaggagggccctgggaagaatttgacattttcagtgggaaggcaagtggactgcactagctaagatgagagcgtacgcaggatctaaatttggtacacccttccttgcagtaagacaccaactgctnaaaacatcaggaccgagcagtattttacatttaatatcccatgaagaggaagctaagtggcacgagcttttgtatagtcattcctctagcacgaataggncatgctggatatgannccccttaagcgtatgccgtaaaaaaaagaacttctttttattaagctctctttccactgcaagattcattttgattgacgtccactttaaagtaaggaccatatttccttaaatggcgttacttaaaaaaacctcctataccccaccacgggganttcactaatctaccccccctgatcacaactccttgtactgctcttgtgct

SEQ ID NO: 512923 - DNA, 247 bp, Homo sapiens
aaaagattcaatacggcaaccacagcaaagagaaatttctagttctgccactaacacttcctttaacacaactctctcaaacatgtgcctttcattgcattcaaagttatcggtattaccagctatcattgttttggggtttctctgctaattctattggcatgcattctaggtagttgcccattgtaactattaaattgactattttaataacaaagcatattcatggagactgccatctaggtat

SEQ ID NO: 512924 - DNA, 201 bp, Homo sapiens
  misc_feature (127)..(128): n is a, c, g, or t
  misc_feature (163)..(163): n is a, c, g, or t
ggcgcagctcttagtcgcgggccagactggtgtttactccgtcactcgccgaggttccttgggtcatgggttgccagcctgactggagacagaggacgctcccgggagacgaatggaggaaccaccnntcctcctactggttccaagtacaggggcctggtcncgcaacaggggaacgaaaaagcaaaacagaccgacaaa

SEQ ID NO: 512925 - DNA, 206 bp, Homo sapiens
accgcgatacccgaacgatgcctacaaggcgcaggaaaagcgcgccaagggggcgctgctggcctactcgctgggcgcgaccgtgctcgacagcggcgtggtcggcgacgtgatctgggacagcccggcgttcaacgctgggctcgcgccgggcatgaaggtgatcgcggtgggtggccgcgaatacagcagccaggggtaccgag

SEQ ID NO: 512926 - DNA, 634 bp, Homo sapiens
attgttggttgttgttttttgagaaggagtcttgctctgttgcccaggctggagtgcagtggtatgaccttggctcactgcaacttccgcctcctgggttcaagtgattctcctggcctcagcctcccaagtagctgggattaccagcaagcatcaccacacccggctaattttcgtatttttagtagagacaggatttcgccatcttggccaggctggtcttgaactcctgacctcaagtgatctgcccgcctcggcccccaaagtgctgggattacaggcatgagccactgtgcccagcctagaagaatattttaaatatttgtttagaagaggatttttgtgtttttttttttttggacatggtcttgctctgcctccctaggctggagtgcagcagcttgatcatagctcactgcagcctcaaagtcctgggctccagaaatcctcccatctcagccttccaagtagtctgggaccacaggcacaaccatcatgcccagctacagtggcagatgggatcttgcaactgttgcccaggatagcctcaaactctggggctcaaacaatcctcctgccttggcctcaaaaaagtgctgggattataggcatgagccatgtgacctggcttaga

SEQ ID NO: 512927 - DNA, 126 bp, Homo sapiens
  misc_feature (5)..(5): n is a, c, g, or t
agcgngggaacatatcacttttatgatcatgacctgatccaaggtaaagtacattgtagatgggaatcctggaggaatagttggcaagttcaaaagacgtatccataagtattgttacttgcagat

SEQ ID NO: 512928 - DNA, 470 bp, Homo sapiens
gactgaccggagaaagtacagatcccccctccccagttacccctattgatcactacacacaatcacacattcaaaatagggaattaccactaggacacacgtatcaccccggcacgattacacgcactttccaaccgcagacacagtgctacataaagttacatggtcacactctcacattctcacgttactgagttatttctgggtagtagatttactcagtaaggcatccagtacacttaagtgctgctaacagtcatacaaacacaattacacacacccctcagactaacacacagtcacagcctcatcagattctctccacacaaacaccctccacaaatgtcacgcagagttacacagccacacacaatcacagtcccaacacgggacacagtcatacctacacatacagccttacattgttacaattacacagctacaacgaggatatacaatcacacccgcgc

SEQ ID NO: 512929 - DNA, 132 bp, Homo sapiens
ttcatgaagcaatgttattagcgtatcatttagattctcttgcaagagtctcatttgttgtttttccaaatgcctgccaatattgttctgaaaatttacaacactgtgataaactgtatcttcaaagttaaa

SEQ ID NO: 512930 - DNA, 679 bp, Homo sapiens
agcgtgaaatcttgctggtgtcggctacggctggacagtgcgagtatcgctgatctcgtgcgtcgactggactagacagagactcgtgtgcttccccagctacatagtgattgctcgatgccttgagccctcccgaggtacctgggatcggacgcgactgtgctacctatgtcactggctcacagttttccgctattgctccgtgcgacgattcgtcgaaggcgcttgtcgatcgtgttagcttgtcgtctgctaggctcttcgatccttgtgaatggaagtttgtatcacgaatgtacttatatgtggatggacttatatatgttggagtatgtaagctgcagtgccatttcgttctgagtctccttatactgattgtgtattgcagtccattttactgagagagttgagtaccacaaaagtaaaatcatcggattatttatattactttgggaacaggatgtgtgttctttgtgtggcaatccagtcaattttggtattccacacatgacaggacttcagctgagattgctgcaatttgtgttggatttatagcaagttttatgttcctacttgagctttatcactatgctgtatgaaaaacgacaggagtcccagctgagaaaacctgaaaataccactagggctgaagccctcactgagccacttaatgcctaaa

SEQ ID NO: 512931 - DNA, 811 bp, Homo sapiens
  misc_feature (1)..(1): n is a, c, g, or t
ntggtcccctcccgaaaaaaggttggtctcccgaggctttttcccggacctgtgaagcgggttgactccctcccgcctcacccaatggtgccacgagcccaccggttggaaaccagggcgagagtatttaccccgtgtgacaaattagggcgcgcacaaataatgtgctgggacgtactcgggaccctcctctttgatggtggagcacccacacttcggcgagcaattgttggcaccagaaaggctctagagaagatggggtgccggacaattcgttgtgctgcagaaggtggcttttcaagtaagaaagacccttgtgtcttataagcgtgcggtatcaatgaatatgcccctccagaatctggggccaaagccatggacaccccttgtctctactattgggaagatggtaaatagtacacagcattctgtccaagaagaacggtccaataaagaatgagcgtcttacagtgccctgtgatagcaacatgcaccctttgtcccgacgtcttgtttagtgatccccctgtagaccaaagggtatgcaaggtaatatttcgcgagcgcagtgacgcccgccgggtgtgtcctcgcatggtgtaatgaggtccataagcagggagggcccctccagatcacagcagttttcgcgatagatcacatataccccattttgtgggaggacagttcattctataatggaggaatgattgactgggggggcgaagaacgacaaaaattatgtttacttgcactgtgaaaagtgttggccctcagacacatgtgttggatcttcagaattatgtgacca

SEQ ID NO: 512932 - DNA, 303 bp, Homo sapiens
  misc_feature (205)..(205): n is a, c, g, or t
gtcaactggtaaggatgaactgacaccttgagaaaactgaaacagcttgtcaagactagtttttggaacttgccccactccatgtgagtggaagcatggcctgatcacccacggtgtgcctgtattgacatctttgttctggttttgacttggcttgacttggtaagactagtctttggaacttgccccactccacgtgagtganagcgtggcctgatcacccacggtgtgcctgtattggcacttttgttctggttttgacttggcttgacttggtaagactagtctttggaacttgcccca

SEQ ID NO: 512933 - DNA, 346 bp, Homo sapiens
  misc_feature (72)..(72): n is a, c, g, or t
  misc_feature (75)..(75): n is a, c, g, or t
  misc_feature (77)..(77): n is a, c, g, or t
  misc_feature (165)..(165): n is a, c, g, or t
  misc_feature (170)..(170): n is a, c, g, or t
  misc_feature (175)..(175): n is a, c, g, or t
  misc_feature (240)..(240): n is a, c, g, or t
  misc_feature (319)..(319): n is a, c, g, or t
  misc_feature (343)..(343): n is a, c, g, or t
gtttggctacgtacaatggaactttaagtcatatatacatacatatatatatatatatatatatatatatanttntncggggggatatgttatatttttctgtttctataagagatgaatacagtggatactttttctattggtaatgattgagttcacctcttncagangacantttctttctcttctgagtaattgaaataaaatctggcccttgtgaaaccctgggacatcttaagnctgttgaaataccaggttaaacacattccaagagatctgttcaaactcaaattcttttgtatacttctgaggtgcctgnggattagacttccattatttttgngga

SEQ ID NO: 512934 - DNA, 300 bp, Homo sapiens
  misc_feature (56)..(56): n is a, c, g, or t
  misc_feature (238)..(238): n is a, c, g, or t
gaaaaaaaagaaaagaagaatattttgagacatgtgaaaatcatcctaaattcaantttcaatgtccacaaacaaagttttattggaacacagccacagccatttgtctgtgtattgcctatggctgcttccacatgcactcacagagctgagtaattacaacagagaccgtgtggccagcaaagattgaaatatttactatctggccctgtataaaaaaagtttgctgacccctgtnctgtactgttaagtactattggtactattaagtactagtagtagtactattaataatagtat

SEQ ID NO: 512935 - DNA, 1326 bp, Homo sapiens
  misc_feature (1125)..(1125): n is a, c, g, or t
gcagaatggccctgtgagcctacatggccagagctggagagtgcagtgaatggagctttacatcccatgctctgtgctgatgaatgcttggaacatgcatgtgactcacctgtgaatgcccatgccctgtgcacatgtgctgctgtgatgactgcctgtgcccttgtgatgcttgccccatcccacagtctgtgccctgccccttgcccctgatctgtaggtgcccatcacatgaaaaccttgcttctgcgtgattgcattgtgagtgcacaaatgaccggatgatctgcattgtggcccattgacatacaagaacttgtgatatgcatgtgcatacacactgtgaaaccacttggaatttgtaaccaatgtgtgacaaggatcaatccatactttcacgcagaggggcattactgtggcattgtgcgacaccttggacataccagttggaccatggataccagatagagaacaacaacactatgacatgataataccaatgagcgaacacacgtcttggaggcatagcatatgagtgaagtccccgcctgtgcaacacatattgccacactcagaccaacaatacacaatcttgaccacacgacttgagcacttcaccccaatagggggaacgagtgaaaagcacacatactatcacacaataatgtggctataacacattgtataggagcacacaaaggacccccaatattaacgagacaacaagtaacaggattgggtcagatccaacagatataagaatcacgaatgtatagtacactaaacataatggatatggagaacttagaaagctggcccaaacgaacaacacagcaagtcacacaaacgacaaatggaatatatctataacccacatagaatgctgtagatcgacagaaacggtcgtgtcccgagggtgatgaccccaattggtcactgaggtcgatcgtcgtagagtacgacacaggagacatggacaccatcaaacccatagtccacaatacgggagcaacacaaccatatgacacctcatggtgcacagcgtcacacaagcgtgcgtggaagtcgtggaccaaacccaatacacctatggacctatatacaaacgatgagtgaaccaactantgtgaagacgagcgactagtaggaaagtgcagacaacggaacatggatcacaaccacaccagcgcaatgtacacaaccatacccggaattgagacaagacggaaacacggacaaacattatgaatgaagacagtccaacgcagcacagaagacaccgatgtgatgatacacttggatttggcacgcaattggtggaaggca

SEQ ID NO: 512936 - DNA, 657 bp, Homo sapiens
tataggaggcagccatggcgcccagccggaatggcatgatactgaagccccacttccacaaggattggcagcaagcgagtggacacttggttcaaccagccggcgcgcaagatccgcaggcgcaaggcccggcaggcgaaagcgcgtcgcatcgcccctcgccccgcgtccggccccatcaggcccatcgtgaggtgccctacagtgagataccacaccaaggtccgggctggcaggggcttcagcctggaggagctcagggtggctggcatccacaagaaagtggctcgcaccatcggcatctctgtggacccgaggaggcgaaacaagtccacggagtcactgcaggccaacgtgcagcgcctgaaggagtaccgctccaagctcatcctgttccccaggaagccttctgctccgaagaagggagacagttctgctgaagaacttaagctggccaccagctgacaggacctgtgatgcccatccggaatgtgtacaaagaggacaaaggccagagttatcacagaagaagagaagaactttaaggcttttgccagtctccgaatggcccgtgccaatgcccgactctttggcatccgagcaaaagggcgaaggaacgctgcagagccaaagatgttgacaaacaaaaaaagcaaa

SEQ ID NO: 512937 - DNA, 161 bp, Homo sapiens
gtgatttacccttttgatgagaatactgcagcccccagtaggaaagttatatttttgaattcccgcctcccagtacaggataacagcccctaaaaatggaagccttaggccgttcctccccctgcactccagcctggctgacagagcaagactttgtctca

SEQ ID NO: 512938 - DNA, 204 bp, Homo sapiens
ccccccccctttccccccccttcctcaaaagttgaagggttcccccccccttggttgggaaaggcaaccccccccccaagcccctttgaaaaaaaaccagtttttttttttaaacccccctttttttttttttttgagaagccccccgtggggcccttttttttttaattgggggccccccctttattccttttttctccccca

SEQ ID NO: 512939 - DNA, 942 bp, Homo sapiens
  misc_feature (34)..(34): n is a, c, g, or t
  misc_feature (104)..(104): n is a, c, g, or t
  misc_feature (116)..(116): n is a, c, g, or t
  misc_feature (164)..(164): n is a, c, g, or t
  misc_feature (169)..(169): n is a, c, g, or t
  misc_feature (257)..(257): n is a, c, g, or t
  misc_feature (259)..(259): n is a, c, g, or t
  misc_feature (265)..(265): n is a, c, g, or t
  misc_feature (277)..(277): n is a, c, g, or t
  misc_feature (291)..(291): n is a, c, g, or t
  misc_feature (295)..(295): n is a, c, g, or t
  misc_feature (299)..(299): n is a, c, g, or t
  misc_feature (303)..(303): n is a, c, g, or t
  misc_feature (309)..(309): n is a, c, g, or t
  misc_feature (312)..(312): n is a, c, g, or t
  misc_feature (317)..(318): n is a, c, g, or t
  misc_feature (320)..(320): n is a, c, g, or t
  misc_feature (323)..(323): n is a, c, g, or t
  misc_feature (331)..(332): n is a, c, g, or t
  misc_feature (337)..(337): n is a, c, g, or t
  misc_feature (340)..(340): n is a, c, g, or t
  misc_feature (342)..(342): n is a, c, g, or t
  misc_feature (346)..(346): n is a, c, g, or t
  misc_feature (360)..(361): n is a, c, g, or t
  misc_feature (366)..(366): n is a, c, g, or t
  misc_feature (368)..(369): n is a, c, g, or t
  misc_feature (378)..(378): n is a, c, g, or t
  misc_feature (394)..(395): n is a, c, g, or t
  misc_feature (397)..(398): n is a, c, g, or t
  misc_feature (401)..(401): n is a, c, g, or t
  misc_feature (405)..(406): n is a, c, g, or t
  misc_feature (410)..(410): n is a, c, g, or t
  misc_feature (418)..(419): n is a, c, g, or t
  misc_feature (423)..(423): n is a, c, g, or t
  misc_feature (427)..(427): n is a, c, g, or t
  misc_feature (429)..(429): n is a, c, g, or t
  misc_feature (438)..(439): n is a, c, g, or t
  misc_feature (443)..(443): n is a, c, g, or t
  misc_feature (483)..(483): n is a, c, g, or t
  misc_feature (494)..(494): n is a, c, g, or t
  misc_feature (506)..(506): n is a, c, g, or t
  misc_feature (519)..(519): n is a, c, g, or t
  misc_feature (532)..(532): n is a, c, g, or t
  misc_feature (534)..(535): n is a, c, g, or t
  misc_feature (545)..(545): n is a, c, g, or t
  misc_feature (550)..(550): n is a, c, g, or t
  misc_feature (553)..(553): n is a, c, g, or t
  misc_feature (556)..(556): n is a, c, g, or t
  misc_feature (572)..(573): n is a, c, g, or t
  misc_feature (575)..(575): n is a, c, g, or t
  misc_feature (577)..(577): n is a, c, g, or t
  misc_feature (587)..(587): n is a, c, g, or t
  misc_feature (646)..(646): n is a, c, g, or t
  misc_feature (667)..(667): n is a, c, g, or t
  misc_feature (673)..(673): n is a, c, g, or t
  misc_feature (695)..(695): n is a, c, g, or t
  misc_feature (727)..(727): n is a, c, g, or t
  misc_feature (734)..(734): n is a, c, g, or t
  misc_feature (739)..(739): n is a, c, g, or t
  misc_feature (775)..(775): n is a, c, g, or t
  misc_feature (783)..(783): n is a, c, g, or t
  misc_feature (796)..(796): n is a, c, g, or t
  misc_feature (799)..(799): n is a, c, g, or t
accccattcatataatatttatacatacccatcnaaatttttaatattttatttaatcatctatactataatacatttttaattttaacccacatcaaaattcncaataaatattnccatacttttcatcaccattttttattaaatttacttttatatttatnaaatntacatctattcatttttattcccccatttttatattaataacctctctcccaataatatcaccattaaattcattacactaatctccncnaccacnaaatatttaaanccatattccaaatnattnaatncttnctcatntcnccttnnanagnaccacccnnctgtnatnangctnaagcgcaacattcnngcctntnntgcccatcnaaactacaagaagctnntnngcncctnntgcncacacaannagcncctnantatcctccnngcanaactggaagcgctaggcatgaagggtaccccttccctagngaagtgtcggnccctgaaggagnagagggaggaggnagctgaggtggcnannttggatgttncgaanatnatnagtggctcgggccggnnangnagacgtacancctggaaccctttaggagaagcagcacccccaggggagctgtaccgacggaccctgganacagatgaagagcggccccgncccgcncccccagactggtcacatatgngtggcatcatcagcagtgatggcgagagtaantgagctntgccncccccaggagggacccttgatacatgtacaaagcanacatagcnccccttgccctgngtntgtggaacagaaacagcttccttcaaagaagactgcagctcccaaggacccaagctgttgggatgctacttttcagcttcccgctgtccctttaaggggttttttttttaagactcaataaaggagggtttttaatcccccca

SEQ ID NO: 512940 - DNA, 932 bp, Homo sapiens
  misc_feature (11)..(11): n is a, c, g, or t
  misc_feature (34)..(34): n is a, c, g, or t
  misc_feature (54)..(54): n is a, c, g, or t
  misc_feature (108)..(108): n is a, c, g, or t
  misc_feature (142)..(142): n is a, c, g, or t
  misc_feature (167)..(167): n is a, c, g, or t
  misc_feature (679)..(679): n is a, c, g, or t
  misc_feature (696)..(696): n is a, c, g, or t
  misc_feature (715)..(715): n is a, c, g, or t
  misc_feature (725)..(726): n is a, c, g, or t
  misc_feature (850)..(850): n is a, c, g, or t
gagatcaactntaagcattacattctcaattggngacaaaaattggttcttggngtgaaaaaatattagatatggctcgtggacttgcaatatcatcctatccaacanaatcttattccttagtattaatttatctcattgngaagaaatttgtagttaaaactatntaatgtaattggaatttaatttctgtaattgggaaggagggtaataatgaacaaaaagtttgagaaaaaaatgctttaatgggttttacaggcatgctacaatccaggactgtggtgttctatgtgccgtgtatggtcatattagtagctatttgttgcaagatacttgaagccaaatgtttgcagtataggttcctggctactggttatgctgtgatttcactctgtctatcatgggcagtattagaaaacacactggttttcactatctgggttacaaacactatcattattttacctggattgaagtgcagaacttggcatatcgatgcatgcaatgtgaagaaaaacacttgtaaaacttgtaaatgttcagctaaatctcagatatactgtgggatgagtatctcagggtaagtaccataaaacaaaccaaaaaaatcacttgaattttttccttacagtcagtagctttgtttgatattaacaatacgtatatggtgatatacttngaacttatgttcagaantgtcactggatcataccantgagcattannatatcaagcttatgactacatgaaagatactatctcatgtatgctttaattagagaattatcttctttaaaactaaagctattctttcttaaaaaaaaactcgggggggcgcggtacccaattnccctattggaggggttaacattattggcggtggttacaactcgtactgtaaaaccttgcgttccacctaatcgcttgatact

SEQ ID NO: 512941 - DNA, 987 bp, Homo sapiens
  misc_feature (19)..(19): n is a, c, g, or t
  misc_feature (38)..(38): n is a, c, g, or t
  misc_feature (44)..(44): n is a, c, g, or t
  misc_feature (47)..(47): n is a, c, g, or t
  misc_feature (54)..(54): n is a, c, g, or t
  misc_feature (59)..(59): n is a, c, g, or t
  misc_feature (61)..(62): n is a, c, g, or t
  misc_feature (65)..(65): n is a, c, g, or t
  misc_feature (68)..(68): n is a, c, g, or t
  misc_feature (71)..(71): n is a, c, g, or t
  misc_feature (76)..(77): n is a, c, g, or t
  misc_feature (83)..(83): n is a, c, g, or t
  misc_feature (111)..(111): n is a, c, g, or t
  misc_feature (124)..(124): n is a, c, g, or t
  misc_feature (129)..(129): n is a, c, g, or t
  misc_feature (183)..(183): n is a, c, g, or t
  misc_feature (185)..(186): n is a, c, g, or t
  misc_feature (188)..(188): n is a, c, g, or t
  misc_feature (197)..(197): n is a, c, g, or t
  misc_feature (215)..(215): n is a, c, g, or t
  misc_feature (358)..(358): n is a, c, g, or t
  misc_feature (459)..(459): n is a, c, g, or t
  misc_feature (465)..(465): n is a, c, g, or t
  misc_feature (473)..(473): n is a, c, g, or t
  misc_feature (477)..(477): n is a, c, g, or t
  misc_feature (550)..(550): n is a, c, g, or t
  misc_feature (553)..(553): n is a, c, g, or t
  misc_feature (555)..(555): n is a, c, g, or t
  misc_feature (564)..(564): n is a, c, g, or t
  misc_feature (649)..(649): n is a, c, g, or t
  misc_feature (656)..(656): n is a, c, g, or t
  misc_feature (893)..(893): n is a, c, g, or t
  misc_feature (977)..(977): n is a, c, g, or t
ggcggcagcggttggaggntgtaggaccggcgaggaanaggaancanggcggcngcgcngnncgngcngcnggganncgcgcngctgggcacccacggagcctccggggcngccggcacagtcntcacnaccgtagaagaccttggctccaagagactcctcacctgctccttgaatgagagngnnanagaggtcanaggggaccgctggctganggggggcgtggtgctgaaggaggacgcgctgcccggccagaaaacggagttcaaggtggactccgacgaccagtggggagagtactcctgcgtcttcctccccgagcccatggggagggccaacatccagctccacgggcctnccagagtgaagggcgtgaagtcgtcagaacacatcaacgagggggagacggccatgctggtctgcaagtcagagtccgtgccacctgtcactgactggggntggtanaagatcantgantctgaggacaaggccctcatgaacggctccgagagcaggttcttcgtgagttcctcgcagggccggtgagagntananattgagaanctgaacatggaggccgaccccggcgcagtaccggtgcaacggcaccagctccaagggctccgaccaggccatcatcacgctccgntgcgcancacctggccgccctctggcccttcctgggcatcgtggctgaggtgctggtgctggtcaccatcatcttcatctacgagaagcgccggaagcccgaggacgtcctggatgatgacgacgccggctctgcacccctgaagagcagcggggcagcaccagaatgacaaaggcaagaacgtccgccagaggaactcttcctgaggcaggtggcccgaggacgctccctgctccgcgtctgngccgccgccggagtccactcccagtgcttgcaagattccaagttctcacctcttaaagaaaacccacccgtagattcccatcanacacttcctt

SEQ ID NO: 512942 - DNA, 348 bp, Homo sapiens
  misc_feature (73)..(73): n is a, c, g, or t
  misc_feature (79)..(79): n is a, c, g, or t
  misc_feature (101)..(101): n is a, c, g, or t
  misc_feature (133)..(133): n is a, c, g, or t
  misc_feature (140)..(140): n is a, c, g, or t
  misc_feature (145)..(145): n is a, c, g, or t
  misc_feature (181)..(181): n is a, c, g, or t
  misc_feature (189)..(189): n is a, c, g, or t
  misc_feature (202)..(202): n is a, c, g, or t
  misc_feature (205)..(205): n is a, c, g, or t
tgggcagcaccagtggttaggaaagttacttggaaagggaggtaagtgacaacgaggcagggggaggccccgncccgcncccccagactggtcacatatgngtggcatcatcagcagtgatggcgagagtaantgagctntgccncccccaggagggacccttgatacatgtacaaagcanacatagcnccccttgccctgngtntgtggaacagaaacagcttccttcaaagaagactgcagctcccaaggacccaagctgttgggatgctacttttcagcttcccgctgtccctttaaggggttttttttttaagactcaataaaggagggtttttaatcccccca

SEQ ID NO: 512943 - DNA, 524 bp, Homo sapiens
  misc_feature (6)..(6): n is a, c, g, or t
  misc_feature (11)..(11): n is a, c, g, or t
aattcngcacnaggaaggaaagagctgctgtctgtctatccatctatccatctacttgttggtccacatagtgtggacagagggatctgtgaggggcaggacttggatgagcatctagtgggtggcccccttttccatggtgtcagcagccatggggatgctcctggggtctggctggaccacctcaaaccaagttgggtggcttctgctcttttaggaccatcagacgtatgcacacacgcctaggctcacacccacaagcacaaatacacatggacatcagagaatgtatgtgttgagatagttggtctgaggtcacttggaaatggtggcccctaacctgtgcctgactctcactcaggccctggatcacctgggccagtccagacagctctgcctggtctgcacaggaaatagacagggcttttcttcctggcagaggactggaataagctgggtggcaagctgaaaccactgggtcctccaagctttctcaacttcctttcttaagaaaagaaaaaaaa

SEQ ID NO: 512944 - DNA, 682 bp, Homo sapiens
  misc_feature (526)..(526): n is a, c, g, or t
  misc_feature (621)..(621): n is a, c, g, or t
gagtcagagttttgctctgttgcccaggcggaggttgcggtgagccaagatcacaccattgcactccagcccaggcaacaagaccgaaattctgtctaaaaaaaaaaaagggaagaatagcaaccagtaattttgacagttttaacagtcatcatagtataactttatgtataagttaggtggctcattataatttcagcagtgaaaaaagaaggcattgtagcctttctaatatacaatgatatttagttacatacttgaatttttggtagtttatatgaagatacatttgcctaaagactttgtttgtttaacttgcagtatttgtccttagctaggctaaatcataagccagcttcatgaaaagaaaaatttaaggcttctctgctttcaaatatgaacagttattatctactcaaacaaagcaaggaagtcaaaaaagaaagagcaactttgccaaggctaatctttcccttagactgtgtgggagtaaagcttttatttcttataagaaaaaagatggcanaatgtccaacaggttgagtggctgcaaaatattgtagctctaatagggggtcaatttgaatgtttttttgaaatttatgaggtcttatgacattntgacacatgttataaatgtaatgattttttccaaatcaatatgtataaaaggattgcttac

SEQ ID NO: 512945 - DNA, 433 bp, Homo sapiens
  misc_feature (18)..(18): n is a, c, g, or t
  misc_feature (109)..(109): n is a, c, g, or t
  misc_feature (418)..(418): n is a, c, g, or t
  misc_feature (423)..(423): n is a, c, g, or t
  misc_feature (425)..(426): n is a, c, g, or t
aaactcctttgtggaaantcaaatctgaacatcttgccctcctagctttccccgggtcactttttagcccatttcctatattttggctcttctggttcttagttcgganactgctccttagctaatcaattaaaggctgcccaatctagcccaggcacagtggctcacacctgtaatcccagcactttgggaggctgaggctggtggatcacctgaggtcaggagttggagaccagcctggccaacgtggtgaaaccccatctcaactgaaaacacaaaaattagccaggtatggtggtgggcacctgtaatcccagctactcaggaggctgaggcagaagaatcgcttgaacccggaaggtggagattgcagtgcgcagagattgcaccattgcactccagcctgggcaacaagagnaaatnanntgtctca

SEQ ID NO: 512946 - DNA, 891 bp, Homo sapiens
gtcctctatatcgtggggccggtggtcgcctgtctgtgttgttccctccgcccctgtgtgttccttggggtgtactcctgcgcgttgcgcccatagcggggggggctgttgtctcggtcgtgggtgtagtggacccacccacggcgttcgtgttccgtcgcgttagcacccgtctggttccccgcctgggggcgtcggcccacctgttccatcgtgtggccacaacggggggaaagacgaaattttttgtcggggccactcacacaagggtgctccccgccttgtcgcgggtgaccccgcctatggtggtctccgcccagcacttgctggggatggcgcctcgtgccccccctctttccccacgggggaccttgcccgcccccccgcccgcatgttcgttttttagcagtgccgtgggccgcagttccttcggcggttcttagcacgctgtgcgcaccggtggtaccccccttgctttggtcctatctcggtggagggtcataccccttggggagaccaatctgtcgggttgtttcaacccacaccgctgcggagcgctcccccccgtgggtattctctgtgaaggccgggcttttgcccgtgcaaaatactgccttctagcaccatcactcttgcccagcgtgcaggatctccacaaccagtttcgtcatttgcccagagggacgcccacgacgacggctgctcttctttctcctcgcggggaaaggtggtattcccccctccccaccctgtgctgcaaagatacaaaacccaatagcagtcggcgcgcccctacacggacgcactctggcgtgacaaattgggaccccggggtggaccactcctacgagtccttggcaaaaaaaaatttgggccaaaataaaaataaca

SEQ ID NO: 512947 - DNA, 137 bp, Homo sapiens
ggtaacttgcttacactgtatgttgaaaatgattttttcctgatgctaggaactttccctatggaatcttgttcaaaagaatccacctggcattatatgtttgccttcttctctgttctatcttcctgttcctagta

SEQ ID NO: 512948 - DNA, 511 bp, Homo sapiens
cctgtaccgggtgggagtatggaatgcagagtgtgtggccatgagtccacggcggtgcaggacggggggctaatagtaggtttccttctccacccagccgccagggttcgcctgatgatgagtttctgacttcgtcatatacgaagatgagaagagagtaggggaaggcacagaaccaccaggtaggtatgaggggatacatccttaagagcaaaacccattccagggcaagtaggacaggaaagcagccagggcttgtcttcttcaaagagtgcaaatatcaggatcttgtcctttcatcccctgctgaaagaccgaaatcctcctggtctttaccagatgaccaaagtcggcccaactgaaccaccacgatacttgacgaagaaggctgtgtggcacggtgacattccaggaattttccttcttgtcatacggtccactgctgcccgggtggttgttttccaaatcggttgatccagcgggtccatcccagtccaactcgggaggcccc

SEQ ID NO: 512949 - DNA, 106 bp, Homo sapiens
catgtatcgcggtgctaggccgatggagtagactagagcgcggtgggcttcgactaccagggcaagacggagaagcacgagtcacagagagattactccaaaggtt

SEQ ID NO: 512950 - DNA, 262 bp, Homo sapiens
cacgagggcgactgcggcaaagcgagagcctcggatacgccgctgccgccagcacagccggcgacctgagccgacactggggggagtccgcgagtcccgcactctctcgatgagtcggagaagtcccgttgtatcagagtaagatggacggtacctttgattgtgattgcggtgagctggagccacctgatcactaacagaagacatcatctgttaaccaacattcgccagggcttcctgttgaaataaatatctagcaaca

SEQ ID NO: 512951 - DNA, 544 bp, Homo sapiens
ccaattgacaagattcgagcaagagataaaaattcctttccggtgaatgatagctgtgatcaccccagcacccatttacttgtttctggtccatccgatgagacggatgctctgatgctctgaggcttctgggatggctgggccctggaggcaacgtgctgcatgcgcactctgtcagagtgaacagcaccgcgagacaggccaggctcgtggctcggaagacaaaccccacacacactcaacggggtctgaaaacaaaccccacacgagggctctcacctccttctcctaggtagtatgtattgtacagcacctgtttgatgcagttttaaagtcctctacctattggcactgttcgtgactcgtaggcacattatctgattgttgtacgaaaaacagcttggttactacgacctcagcatactattttagtaacatctggagagaagatattctggtgactgacagtatggtcgggtgtcagcatctaaatgtgcaaatgccttcttgctgtcctgtcggtctcagtaccgtcactgtcatc

SEQ ID NO: 512952 - DNA, 328 bp, Homo sapiens
tgtgaggcagatcgaaaatgaataatcatccagtaatagaaagagcccagctttaaatccggccgtaccgagtccatgttatgtcttggttcctccagagctggactattacaccattattattccaccttagaaggtttgggtgaggacgaaatgcgctaatgagtgtaaagcatctatacctgtatagcatgctggcaaatacctccacagattattcagccagtgctggtattctttccctctccagggtaccaatatttcgggtttccattggcttatctcaggtcctcctgtttcacaccagggttctgggggggcacacagg

SEQ ID NO: 512953 - DNA, 946 bp, Homo sapiens
  misc_feature (946)..(946): n is a, c, g, or t
gtagaatgaatccaatcacaatagtccagctaacatgcaggatgatcgcttgtaccgagagagaacaagactggtaaatatgaacaagcgtggttctgcaatagtagaacaaagctggcgtgattagttgaccccgggtacagtctctaaagaagctggccgatagagaaaagatatagtattgatgtgtctgtcacctccctactcctgtcattagcactttactttagttaagaagcaaaataactgttgtgctgtatccatcttcctgtgccaagttttcctaccccttcgtaccctctccttagaaaaaatcagaaaataccctctatgaaatcaacatgtactgtacctgggttacgttgcagaatagattactaagtgcttcagttgtttctgttgtatttcatctccagtttgcaggcagtgatcttgatgatgtactttaagcttgtaagatgaattgttagtacaagaggtgcttatgcgttaggcttgatgaccaggatgttattttgaacaaaatgattgctgaagtgtttcatcctggctggtccgttcacttgtgtggtttgcaagtggtgtgttgggaatatggctacgagagaatatgaaccaattctgttaaccactttggacggcggatcggagttaaaatccctggggtacttaaagagctcaggggcgaactaagttacaccgttgcgtttactgggaaggcccgacactggggggggcacgtatcgggggccggcttgggggacggcgatctccctttgggcgcggggtgggccccaccgggcgcgaactctggtccgggggttcgtttaaaggtggcccgataaaaccaaggctgaggagagggcgccacaaaaaaagagcggagagaagagagcgaaaaagacagagagaggggggacccaaaggggtcacgaggggcgatagn

SEQ ID NO: 512954 - DNA, 448 bp, Homo sapiens
  misc_feature (198)..(198): n is a, c, g, or t
ctcaagatcaccacgccctagaccttggatggtcactgctgtccaactggtgggtacacagcactgagggttccttctcctgacctaagcagtgatccagaactttccctgaaagaggacatggacatttattgcaagtggtgggtcactcaagtttcctttccagtgtattcttctccattgtcaggtgggcatatnaggcttctagacctaggctgagtgtgtaaagcagcgcttcacagtgtggttcaccttcctagattcctcatagaacacagctcattaagccacagacacagcaccagctcagcccttagctcatcgcccctgctgcaaccaggggacacatctctgtgctagcattcctggggcggcccaccccatccagccttccctatccacacctgcctggccctgcgtgcctccaccttctgcatctgctgggccg

SEQ ID NO: 512955 - DNA, 572 bp, Homo sapiens
cgcctgagtgagcattttcaaataatggcgttcaatatcatcgcgatgttcttcgttatcgcgccagaccagcaatacctgcgcttctcccggctggcggttctcttccgctttgtgatgacgtcgccaccagcgtcgtgccgcgctctgtccaggcaggttttccagctcaaactggagaatatcttcgacaatcggcccttcaaggcgtaccgcgtaatcctgtttagcctctggaccgtagctggacatatgctcggcggagtaattcagcccgccaataaaggctatacgcgcgtcgatcaccacaattttgcgatgcatccggcgaaacacattggtgcgcataccaaaaaggcgagggcggggatcgtagtagcggaacactacgccagctgccgtcagttcattgacaaactcatcgctgagatccggcgaaccgtagccatccagcaagacttccgctttaaccccgcgttgggcttgctgccagtagtgccgcatgcagttgtttgccgccgtcatccccaaaccagataaacggttcaagaatgtgcgttcttgtgcctcgc

SEQ ID NO: 512956 - DNA, 135 bp, Homo sapiens
tcttctacgaaaagggcacattaatgcaaatagtccccagatggcaactacaaagtatcccctggtaccacatatattcattagtgagttaggatatagagcacattatctaaaccatattgtagttaccaaaaa

SEQ ID NO: 512957 - DNA, 334 bp, Homo sapiens
gaggaagcaactaccaggacacatctaaatagaacatccacggatcgaaaaccaatcaagcttgaacactttaggcatttccccacaggagaatacatgcccactcaaagctgcacatgttattttaccacctaaatacaacacggccatcatggatgatcaggtacgctcagattacagaagcaagtccacactgtttaggaatggttcacactagggcccaagagaaatcagaacatcacagcacagactgtgcaggcttctctgcaataatatttctatacactgcctaagactccaattgctaaaattctttaatacatgtatttcttaa

SEQ ID NO: 512958 - DNA, 185 bp, Homo sapiens
taacaactgagataacgaggaaatattctgaaatgggatcccaaatatttcatcttaattttgttttgtggacacctgaccaatacatttttttcaaagacagagccaattacaacagagaggcagtcacagcctaccttattcacatctatcaatgtcacaggtatttgctaatttcttaaaac

SEQ ID NO: 512959 - DNA, 315 bp, Homo sapiens
tcaccacttaaatgactagctttgataaacaatttcagattttaactatgaaaacgacctttccctctgcatttttatcttgattccaattttttttctatggttaaagtgtaaatgttttccgatggtcatttcacttctaacttggtataggaagcttagctctttacatacctatcatgtgccctgtatcacagaatgattcaggaaaaatccacttgggatatcaaagaaaatggaacttctttttgaaaagacaagcatccatgttaactgtattgacacatcctcaataaatcctgttgtctgatgcta

SEQ ID NO: 512960 - DNA, 317 bp, Homo sapiens
  misc_feature (57)..(57): n is a, c, g, or t
gcagaccacgaggtcaggagatcaagaccatcctggctaacatggtgaaaccctgtntctattaaaaatacaaaaaaatcagccgggcatggtggcaagtccctgtaatcccagctacctgggaagctgtggcaggacaatcacttgaacccaggaggtggaggttgcagtgagctgagatcatgccactgcactccagcctggcaacagaacaagactccatcgcaaaaacaaacaaacaaacaaaaaacctggttcaatgatcaaatattgagtcagggataggctaagccagcaacaaaatcaacccacaggga

SEQ ID NO: 512961 - DNA, 167 bp, Homo sapiens
cacgacggtgtctgtgggcgcgccccagcctgggcgcgtccatcgtcgagtaccttctcctctgcctcccccatccttggctgcaatgctgttagggtcaatctcactgatataatcccaatgtcgtcttcatcgtccgtccggtagcacacagatcacccttcgtg

SEQ ID NO: 512962 - DNA, 514 bp, Homo sapiens
agcggacattgcatattactcttgtccaccctttcagcttaagtaaatagtgactcctgatgtgctcaaggtgagtctctgaagacagcagatacttagttggggacttgtatccattctgccattatatgtattttaagaggagcatttaggccatttacattcaatgttggtattgagatgtgaggtactgttttattcatcgtgctatttgttgcctgaatacctttttgcttccattgtgtaactgttgtgtaggtcatcagatttacgctttgagaaggttctatttgggtgtatttcaaggttttgcttcaacatttagaactccctttagcatttcttgtagtgctggtgtggtgatggtgaatcctctcagcattagtttgtctgagaaagactttatctttccatttatgaaggtccctttggctccatatgaaattcttggctggcaattattttgtctgtagaggctaaagataggatccaaatcccttcggtgttgtagggg

SEQ ID NO: 512963 - DNA, 407 bp, Homo sapiens
tggggcaacaatccggcttgaaagaacggggcttgcttcttttttcggcattggggggggtcggccaactgttttcgtggacctccaaaaggggggggcatctggcaaaaaaggcacttttgctggtggattcaagggctctatttcaccaaatatttgggactttgttcacaacaacttgcgcaaaaacaacagacaggcctatgctgtcagtgattaacaggtcatcagactagtgctgggtcttggggtactgcagagctgggctcgaatcccaaagttcgaggtggggggactcaccgctctggccaggggtgctttttgaaacatgtgtcgtggggccgaatgtttgcacaaccacctggcgccgtgcatcgtagagtgacacccccgatacgctctgtttt

SEQ ID NO: 512964 - DNA, 796 bp, Homo sapiens
  misc_feature (761)..(761): n is a, c, g, or t
  misc_feature (772)..(772): n is a, c, g, or t
  misc_feature (796)..(796): n is a, c, g, or t
taaagggccacaccttttttccaacggttcctttttttgccaaagaaggcccctccaggttgcccccctaccgacaggattgccctttcaattaagtatgaattcaaaagctccagtccaggttggcctttctgaagatgaacctccatttggttcttgcccccattccacagcttgcccttgcaagccattgaaccatgggctcccggtcccccgtcagccctcttggtccattccttccaaccagttcggccgcaattgactcccttagcaaccagttttccttcctgaaagagcaatttgggatcctgttcctcaaaataagactcgtgattgcccatcgccccagggctggctttaccccctctctccgccttcaaccccccatgcccttgcccaacatgctgggggtccaataagccacttcggggttactgaccggaaggccaggcagggctttcctcctcttcctcctcccgttcctcgggaggctccccagaccttggcatgggatgggctgggatcttctctgtgaatccacccctggctacccccaccctggctaccccaacggcatcccaaggccaggtgggccctcagctgagggaaggtacgagctccctgctggagcctgagacccatggcacagtccaggcagcccgcaggctggtttgggcctcagtagggcctgctgcttgacccccttcaaaatattcgttctcggcgttctctccaccttcggcttccaatggggcccggtnccaggtaagtnggctccaacggggaggggagaagn

SEQ ID NO: 512965 - DNA, 1213 bp, Homo sapiens
  misc_feature (143)..(143): n is a, c, g, or t
  misc_feature (240)..(240): n is a, c, g, or t
  misc_feature (359)..(359): n is a, c, g, or t
gggcccaggtcgcgccgacagggggctgagggtagcgaaggtagaccgcgccgaggtggaggcgacgggggggctgaaagatggcagctgaccgtcctcttcggtccgactttcaccaggatgtgtgatccatgtcaaagacncaacatctctgcgcatggatgatcattggtatcagtatgtacgtatatacggaactgtctgctttcccgcaaggtcttgggcgtcatccaaggactntggttacctttcgcaattaagggtgcaagatgagactgactgttgacgtaccaatatctgagaaacaggatgctgggtgaccacttcctctgagagatgactatataatcaagatgggnactatacgagggacctcacccgcttatgatagacaacatgtaagagagataaaggtggggattgacgaggaggtttaggagctcggagtcattagagctcaaggtaaccatggctgagcaaaaacaagaattcacacgaaaagcggaatttagagtacgggcgcgggtccaaggattaagcagttggacaatttgagataatattaaatgagaaaccagtatggaattaactgtggtgtatgggacagttgaccggtttgagaagaatgcgtaggggtccaggttaaaggggagttaatagttccaggaattgggggtctggtggaagttgcttcgtaaagagacatgaagttccattttgaacgtatgaaacagggttactttttgggcatgaaatggtatagcacaggaagtaccaaggtgattagagggcgtaaaaagcgcaaaaaaggcatacctggtttaacgggatgtttcccatgggaattaacccttaggaaaaatatgtgcgaaatgaacctggtagtgaccaaatcattccaaataggggtgtgaacatttatttttccaggggtaaagttggagggaagcaacatgaggattccttattgtcctaaaaagggggagcttgagggtgaacgtgggattattagaagaggagtggggcaggacaaaaaagggtggggttcagtacttaagcatccacactggggcaggtatcttttatttagcaccaattaacgtggacaatctggatggcgtatgggaaactacacagggatcctacatggggaccaacttggggcttttaagagggggggcagtaaatcttcatgaggacaattaagtactta

SEQ ID NO: 512966 - DNA, 348 bp, Homo sapiens
ctctgaacttagggtagagagagattcaaccagtcagtgtaaaagttggagataggccgtgcgccgtggctcatgcgccagtgtaatcccagcattgaggaggccgaggcgggtggatcacctgaggtcaggagttcgagaccagcctaatcaacatggtgcaaccccgtctctactaaaaatacaaaaattagcctgatgtggtggcatgcacctgtaatcccagctacttgggaggctgagacatgagaattacttgaacccaggaggtggaggttgcagtgagccaagatggtggcactgcactccagcctgtgcctcagagccaggcctaagttcagagccagg

SEQ ID NO: 512967 - DNA, 1442 bp, Homo sapiens
  misc_feature (838)..(838): n is a, c, g, or t
ctcttgccaaaagagtgcgtccacaagcagaacaacacggagggtttttccttgttcccacaaaaggggggatatgtgttttctcctgtttccctgttgtggggggaacaaaaacccgtcgtggttcttgttgggggtggacgccccgaggccccgcagaaatgagttggtggagccccctcctcccccccatgtgggggtgaagaaggcccagaccacctttgtgggacctattttacgcacaccatggggccttcatctaaggaggggttggtgaattttttaatttcgcctcttggggagagcccgctaatagtcccccaaggggcctccccgaacaaaatttatagctccgcccccggcggcctttaaataggcgcccccccccccggttatatattatcgggagagatttttggcagcgacacacaacggggggcagttccaaaacaacaattgttggcaacatatgtcaacaaagagggtttttttgtgcctctgtgaagagtcttggagaaagaggggagaaatagagagtttgtggaggctctccgccccccggttttctgcttgggggttataaaaaaaagagcggtgtgtgacaaaagatttggggccccccctgaaaagattgtctcgtgttgaggaaaggcgtcttcttggggttgaaattgcgtctgcgcccacgactttgggttagaagataatatggggggtttctcctcttggggcacaaaggccgccccaacattggtgtggttgtttttgagagaggagcctctttctcctcaaaagagactctagaggcccacacccgctctttgtgggtgttctgccnctttgctactgtgtgtgtctgcgtgaagatatatgagagacacacagactacacggttttgtctgcggggtgtggggtgtgtcacattcacaaagcacacaggtgggagcacacacagagaaggcctgtgcttgggagagccttgggccacaagagttccaccccacaagtttctgggctccacgagaagaggctccaagagaaggggctataaagtgagaatattttatatcccctatattatcctcgtgtcacacccccgacactctcttataaatccacagtcggtgggaaagaaccggtttcacgagactgttttgttttcacaatgtggccacatttaaagtttatagtatagtaaaaagagcttggtgtaaatgagatataccacacatgcgacatcctggtaaaacccttcacagaaaggagaaaggaggaatgttgttgtggagccacactcttggtgtttcttttttgcgctgtggcacgttttaagttagttagctttttaaaatcacgtgaactcttttaaatgggaaacacacacttgagcccaaaaatttgtcacagaattttgagaccccattaaaaaagttaaatgaga

SEQ ID NO: 512968 - DNA, 136 bp, Homo sapiens
cggtccgacgttgaaatgtgtttgttactttgcatttctgtagtacagtcagcatgcttactgatggggatatgttctgagaaatgcactgttaggcaatttcatgttacgtgaacatcatagagtgtcacttacg

SEQ ID NO: 512969 - DNA, 196 bp, Homo sapiens
tattaatgtgagaagctagcaaaatgccacaggaaatattaaatcaggatgctgcatggggaacaggattgctggccatcaattttaattgaatttttgacgggtcatgctacgttacattattgctgaaaaaaaagtgcaactcacatactacaaagagattttttaagctttaaaaaaagtttggtatcttttg

SEQ ID NO: 512970 - DNA, 637 bp, Homo sapiens
tgtgatggcgggcgccgtagtcccagccactcaggaggctgaagcaggagaatggcatgaacccagaaggcagagcctgcaggggccgagatcgcgccactgcacctccagcccgggcggcagagaaagactccatctcaaaaaaataaaaataaaaaaaaaaaaaaaaatttctgtgcttcaaaaggcacctaagaagaacggtaaaaagataatctatataatgggagaaatatttgcaaatgatatatctcataaaagacttgtacccagaatacatgaaagatctcacaattcataataaaattaattatgatcaatttaaacatggggcaaagaatctaaacagatatttctccaaaaaatatggtaccaaatggtcaataagcacttgaaaagatgtcaatatcattagtctccagggaaacacaaagtcaaaaccaaataaaataccatttcacacccattaggacaagttaagaaccaaaaaatcaaataataccaagtgtggaagatggataccagagatatagaactctgtgtacactaactcgtgggaataaaaaagtggtacagctactatggataacagtcgggcagttctcaatgaacacagttacctattttttcccaggaa

SEQ ID NO: 512971 - DNA, 351 bp, Homo sapiens
ctcaaaacctacgtgtgggaaatgcaaatggtgggaaatacccttgtaaatatagttattttgaaagcagtggaccaggtgtggtggcacactcctgtaatcccagccttttgggaggcggaggggggtggatcacttgatgttgagaccagcctgggcaacatggcgaaaccgcatttctactaaaaatacaaaaattagccacgcatagtggtgcatggctgtaatcccagctactcgggagactgaggcaggagaattgcttgaacctgggaggcggtggttgcagtgagccgagatagtgccactgcaccccagcctgggtgacagagcaagactccatctcaaaaa

SEQ ID NO: 512972 - DNA, 465 bp, Homo sapiens
tcccatctcaacctttccaagtagctggagctacagaggtatgcaccattgcacctggctaatttattttttatttttatcttttggtggagatggggtctccctatgttgcccaggctggttaggaactcctggctcaagctatactcttgtctcggccttccagactactaagattaggccgggcgcggtggctcacacctgtaatcccggcactttgggaggccgagggggtggatcacttgaggtcaggagctcgagagcagcctggccgacatgatgaaaccccgtctctactaaaaatgtaaaatattagccagttgtcgtggtgcgcgcctgtggtcccggctacttgggaggctgaggcagaagaatcgcttgaacccgggaggtggagggtgcagtgagatgagatagcgccactgcactctagcctgggcgacagagcaagattccatctcaaaa

SEQ ID NO: 512973 - DNA, 625 bp, Homo sapiens
ggcggcggcggccgaggctgaaggaagatggcggacggcgtggaccacatagacattacgcggatgtcggcgaagagttcaaccaggaagctgaatatggtgggcatgatcagatagattagtatgacgatgtcatatctccatctgcgaaataagtggagatgccccaggaagaccgagattacgtgggatactctcccaccaacgtgttggtgatgcatgtgggtacaaggagcagcgacgcgaaatgttgtctgatacatatagctggaacaggagaacttgcagttatagtagtaggaaagtctaagcatgtgtggacaacagcatgagagacttagactgaagcagttcatctcgttcgggcagtaaagtgactagtttccggagcactaacaatcttggcgaacaactcagagcaagatcggccagtacaaacggcggttgtgcccctgtgtagcgtgtgggactctgacagcatcgttcacaagaacagttcacatggatctcgttgaccgtagagaagagaactctcatgggtcagcaatcctcgtggtaagctccgatgcaaataagacagttgccgtgagctcaagtctggaagactgcacggtccagggacaaa

SEQ ID NO: 512974 - DNA, 430 bp, Homo sapiens
atccggctgacggaactttaagtccacatgtcatactacttatagtgattaaaaacttaacagataatcgattgttttattttttttcttttgagacagagtctcgctcggttgcccaggctggagtgcgagggcgtgatctcagcttactgcaacctctgcctcccaggttcaagcgattcttgtacctctacctcccaagaagctggaattacagacatgcaccactatgcctgattaatttttgtattgttagtagagatggggtttcgccatgttggccaggctggtctccagctcgtggactcaagtgatctgcccaccttggcctcccagagtgctgagattacaggcatgagccagtgtgcctggcccagataatcaatttgaaacatgcgtcacaaatcataaaaagttccgttgaagccgt

SEQ ID NO: 512975 - DNA, 871 bp, Homo sapiens
atggatagaccccatttgtttattcacacatcattggacattggattatttctggttttggctattatgaacaatggtgctatgaacagttgcgtacaagttttgtgtgaacatatgttttcaattctctcattatatacctaggagtagaattactgggtcatatggtaactgtatatttttgaggaactgccaaactattttcccacgtccatgcaccatttcacattcccaccagtaagtaagagggttccaatttctgcgcattcttgccaacactagttattatctgactttctggttataatcattctaatgagtgtgaagtagcctctggtgtcatttggatttgcatttctctgatgagtgatgctatcaagcacctttgctggtgctgttggccatatgtgtatgttccctggagaagtgtctgtgctgagccttggcccactttttaattaggcgttgtctttttattactgagttgtaagagttctttatatattctggattctagacccttatcagatacatggtttgcaaatatttctcccattctgtgtggttgtgttttcactttatcgatatgtccttagacatattataatttgtttttaaaagtgactgaattgggtgtggaagtgggtcaagctggtaatccagcacttgggagacgagtgggtgggtcaatgaagaggcaggagtcagggaagctggcagttaggaaatggttctcttaatacaatgtcgggtggggggtggaaactcaggggggagacatttacgggagaggggggtgaaacgcagatttgttgaaaaaaaaaaggggggcaaattgggggggagaattcaggtaacagcagaaggagac

SEQ ID NO: 512976 - DNA, 420 bp, Homo sapiens
  misc_feature (297)..(297): n is a, c, g, or t
ggttcccatgggtttgcctggggggtgtgagagagacacaggaacagggaggcagtgtaataagcagggcctcaacgttgacagagctgggtttgagtcctgactgtgctgctgactggctgtgtgaccttaggccagtcacttggcctctctgagctttgctttcctcctctataaagtgaggccacaataaagcccatcccattgtgggcattgaatgctcagaacaatggaagctgttattgttttcagcggttgtgtgtgagagagattgacagatgggcggggcatccacgntctctgtgctcctggcacccaggccctgggctaaggggttggtctccacccaagggccaggatcccatgggtggttttatatccaggctccttctcagaagctgcgtagggggtgggtgcacc

SEQ ID NO: 512977 - DNA, 252 bp, Homo sapiens
tcgtgagtccgtagagcttcatctttcttttcaccgtagtgtggctgatggcattgtattagcaaactcatcatagacatcgtactacacgacagtaatacgttgtagaccacttccactatgtcctatcaataggagctgtatttgcaatcataggcggcttcattcactgataacccctatactcaggctacacccgtagagcgaaccatacgctttttatccatttcactactcatattcatcggcgta

SEQ ID NO: 512978 - DNA, 176 bp, Homo sapiens
tattcatacatcttctgtcgtagtgtcattagctactgcctcatctgtttttgctagtcgtgtttgttcaacattcaggttgtcacgttgcttattcatcatgtcagtcaattcggcagtatcattaacctgtggcgcaaacttatataagagctcttgcgggaactgtgcgcctg

SEQ ID NO: 512979 - DNA, 325 bp, Homo sapiens
  misc_feature (72)..(72): n is a, c, g, or t
accgtatcttgtgtgtgccagtggtgtgggtgtgtagttgtatgaatgttctctacactactgtgtgagtgnacacaacatcagatgtcacagctctcagagctagtcagaagagaaatcaattgtgtctaacccatttgcatattgacttgtcagtacctttaactcaatttaatataacaagaaatcgtaaaatacttataacctatcttagagaaatgagtgctggttttgagagctgtttttaacctgaaagattatttctagatgggtagtgctttgtgctggtttctgcttccatatatatcccagcacaagaaccaca

SEQ ID NO: 512980 - DNA, 402 bp, Homo sapiens
ggaaaaatggctcttgttcattgttgccaagtataggatccgggtgtttaaagcaatataagaatggtagctaagcagaaatgagtgtgggaagttatgttcatccttccctagagaaggtctagaatgcatgttgagaaatttgaactttatcttgtaggcaattagaagttaaaaaggtaacgtttgagctgttattaataggcataattttatgtgttttcctcggctcgtttcggttagtacgtgtgtttctgagatggagtctcgctctgtcacacaggttggagtgcaatggcgtgatcttggctcactgcaccctccacgttttgggttcaagcgattctcatgcgatagcctcctgagtagctgggaatgcatgcgtgccacaccatgctcggc

SEQ ID NO: 512981 - DNA, 156 bp, Homo sapiens
gttcaacctgggctaaaaatcactgttgtgagaactccaccgacgccgcagtttgaggtcacaaggacgctttgccagtcagtccttagaggacacacagatgccagtcggacatctctagacttgactgacctcagcatctctaccgcaagccct

SEQ ID NO: 512982 - DNA, 935 bp, Homo sapiens
  misc_feature (45)..(45): n is a, c, g, or t
  misc_feature (62)..(63): n is a, c, g, or t
  misc_feature (66)..(66): n is a, c, g, or t
  misc_feature (72)..(72): n is a, c, g, or t
  misc_feature (75)..(75): n is a, c, g, or t
  misc_feature (182)..(182): n is a, c, g, or t
  misc_feature (184)..(184): n is a, c, g, or t
  misc_feature (192)..(192): n is a, c, g, or t
  misc_feature (307)..(307): n is a, c, g, or t
  misc_feature (412)..(412): n is a, c, g, or t
  misc_feature (505)..(505): n is a, c, g, or t
  misc_feature (538)..(538): n is a, c, g, or t
  misc_feature (667)..(667): n is a, c, g, or t
  misc_feature (672)..(672): n is a, c, g, or t
  misc_feature (684)..(684): n is a, c, g, or t
  misc_feature (689)..(689): n is a, c, g, or t
  misc_feature (691)..(691): n is a, c, g, or t
  misc_feature (694)..(694): n is a, c, g, or t
  misc_feature (698)..(698): n is a, c, g, or t
  misc_feature (704)..(704): n is a, c, g, or t
  misc_feature (722)..(722): n is a, c, g, or t
  misc_feature (794)..(794): n is a, c, g, or t
  misc_feature (842)..(842): n is a, c, g, or t
  misc_feature (870)..(870): n is a, c, g, or t
  misc_feature (874)..(874): n is a, c, g, or t
  misc_feature (912)..(912): n is a, c, g, or t
tattgtttattttaatgaagctggtacagacaatgtccatttggngcccatttcccaggccnnacngtacanatngcatccaaaagggcagtgttctgttgtgttcatttctgcatgtgtagctttattaattgctaatgaaaattagaacttttctgggttcttctgacaagatttttaananatcttaanatgccttttcttcagtgaagccatctttggagttagtcattactctcaccttatctgtcatcttgacttcaacctgatattcctcttcttttggtccagaccctcaaattttaanagtagcttcaggttagggaaaggtcatttttccacagttcagttctctgaaaaacttccatctcccactgaaagtcacagtccgggggtgaagtaatcacatgcnagaacatcggggccaattgggaggtcattatgaacacttgcattggtcgatcttatttatcaccacaagcctgaaaatgcgatgtcctggaangggtgacctctctgtgcacacgtgatttttagnagggggggggtaatatgaggggggctgaggcttggtcaccaaaaatcagcacaatgaaaacaaacaataatgaataatgagcactagaattcaaattaccggatgtttcagggagatggggtgccggtnttccnttccgttttggncaccncnttncaanagagcnatttttgagcgataaaanaggattgagggaaaagaaaaaaaataaaaagaatatctaaactgttgaatgacccccgtttgttcctgatanacttcaatcacatcttcttcctccattcccagttcttttggagtatgnttatcagcaattctctgaccctcaaagngaancctgtgtgaattcattggaacaccctgtctttgacaanatgattctttgagtttcttgaga

SEQ ID NO: 512983 - DNA, 122 bp, Homo sapiens
aacaccagtacttatgacactcaaagattaggggaagagagaagatttcagagatgggacgactggtggaaatgttgggctgactggaaggctggtctggtcgaaggcacgagtttttctcc

SEQ ID NO: 512984 - DNA, 280 bp, Homo sapiens
gcgccatggggctcagcgacggggaatggcagttggtgctgaacgtctgggggaaggtggaggctgacatcccaggccatgggcaggaagtcctcatcaggctctttaagggtcacccagagactctggagaagtttgacaagttcaagcacctctaagtcagagagacgagatgaaggcatcttagagacttaaagaagcatatgtgccacactttctcacacccccttggtgtgcatatcttaagagagagaggggcatatatgagagcacagattta

SEQ ID NO: 512985 - DNA, 130 bp, Homo sapiens
gaacttggcaccttggcaggcgttgtactcatcgtccttgatgagactgcgccaagccaaagtctgcgatcttgcacgccagctggtccccaaccaggatgttggctgccctcaggtcgggggatcctct

SEQ ID NO: 512986 - DNA, 140 bp, Homo sapiens
ggttcacaagcccagggggccaggatatctagaaaagaaggtgttcctaagtaagtcccttccgagattgaattgaggtggggacgtaaggcactgagaccactcaacccccacctgggaggcgcaaagagaagccagag

SEQ ID NO: 512987 - DNA, 585 bp, Homo sapiens
ttggagcacactctccatctctcctcaccccaggcctggaaccagtaagttgctttctgtctctacggatttgcctattctggacattgcatatagacagaatcatatcatgtgatcttttatgactggcttctttcttagcataaacttttcaaggtttatccatgatgtggccaatatcaggactacattcctttttgtggctgagtaatagtccattgtatggacataccacattttctttctcatttatcagttggtagacatttagcttatttctactttttggctattaggattaacgccactatgaacattcatgcacgagtttgtgtgtggttgcacagatgtaagttttaatttctcttgagtatatacttaggagtagatttgctgggtcacatggaaactttacatttaactttctgaaggactgccaaactgtttttcacaacagtggcaccatttcacattgccatcagcaatgtacaagggttcaaatttctccacattctagcccacacctgttactgatttttttattatagcttccctagagagtacaccgtggtgtcttactgtggg

SEQ ID NO: 512988 - DNA, 156 bp, Homo sapiens
caggcgggagtgcggggcggggcgcggcgccctggccttgcgcgcttacggggtcctctccgagccgctctggggcctctgacttaaaatagggaggactgggccaggagatcgagacaatcctggccaacctgttgaaaccccgcctctactaaa

SEQ ID NO: 512989 - DNA, 398 bp, Homo sapiens
cgggccccccccgggggccggcctgggatcccggttaagggccggcggaaaaggcccccatgggggggggacccccccctccccccacaaagcccggggggcaggggggggccagggggctaatcccggggcggggtccccttacccagcgccccccctgggaaccccgggcaggggaaaatggggaggccccccaccctcccagtgggggcggggcagggcctggcctgggaaaagcccccctgccgatccccggcctttggggccccccccccaaaccacccaaacccgggcccccccagtttcccgccccccccccccccccccccccggttttttttttttcaaaaattttttttttttttccctgtttttaaataaaacccaaggttttttta

SEQ ID NO: 512990 - DNA, 1074 bp, Homo sapiens
catgcgccggtgagctgcagcgctgagacccccagacctgaccccgtcgtggctcccgtgcggggccccatcatgttctccaggaagaacacgagagctcatgaaaaccccttccatctcgaaaaatgaaccgctgcgtggaatgccccagcccgcacgccctcggtgggatgctgcccaggaatggatggggctgacgcggtgttcccactgtagaccaagcctgtgagccgcccgctgagagatacactcacgtgctgtcataaagtgcccacagggaccctctaagctgtgtccacccatgctgagccagcacgccatgctgctggataggcttcccacctgatctggtgtgctagccctaccatggacaacttgtggctcggtatgacaccaggagacccacttgacacggccgctcagcccctggtgcagacgctagcaccacccgacggcggtgcccatggcccagagacagtcagatcgacggacaatctcccccattcttgctgggcctgggcactgtgtggcctcggctctctgccttgcagcggcccttttcagcaacacctttcacgggacgtggtgtcgtttggcggtggacggaccctccatttggactggccccgcctgccctgcgtggcccctctagagtggcctggcgctgacggcatcttcgccgatgctaactggcaattccacaatccaatcctcccatcagatcccccgcctggcacataaaacacaccgtgctgcggcacgccttcaccggggatgtccgggcaaccctccatcagcccaagggatcaacagcctttccaaaatatagagcagcactaacttgaactctaggacacaaccatcgacgtcccgcccaaaggaccctggtggaccccagcggcagccgtgccctacacatcaagcacagctcaccgccagaccaccaattgcgattgataattcggcagcatcccctctctacacgtgtcccccgtgagaacctacgccgaccccgtgtaagccgtaatcacaccgatctgtccgcacacacccacctgtgcacccgcgcccgct

SEQ ID NO: 512991 - DNA, 544 bp, Homo sapiens
ttgagacagggtcactctgtaacccaagctggagtgcgggtggttcaatctcggctcactgcagccttgacctcccaggctcaattttcccatggacagggttcagggggacggttttcggataaaactgtcccaccttagatcatcaggaattagtttgattctcataaggattgtgcagcctacatcctttgcttgtgcagttcaaaatagggttcatgttcctatgagaatctattgccaccgctgatgtgactggaggtggggctcaggcggtaatacttgctggctcctttgtacacctcctgctctgtggcccggttcctaacaggccatgaactggtacccatccacggcctggggcttggaaccactgctttaaatcctaaattactttaatacctaaattcctaggttacttataatacctagtacagtgcctacttttaactttatgggtgtggattggacttagtattgggctcaggaaacatccaatttttgctttttgcaactttgtgaaatttaacattttttggaatat

SEQ ID NO: 512992 - DNA, 182 bp, Homo sapiens
caagtgagcctctcagttaagaagactgaatataaagaaagatgatgagtttttccatttcgcctcctgtgctttgccatcgggccttgctgggtgtatactattacgcagactggtcatgtctcttggggtcggcctgctcaccttcgcctcctgaaacacgtgcatctccttagacttcg

SEQ ID NO: 512993 - DNA, 119 bp, Homo sapiens
gaacgtacgtactaacatcgtagagacgctcatagtaaatagaaagcgttgaacatatcggcacgccatcatcctagtcctcatcgccctcccatccctacgcattcaggggctcaatg

SEQ ID NO: 512994 - DNA, 255 bp, Homo sapiens
gatgggtcacgcattccaggtcttggtggtcatagaagttacactggtttggagagcagcagggggtctggagagaagaccaaagccggttccccagaaggccagggtagtaggcaaagtagaccagggagtggtcattcggctcataggaggagagtccattgcccacagccagcccctgaaggttcatgctggggatcctgcatgaccagcacggccaggggggggatgtagatgccagcatagctctcccgg

SEQ ID NO: 512995 - DNA, 436 bp, Homo sapiens
tcaacacggagcccatataaaatagaggctcagtaaggctagcacataaactaccaaacaatgctcaataacagagtcaaagcttgtagtacagcatgtagctatgatggacaggtccccctcctaccattctatgccctctggagaagtgattcctgcagtgtagaaatatgaacagtggtatggtcgtgatttggggaaaggggaaagagaagcagtaaatacactccttatcctccccaaattttaagctctattactgtgccctaagtcctagacacacattagactacagggagttttgtcttgaagaccaggtcccactgacccctggataaaaagtctgctataaaatgggaaaacaacgtatgagcaggggtaattaggcacttaacagtatactcaggtgtactacgtactggcccttccaggataa

SEQ ID NO: 512996 - DNA, 826 bp, Homo sapiens
tgccgctgccaccgaaccccgtcatggagcggcgtcgctgcgcgcctgctcttcggcgccgctgggctgctgctcctgtctcctgccccttctccttcgttccttcctcttctggacaccgtgcgggccctgcgagccgggctcctgtccgtccctgcccccgttgggctgcctgctgggcgagacccgaagacgcgtgcggctgcgtgcccttatgtgcgcccgttggcgagggcgagccgtgcggtggagataggcgggtgccaggcagaggagtgtacgtgccgcgccgaggcagtggagagtgcgtagaaagatgccgctaacgagggcggatcggaggtaaacagccgtgggctaagcaggccaggcagagtccgggtcgtaaggcaggcgtgagcggtgtagcaaaaagccgcaaccacgggtgtgcaggcgaggacgggacggcaaccgaccgtaaccacgcagaaggcgggactgccgagaatgctgactgccgtgcaaggccaacgagggcgcccgagaagccgacggcgggaggaaaaggacccatcaaaccagggtcacgcgaaaggggcacccatggctgaagcaagcgatccctaataccaattaaagtagaacaaagcaccacccccaaaagtggaacaattcctaggaaacttggtacactagggtgttagccccaagcgatcgcaaacatatgaagggcctccgtacaatagggtccaattccagtactatgccccagaccaacccttggtacactcactgtcataggacaccaaatggtcacaaaaagcggggtcacaataattgggag

SEQ ID NO: 512997 - DNA, 374 bp, Homo sapiens
gtgccccacctctttgcttaaaaaaaaaaatgtcaatagccaggcatagtggctcacgcctgtaatcccagcactttagaaggccaaggcgggtggatcacctgaggtcaggagttcaagaccagcctggccaacatggtgaaatcctgtctccactaaaaacacaaaaattagtcaggcgtggtagtgggtgcctgtaatcccagctactcgggaggctaaggcaggaaaatcacttgaacctgggagggggaggttgcagtaaaccaagatcgctccattgccctccagcctgggtgacaaaagcaaaactccatctcaaataaataaaaaggaaaaaaaagtcaataaactgtacaaatttaattacagta

SEQ ID NO: 512998 - DNA, 257 bp, Homo sapiens
aactggcccggggaaagggggcccccccgggttttatctttaagggttgccctttcgccaaaaaaatgtttttcccatgtgtccaaacctatgtaatgtgggtggggggggaaatcccccccccaagggtttgtcccccgggggggcccccccccatgtggtcccccgtcctaaaaaaatttccgtttgtgctgccaaaccaaaaccaggggagggggttttcttttttgtaaaaaaaaaaaaccggggggttttta

SEQ ID NO: 512999 - DNA, 281 bp, Homo sapiens
cccggatgacactgcacacatatgtactaaacatatgtgttgctatttcatcattcacatccttcttttctatgcttggtgtaattattgtaaagataaattatatagtttttttgtatgtgtgttggtagtatatgttcagaaggcaagcatcttcattttgctagctttgcagaatcttaaaatgtgtactcgttatttctaatgatgtaaaaaaaaatccctagtcctgtttagcatttgacttttttatatgttttaaatgttgcagtgtgcttccg

SEQ ID NO: 513000 - DNA, 314 bp, Homo sapiens
actctcgttcatcttgttgatggacatggtggattgtctccaccttttggcctattatgaattaggctgctgtgatccacttggtatttaaggcatctgtttgctttcctgtcgttcctgctttcagttgttttgggtatatacccaggtatggaattgctggatcataacgtaaatctatgtttagctttttaaagaactgccaaactgttctctatagtggctgtaacatcttagcatccccacctaggaatacatgaatgagagttccagtttcttcagatcttggcaatacttatttgctggtttcccgg

SEQ ID NO: 513001 - DNA, 858 bp, Homo sapiens
agcacaaaaaaaaagaacagtccgctcttgtggttctgtacccctttcgcaacacatgtcccttgagagtgtcacagagaagtctgggttaaacagcacattgggggtcacatcctaagccctttaataggggcttcccataatttgatgtatttgtccagtcttgaatctcgtgattagcacttaacctgtttctttgaaaattatcgcgcgttttacatcaccgtcgttcttttaaaggaaattgcgcaatttctgtgatcaacagcaagtcccgctcggggggcatttgtccccctcccccctccggtttgtccaccccccattcgcgtgagggtctccctagggcggcgcagcctaagagtttcaaccggcgtgaatagcagaccccttcttcataagcgtgacaaggactctcctgtcctcctatggcggtcacaacagaccagggtgcggtgacatctgccgcgcagtctccgccccccggtaagttctaccagacgtgtagacaccggggactctggcatgacaacccagctcagatcggaaaccctgtgtgcgagacaatccctgcttcgtcagcccttggcaaactagctacggatcaccaaagccttgtctctcacatgccaagttctcttgttacgctccaaccacaccaccttatgtcgatagtgtcatggcgaccgatcataaacgccttactccccttatataacaccaccacaacgggcaccaattttatctgagcgtcataaaatgcttttccctcaaaaagtagtagactccccatcttcatatccaccaggggtttgggattcaattagtaaacagaccacaaaagttcccccacataac

SEQ ID NO: 513002 - DNA, 661 bp, Homo sapiens
  misc_feature (75)..(75): n is a, c, g, or t
  misc_feature (89)..(89): n is a, c, g, or t
  misc_feature (141)..(141): n is a, c, g, or t
  misc_feature (159)..(159): n is a, c, g, or t
  misc_feature (281)..(281): n is a, c, g, or t
  misc_feature (305)..(305): n is a, c, g, or t
  misc_feature (461)..(461): n is a, c, g, or t
gtcgcggaatgcagtctgaagtgaaaacaaagttttggtggcttggacaggagctgcagcagcccatttcaaagntgaaggcccggctnaacgtgtgaaaaagagctcgctgggccccgggccccggcccccagacccagnaggtatttcccatgcgcnaagtggagcccccagccaagaagcagccaccccagcagagggatgcgagggatgatgacattgccctgtttggcagtgacaataaggaggaggacaaggaggcggcacacctgcgggaggancggcttcggcagtacccggaaaanaaggccaaaaagcctgccctggtggccaagtcctccatcctgctggatgtcaacccttgggataattaaacggacatggctcaactggaggcctgtgtgcgctctatccaactggacgggctggtttggggggcttccaaactggggcccgtgggntacggtatccgaaaactacaaattcagtgtgtggtggaggcccacaaggtggggacaaactttctggaggaggagatccccaagtttgaggagcacgtgcaaagggtcgatatcccagctttcaacaaaatttaaagcctaagtgtgggtacgggggggggggggtgaggccctcccccaattaaaaactgaggccggca

SEQ ID NO: 513003 - DNA, 406 bp, Homo sapiens
ccgcggtgtgtgcatgcacttacactacacgtctgatgttcattgacacaggtcacacagtctcacatgcacacatgcatgcacacaccagacgatcactctcacattcgcacagtgtcacacacgttcacattcatgctcaatcactcaggttcacatcacacacattccttcacacacaatgtctctgtcacatgttcacaatatctcacacatgttcacacacattcacacatattcacactcacattcacacacgtctcacacatattcacacatacattcacaatgtcacacaagttcacacatgttcagtcatccacattcacacagtcacattcacacgttcacacacacacaatatctcacgttcacattccatacaccgccatacatttgcacacgg

SEQ ID NO: 513004 - DNA, 990 bp, Homo sapiens
gagccggttgtgactgggggtgtgttgtgtgtgtgtgtgcggtgctgtgcgtgtgtcgtagtattctcttgtgggagactcggggacatcccccctgctggtgttgtggatgcctgttgaccactagtggtctgacatgttaagaagccagatgcaggtacagaagataggtgctgcgtggcaaggaggagaatggatgcatgaaattacatggaatgtccgacttcgcctcctggtctcaatggcagttgccactcgtgtgctctggagtggggccgcagagttcgatgtcgacgccgggagggcttgacaggcgggcccttggatcaccgtcgtggaggtgctaggactgtttactctctagagagtgcagaggtgggaataacggaggaagagctggctggtgggaacgtagtgggactgggaaaccatggggtacgcgggatactgagggactatttgctctgctacttgtaggtttaaacttaaggaacgaactgagggggtcgtagctcgatagatagttgtcccaggtgagtggttaggttcaaatctttttaagaagagtataagaagaaggtggggggggttaaataagaactaaagttgggggatgtacaaaaatttgttgtcaccaccaagcgtgtaattgggtggatggacaaggtttatgcttctcacatgagacgagtaggggacttgctaaattccttcgtggtggacacatagggctccaagatcgtgttaaccttagggggaccggaggctgaaataaaggtatttggagaagagggtacgacagggttgactttcgggccgacgcgattttcaaggtttggttttcaggagagcacaaggcagggtgccttggtaagagagttgtcgaaggaagttttattggagtgtgcgctgatgggccacattggggaaaggatgttgggtagtcacattgagaaaaagggggcaatcaggttttggaggaacacggga

SEQ ID NO: 513005 - DNA, 347 bp, Homo sapiens
  misc_feature (48)..(48): n is a, c, g, or t
  misc_feature (72)..(72): n is a, c, g, or t
  misc_feature (74)..(74): n is a, c, g, or t
  misc_feature (96)..(96): n is a, c, g, or t
  misc_feature (130)..(131): n is a, c, g, or t
  misc_feature (175)..(176): n is a, c, g, or t
  misc_feature (188)..(188): n is a, c, g, or t
  misc_feature (194)..(194): n is a, c, g, or t
  misc_feature (197)..(197): n is a, c, g, or t
  misc_feature (199)..(199): n is a, c, g, or t
  misc_feature (206)..(208): n is a, c, g, or t
  misc_feature (210)..(210): n is a, c, g, or t
  misc_feature (212)..(212): n is a, c, g, or t
  misc_feature (233)..(233): n is a, c, g, or t
  misc_feature (305)..(305): n is a, c, g, or t
tttagtatcaagcaagaggagactttgcttatcactacagaacatttntatgacttgagttacaaaagaatncnacattatttgcacttgtaattngcttccctttttacccatgtcggccagcctcaanncaactagcatatggctgacagataaaataactatattctatggnnacctttacaatntgaggngtngnttatgtnnnangngtagattaacatattttgttnacctattttttgtttaacactagttcactccaagttattttttttccttttgcatgacctatctttttcatnttcagactgggagaataacaaaattttacatgtctttccccc

SEQ ID NO: 513006 - DNA, 744 bp, Homo sapiens
gggctggatcgccaggtcaggagaccgagaccatcctgggtaacacagtgaaaccccgtctctactaaaaacacaaaaagttagctgggcatggtggcgggcgcctgtagtcccagctactcgggaggctgaggcaggagagtagcgtgaacccaagaggcggagcttgcagtgagccaggatcacgccactgcactccagcctgggcgacagagcaaaaaaaaaaaaaaaaaaaaaggaataacacgtgagcttaacagtgatgctctgtgtacaattccattggaatctagaaggtgtatcttatggaatatccatttataaaattcacaaaatattgggtgtatcctaaaggctttatttaagcaaagcatttttaatagaaccgttgccgggccaccttgtagttaattggtttataattaaactctaatgaagaacgggggctaactttcaacatttgggattacacagctgcatgtggcatcaggatcgtgcgacggcagggggatgtcatttttacaaaggatccatgtgtatgattcagggctcatccacctaccacttcattttaaggcctggtgggcgggcactgtgtccagctaatcgggaggtgaaggcaaggaaaagcgtgacccgggagggcggagctggagtggagttgaagatccgcaccagttggattcaaggccctcagcgtggcgagcagagcaagacccgggttcgaacaaaaaaacaaagggg

SEQ ID NO: 513007 - DNA, 475 bp, Homo sapiens
  misc_feature (185)..(185): n is a, c, g, or t
  misc_feature (299)..(299): n is a, c, g, or t
  misc_feature (350)..(350): n is a, c, g, or t
  misc_feature (454)..(454): n is a, c, g, or t
aatttctgttgaagaaatgcatgcacgcatgaatgaatgcatgagcaaacaaagattgttaggcaggcaagtgctttcccgccagggttagagagattatttagcagtgcaaaaagaccatggactaaaaaggaatgagataatgccccttgcagagacatggatgaagctggaagccatcatcntcagcaaactaacacaggaacagaaaaccaagtaccgcatgttctcattcataagtgggaactgaactatgagaacatagggacacagagagagtaacagcacacatcggggcntattggggtgggggtgagggtgaggggaggggaagtatcaggacaaatagntaatgcatgcagggcttaacactagggtgacgagttgataggtgaagcaaaccaccatgccacacatacagttatgtaacaaacctgtaagttctgcacatgtntcccggaatttaaagtaaaat

SEQ ID NO: 513008 - DNA, 146 bp, Homo sapiens
ttagatgtcccgcgacgggaacagacgctccaaagtcacttcccctcgcacatctgacttcggggcagaaaccaggtagtcatgacaccagcgatgggagcactataggtttctgagattcctagcagaacgacggaaacgtcttg

SEQ ID NO: 513009 - DNA, 298 bp, Homo sapiens
  misc_feature (263)..(263): n is a, c, g, or t
  misc_feature (286)..(286): n is a, c, g, or t
cgcagtgcctccgccaccaccgccgcctcctcttccttggccaccccagaactgggcagcagcctcaagaagaagaagcggctcttccagtcagatgagggatgtcattaggctaataggccagcacttgaattgcttagggcttaaccagactgttggatcttctaatggaaggagtctaggatgtctgtttagaacatccttctgtctatccaaatttccgaaattagtgtcatggaaagagacctgggtatatggcaganaagtgtccctgtatgtaactatngccatttaggtg

SEQ ID NO: 513010 - DNA, 209 bp, Homo sapiens
ttttgcttctgtattgtgcagttacacaataaggtaattagattatagaagtactcagatcactgtaagtggatgtatgtattagttaaaacttgagtggtttgcttttggctgtttagatcaaagttttttctgattcttctgtcctcatggtgaacataagccgtgtagttgaaacagtcaaacttattttagtaatgttagagata

SEQ ID NO: 513011 - DNA, 178 bp, Homo sapiens
aagcatctcatctatatcccaaatccaagaaatatgggtttagccatatagtaaagtccacaaaatgcaatatatgctattatctttactagtgctagtgtatatataaaataaaagagacaagattattcactgtatattaaacaacgattcggataaatacctcgaaacaagtagt

SEQ ID NO: 513012 - DNA, 182 bp, Homo sapiens
ttggatttcactggatcccaggatgcgactcactgggaaacaatgttggactaggcatgttcagtgaatgagccccgaagttctatgacacactgtacacatccatctggctcaaggggcaaatgcagtacgtacagcattggccgtggtgcgtcacaggtggcataactatttcacactaa

SEQ ID NO: 513013 - DNA, 213 bp, Homo sapiens
ttgtagaaggtggtgcgtgggcagttgtatggtctggaacatggtacatgggtagttgtgtggtctagaatgtggcatgtaggtagttgtgtggtatagcacctgacgtgtgggcagttgtgtgttgtggaaggtggtgcgtgggcagttgtgtggtctggaatgtggcacatggtagttgtgtggtctggaacatggcacgcgacatcgcca

SEQ ID NO: 513014 - DNA, 640 bp, Homo sapiens
  misc_feature (46)..(46): n is a, c, g, or t
  misc_feature (48)..(48): n is a, c, g, or t
  misc_feature (55)..(55): n is a, c, g, or t
  misc_feature (63)..(65): n is a, c, g, or t
  misc_feature (67)..(67): n is a, c, g, or t
  misc_feature (72)..(72): n is a, c, g, or t
  misc_feature (74)..(74): n is a, c, g, or t
  misc_feature (80)..(80): n is a, c, g, or t
  misc_feature (87)..(87): n is a, c, g, or t
  misc_feature (94)..(94): n is a, c, g, or t
  misc_feature (100)..(100): n is a, c, g, or t
  misc_feature (110)..(110): n is a, c, g, or t
  misc_feature (116)..(116): n is a, c, g, or t
  misc_feature (118)..(118): n is a, c, g, or t
  misc_feature (122)..(122): n is a, c, g, or t
  misc_feature (245)..(245): n is a, c, g, or t
  misc_feature (271)..(271): n is a, c, g, or t
  misc_feature (379)..(379): n is a, c, g, or t
  misc_feature (395)..(395): n is a, c, g, or t
  misc_feature (420)..(420): n is a, c, g, or t
  misc_feature (535)..(535): n is a, c, g, or t
  misc_feature (545)..(545): n is a, c, g, or t
ggccgtggcgcggagaactctgcaatgacatgaggctgaggattgngntagatanaaaccagnnnangccgnanccccgngagggangcgtctncgttgngtccggccgntctgcngnactntgaggaaaagctcgcaccaggtggacgcggatctgtcaacatgggtaaaggagaccccaacaagccgcggggcaaaatgtcctcgtacgccttcttcgtgcagacctgccgggaagagcacangaagaaacacccggtactcttccgtnaatttcgcggaattctccaagaagtgttcggagagatggaagaccatgtctgcaaatggagaagtcgaagtttgaagatactggcagaaacagtgacaaagctcgctntgacagggggatgaanaattacgttcctcccaaaggtgatnagaaggggaagaaaaaggaccccattgctcctaaaaggccaccatctgccttcttcctgttttgctctgaacgatcgcccaaagatcaaaagtgaacaccctggcctattccatnggggatactngcaaagaaattgggtgaaatgtggtctgagccgccacgccctgaataaccacccttttgaaccggatagcaccttagctataaggtgaatatttg

SEQ ID NO: 513015 - DNA, 135 bp, Homo sapiens
ctgacggagtggccagagctgtgaacagccgcggacacagctcagtgtccctttgcaggctttctcagaccaggcttctgcagctgtctgcaggctcctggtccccttgatcagagactgtgctcttctgagaag

SEQ ID NO: 513016 - DNA, 354 bp, Homo sapiens
tgctcgttgactatttgttggcatctcgtctggccgtatcatcaacctgatgagcaagaaggtatataattcctacgccctcacagccgatgaacagttggaataggttgtgagcggtaactaaaaatcagaatggtatttaggaagatcaagtagatatttgaagaactgacttacatgtatggctctcgagttcactttttcaccagttagattcctattatggaccatgtcacgaacacatgctacacgtcatgaatattatgcgagaagtagtctactttgaagctcagcgagagctgggttgtccgaggtgtggcctcagtgccagtctcgagactaagtaacttcttg

SEQ ID NO: 513017 - DNA, 205 bp, Homo sapiens
acctggaggtctgatcgggcttccccgggccctgctgcgggactggccacccaagggccgccctggacgcctccctctgtgaggtcaggtcctcgctgtcgggggtcaaggtatgcgcagggtcgctgttatccaaggtctctgaccacggggcgggagacgatgcatccgcttccacagcaggtggcgtggaccaagcttctcc

SEQ ID NO: 513018 - DNA, 531 bp, Homo sapiens
  misc_feature (468)..(468): n is a, c, g, or t
acccgagcctaagggctacccctaggacagaccatcagctccagcagcctctgtagccagtagatgggctctgtgtatgtccggtgtatgtatgcgcctcctcccaagggcccatcttgggcgtgggacgggggcaggcagggagacagcagggtccctgctcatattagcaccccccgatgtcctatcccgagagcacccagacacccagctagcagacagagaaatgtggggcagtggaacagcaccttgcctccaagctgggccccatgttgccccacagaatcccccgagcccaggcctcagagatcatgtgtacaggctggcggtccccttaggaaagatggactccataccccactcccatcccagctgtcctgtcacgtgagaccagtgttgtgcacagaactgacaagactcccttctgatgtgtgctttccatcccaatcaccagtaggagctcctggngccctgccatgaccctactccagagaatatcctttcttcctttctctgaccaattgagattgt

SEQ ID NO: 513019 - DNA, 1715 bp, Homo sapiens
  misc_feature (960)..(960): n is a, c, g, or t
tgcttagattatgattgccgttgttgagtcccttgcttttttcgtagtgatcgcggtgtactgcatctggattttttatgtccgcgggtgtattcactttcatccgtggatacggttgttacgcctgtggctccttgttggggaccctattgtaggcactgtggttgcaccaagaggccgtggtgtggtgcgctgctcggatgttctcccgcggagttgttcttcgaaccaccacggtggttcgcgacactagataccacttggggcggtgtgtgccacaaaaacacagcgcctcctctttctccaaagggcgcgcgcccccaaaaggggggcccacccagaaagaaaagcggggggtgtagcacacacactgtttgctaaagaagaagagacgttggggataatgaaagtgtgggaagcaccacccacctgccttaagtgggtgccacaaataatgtaataagccagattatatttgtgggtaaaagaaacgggcccttgctgttcgtctaccaacaacggggaccctcccctacgggggggagcccacacgaaagtgtgtgtctacttctctgcgaagtggggttcgtctcacccaacagagtgggtttctcgtgcgggttgtgttgttttggtagaagtgtggagagttcttttgtcgtctggaattgtttcgccgacgacaagtgtgtgattggtaaagtagtctgcgccgactttgtttaggaaagtattttgccccaaagcttgggaatgttttacctgctggagaaggaatatgttttcccacagcgggggtttaaatataaaatcttcgcctcttcggagcctgtaacactcgtttgcccacataggggccacataggggaatatctttgtagccgccgccgtgtgacaccaccacaaagaatagtgtgtggtgttgtccacaactacgggggtgtcccccaataaatattnggcgccacacgaccccccaatgttgagtgtggaagaagccttctcaccccgtgttgggagattttgcaaaaggagactcatcccgcgagatgtgggtttataacttctgggctgttcaggtgtctctggtgtgtctctggtgtgtgtgggtgttttataactatatataatatccgccgcacccactgcacagaatattccgggaatagagcccctcttattatggcgctcacagcgcccccacacacacgggttctccccacacaatctccggagaagagaagagatgagaggggagaaactcacatgagacgccgagagagagggcgcacagacacacacatgtgagaccttgagaaaagaagaggtggcgtcacaatataaattggagtgttcgcacgcagccacgccacattgtgagaataagacacactatgagaaaaggggctctgccacagcaattctatgtttaatcctctctctccactgagatgttctttcgcttatgagaaaagtataaaaattggctgagaagagagcccacaaggtttgaaattgggaaagctcactggaggcttcactggtgaaaggcacgtagtttctggagaaaagccacctggggaacgaagacgacaggtgctataaagttgtgaacgagagctgaatggagatattgaaccacccacgtcccacagaatttgttttataagttcagacttccaatagtggccaatataaaagtgctatttggttga

SEQ ID NO: 513020 - DNA, 155 bp, Homo sapiens
cgctcggcccctatcttttatttctttttgcatcagtgacagcgatgaagttagcttcaggcttttttggtgtgcccttacccatatccatttcgcccacttccagccaatgccatttccatagagtttccatggtttagagcgtaattttgccg

SEQ ID NO: 513021 - DNA, 185 bp, Homo sapiens
aaagcgtgttgtacagttctacgggttttgatgcatgacacgcatcatgtatcagacagaatacttccactgccctaaaaatcccctgtgctggccgggcgcggtggctcacgcctgtaatcccagcactttgggaggtcgaggcgggcggatcacgaggtcgggggatcgagaccatcctggct

SEQ ID NO: 513022 - DNA, 333 bp, Homo sapiens
gagaaagcatctcactctgtcacccaggctagtgtgcagtgacgtgatctcagctcactgcaacctctgccttccaggttcaagtgattctcctgccacagcctcccaagtagctgggattacaggcatgcaccaccatgcctgactattttttgtgtttttagtataaacgggccagtataaatgttggccaggctggtctcaaacccctgacctcaagtgacccacctgcctcagcctcccaaagtgttgagattacaggaatcagtcactgcacccagccaattttttgccgtccttaagaaatccgtcgacgcggccgcgaatttagtg

SEQ ID NO: 513023 - DNA, 242 bp, Homo sapiens
ctcgatgccttctttccacctaccacttatctcttcttatacggcaatggcatcatcttttcagtttcaaaacaactggcatcattatatctatcttttttgccgtttctatttaggggtaatagttgatcaaatcaagtcttggttgtggcttgctgaattaaatatttatgagtggtgcatttttaagtatcgtgaccaagacaccactattaacgtcccgtgatcacacgcactctata

SEQ ID NO: 513024 - DNA, 494 bp, Homo sapiens
  misc_feature (39)..(39): n is a, c, g, or t
  misc_feature (258)..(258): n is a, c, g, or t
  misc_feature (325)..(325): n is a, c, g, or t
  misc_feature (328)..(328): n is a, c, g, or t
gtcgcctgaccttgcctgcctcgccgatggcggcggggntgtcaggaggataccagttcggcattggtcaacttcgccacagtcgcgccgcgtcaccttgggtgcttagcgccgggtggagcgggagtgtgcttgatggcttggaagtggggggagggctaattgcgaccgacagctatcaggctaccgggttcgcgctcggtgctcagccgtggacgcaggctcagatgcaatggtcgctgggctactcgcagccgntgcatcaggagagggggatgcaaagccagatgaccctgaaccagcagtttgccggcggatggggagnggncttgacctatgggctgcagagccaaagttatcaggacctccagcaggcgcttgagccgtcaggtcgcttggagggcttgcgcgattttttcagcgtcggcctgtcatggcagggcactgggctgtgcaacttcagtgtcgggggcggccaatcgcgcacgcgtaat

SEQ ID NO: 513025 - DNA, 191 bp, Homo sapiens
gaagaatctagtttaggccgggtgtggtggctcatgcctttaatcccagcagtttgggattgcttgcatctaggagttcgagaccagcctcggcacataggagacccctgtctctacaaaattccaaaatttgtggggcatagtggcatgtcctctagtccagctagtcaggaggctaaggttgggaggac

SEQ ID NO: 513026 - DNA, 180 bp, Homo sapiens
gactacaggatctttcttacgccccaaactcctggcgagagatttagagagagagagagagagagagaagggggggatgctattaatgtaaaaagaaagtggcgccctgtgtaaataaaactccacaaaatgcgccctccacagtagtgacagagagagagagggtttctccacctaata

SEQ ID NO: 513027 - DNA, 1018 bp, Homo sapiens
ttcgcaggagtcctcgcgaggaggaagcagtgacccatgcgtccgcctgctctcactggaggagcagctttcttctgggactggacagctttgctccgctcccaccggccggggccacttcacaagttcctgatatacaagcttgtgagtcacatcgagcggaattgaaggcggattccagttgacaaaaggaggtggtgaggtggaacagggtaaatacagcacccatggttggcttgtgggcattgtgggctacgtggaaagccctcaaggactcccggaccttcaagatgtgtcttcgctgagcacatcagttgatgaatgcaagaggcgtagctataagaattggcataaatctaagaagaaggaccttataccaagtactgcaagaaagtggcacggatgaggatggcaagaagcagctggagaaggacttcagcgagcaatgaacgaagtacatgccaaggtcatccgtgtcattgcccacacccagatgagcctgctatgctctgcgccagaagaagggccgagctgatggagatccaggtgaacggaggcaatgtggccgagaagctggaatgggcccgcgagaggctggagcagcaggttacctgtgaccaaggtgtgaggcaggatgagatgatcgaccgtcatcggggtgacccaaggggggaaggctacaaggggtcgcgggacgatggcaaacgaagaaagctgcccgggatgagccactgaggcctgcggcaggtggcctgtaattggggcgtggctctgcgccgtgaagcttgactgaaggagcgcagtggaaaaggtacatcacggcctgaaatccaggcagatttataagatgacacggcgatcgttaataagaacgatctggttcgtcacaggcgcagattgaccatggagacgctacacattgtcggctgaacacaagaaggagaattgttacagagaagagacggacacaacaagacaacatgtcactagaaagagcgagactacagaagacaaacca

SEQ ID NO: 513028 - DNA, 377 bp, Homo sapiens
cgactcactggcattaccatgaagagggctggcgggagctttgccctgtgcacaccgtggtaacctggcaacaagaacatttgccaccctgccagtctgaagaacaaatgaaccactggagggggcgaaatcccaaaaccacctttggcttcacccaaacttattaaatgaaaaaaactgtcttttcttgggccaagtccctggcatgtctggctcctgttcccccccctggtccctctgccctgtggcaaggagcccacgtgcaggctcataggttgttccgctgaagtgcctcacacaggttctggttggtgtcgggctcctccgtcagcacctccacagcctcccactccccggatcggctcgaccggcgttcg

SEQ ID NO: 513029 - DNA, 241 bp, Homo sapiens
tcggttagctgtgataatatgggaagggaggaaattttttttatttcctaaaccaggcctcactctatttacccaggttagaatgcaatgccacatgtcacatgttcccgtgctgctttgattccctgggttcaaccaatcctaccatttcagcctcccaagtagcttggactacaggcacttgccaccatgcccagcctccttttggtactattttagaacagatgtgcggtttcaccat

SEQ ID NO: 513030 - DNA, 183 bp, Homo sapiens
actattctcaggcatatagttctatggcattacgtacattcacatacttgttcatatatcactatccatctccagagcttttcgccaaatgaaactgtagccactaactccccattccctcctccccacaacccctggcaaccatagttccactttctgtcttcattatttgactactctagg

SEQ ID NO: 513031 - DNA, 81 bp, Homo sapiens
  misc_feature (46)..(46): n is a, c, g, or t
  misc_feature (54)..(54): n is a, c, g, or t
ccacagagaaaacaccttcatgttcatacactatcccccctcctcntatccttnaacccgacatcattaccgggcctctac

SEQ ID NO: 513032 - DNA, 101 bp, Homo sapiens
atttgtagcatctccacaggctgctgtaggtctgcagaggacatgcaccgagcaggtgaggtgctgacaaccagagactcgacaggccccctgccccccac

SEQ ID NO: 513033 - DNA, 306 bp, Homo sapiens
  misc_feature (300)..(300): n is a, c, g, or t
ctccttcctccatgacacccagggtcattcacagaacacagcatcccaggagcgctcgcgcctgctccttcctccatgacacccagggtcattcacagaacacggcatcccagcagtgctcgcgccttctccttcctcgacacccagggtcattcacacaacacggcttcccaggagcgctcgcgcctgctccttcctccttgacacccagggtcattcacagaacacggattcccaggagagctcgcgcctgctccttcctccatgacacccagggtcattcacagaacacagcaggtnctcacg

SEQ ID NO: 513034 - DNA, 549 bp, Homo sapiens
  misc_feature (132)..(132): n is a, c, g, or t
  misc_feature (171)..(171): n is a, c, g, or t
  misc_feature (273)..(273): n is a, c, g, or t
  misc_feature (326)..(326): n is a, c, g, or t
  misc_feature (366)..(366): n is a, c, g, or t
  misc_feature (434)..(434): n is a, c, g, or t
  misc_feature (444)..(444): n is a, c, g, or t
  misc_feature (458)..(458): n is a, c, g, or t
  misc_feature (492)..(492): n is a, c, g, or t
  misc_feature (548)..(548): n is a, c, g, or t
gatgtgggcccaggctgagaaggaggcccagggcaagaagggtcctggggagcgtccccggaaggaggcagccagccaagggctcctgaagcaggtcctcttccctcccagtgttgtccttctggaggccgncgcccccggaggaggacaaccccgaagtggtcaggccgnacaatggccgagtagggggctccccagtgcggcatctatactccaagcgactagaccggagtgtctcctaccagctgagccccctggacagcaccacccccnacaccctggtccacgacaaggccaccacaccctgctgacctgaagcgccagcnagctgctgcaagctgaacgacccccacctgaggggccganagccctgagacagctgagcctggctgctggtgacacggtacccccagcctgactgtggttcagggcangcggggaccnaccctgttaagctnacaagcccgggcggtgaggttccgtggagaggangccggctgctgtcatgtgagctgtgttaacatcaagggcctgtcgcggcacgccgnt

SEQ ID NO: 513035 - DNA, 803 bp, Homo sapiens
agcgggctcgtccggccggccccgagcctcgacgtcccgcgcagtacccagaccggacccagccgacccgactctactgccggctccgcgcccttccccgagggctggatgatgggctgttacgtcctgacaaacgtgtggacaacggatgctgactcgatggactacggtggagtggtgcccgctgcaatgctgcaggtgaacctgttggcgtgcgggatctaccagctgcggtcggtcggaggtaccgagacgtgaccggacaccctagtaagcaaggtgtcacatcccggtgggcttgacatgccctcttgggcttggccgatgccagttggatccattacaattgcttcacgcctggttggaatcttgaggctcaaggtgacttgcactctgatccgtgtgtggtgcacgataggtgcgacactgaaagtaccacgaggggataggggacgtgaagtgccttggtagcatgatgtaacagaccaattctattcctacaagactcgagtcgtcatctttcaaatagggtgaacataataataatacatacggtatctaaagactaagtgttgcgagtcatactgtgtaaagcattgatagttgctgctcactaacagtcgcgaactgccaatgatgggaaagctccacactcaatgtggtcacccaagccagcaatggggcctgaaggtcgacaggcgaatgctcatttggaccttgtccaagtgcgattctggaaaggtactcctagaggatgaggctggagcaaaggaattcttaaggatatgatggctgggggcccc

SEQ ID NO: 513036 - DNA, 587 bp, Homo sapiens
ccttttaccactccaggctagactcctaccccccaattaggagggcactggaccccaaacaggcatcaccccgctaaatcccctagaagtgccaatcgcataatacacatcctgtattgatcgtcgcatcaggatctatcatatcacctgagtctcacggccatagtgctaatagaagaacaaatcgaaatcaaagtgaaatattcaaagcactgtgttgatcacaatgtttcacatgggatcctcatagttagtcaacccgtccatacaagacctcaagagatacattcgagttcttcccttcaccatttctccgtacggtcattcttacgagtcttcaactattatattgtagcgcactaggcttccacggcaccttcacgtcaatttattgtgctcaatctttcctcactatctgctgtcatcccgtcaacatctataatattatcagttaactagtccataatcattcatcttgtggtcttacgaaggccgaccgacctgatactagggcattgtagtacgatgtggttagacttatttctgtatgtctccagctattgatggaggtgtcttgagcatagaaa

SEQ ID NO: 513037 - DNA, 101 bp, Homo sapiens
cgagctatttatttattttggagacaggatctggctccggtcacccaggcgggagggcaggggtgtaagtcctgggctcactggcggcctccaccgttccg

SEQ ID NO: 513038 - DNA, 253 bp, Homo sapiens
acaggcctgggttcaaggattcgcatctgttgagttgtcagcccagacaggacaatttgttgtgcggtgagtgaggagtgggcgcaccggatatgaagcatctttgcacaactttttaccatgtacttattggcacaaattcgggcagcctccaaggcttcagaggacagctgctcatattcatctgacaccatgtggccacaaatgcggaaactcatccacttttggctttttccggcccaggtcaaaaatg

SEQ ID NO: 513039 - DNA, 382 bp, Homo sapiens
actatcatcacagaacgttcaccatagacactgacactagtgtgattagatagtgttcgtgtggaggtagtgggagacagagtttggctctgtcatccaggctggagtgcaatggcacaatcttggcttactgcaacctctgcctcccatgttcccatgaggaatgctcatgccttagcctccagaatagctgggactataggcatgcaccagcacgctcggctgattttagtatgctagtagagacagtgtcaccatgtagcccaggctggggtcaaactcctgagctcaggcagtccacctgcatcggactcccaaagtgctaggattacaggtgtgagccagcgtgcctgatcctaactgatgggttcttacatagatg

SEQ ID NO: 513040 - DNA, 192 bp, Homo sapiens
aggaaggaaggcatcctggaatccccacatttcagtctcagataaggacaaagggactcccaagcccccaaataatcagaaaacagcaagggagcaggatgagcttgtagccggccccaggtagcctaaaagccataccagccactgtctacttcccatcctcctctcccattccctgtctgcttcaaacca

SEQ ID NO: 513041 - DNA, 245 bp, Homo sapiens
acctggtgtccagcagatggatgggagccctctgcagacacaggagaagacaaggatgggacggtctaccagagaacgagtgggggcccgcgaggggtttataacaaaggggcccctttgggagtgctaagggagatatatttggcattcccactcagtggatctggtttcatgtgtttgcctcatgcagacaccatgagctcatgccacagaccacgactatgtccaacccatgtgcatgcatg

SEQ ID NO: 513042 - DNA, 533 bp, Homo sapiens
gaacgggcgtgcagcttgcttctgcaggtgactcttaggatcccctctcgttaactgggaaatagtctgcctctgagataggagttcagagaatgagcttgacgctccccggatgggatgtgcgtgtgctgtgaccaggtagcatcagagagtcaggtgtgaccaagcctgagtgccagggggctggggaggaggttccgaggagagtgggacgggttcctgtggctggctcggggccaccgtggccctgattggagcggctcttgacaatgatgagaaggaatcaggcggctcggggccaccttggccctgatgggagcggctctggacaatgatgagaaggaatcaggcggctcggggccaccttggccctgatgggagcggctctggacagtgatgagaaggaatcaggcggctcggggccaccgtggccctggtgagagcagctctggacagtgatgagaaagaatcaggcctccagtttagggactctgttcctggtgatccctgggctaaaggactaatcaggggaa

SEQ ID NO: 513043 - DNA, 166 bp, Homo sapiens
  misc_feature (24)..(24): n is a, c, g, or t
  misc_feature (42)..(42): n is a, c, g, or t
  misc_feature (90)..(90): n is a, c, g, or t
  misc_feature (113)..(113): n is a, c, g, or t
  misc_feature (128)..(128): n is a, c, g, or t
tacaatttaataaatctcttcatngcagacatgtatggctgnttggtagtattcagaaacatcacagtaatgggagtttcttcacttggngtgtagtcctcaataattatttntgaaattgctgtcanaccagtaagactgcatttatacatccatcattgttcag

SEQ ID NO: 513044 - DNA, 136 bp, Homo sapiens
gagttgcgaactctacatctgcttcaccagttactctgacatcaggaccaattacaatgtgtactctcacatgggttagagcgatgcaaaaaaaatgggtaccgagcctcgacatcacgtcacatcttggatcttc

SEQ ID NO: 513045 - DNA, 211 bp, Homo sapiens
gttgaacccggcagcagaggttcgcagacagccaagattgcaccattgcgctccagcctgggcaacaagagtgaactccgtcccaaaaaaaaagaggagagagggcgattaaccagaaccagaaccaaaccaaagtggttatccagtatttatttggattagcttcttaatttgaagcagcaaagtgcaccaccatttaggttattgccac

SEQ ID NO: 513046 - DNA, 320 bp, Homo sapiens
attaattcctatgaagtcaggaactgaagaatatactctcttcttacttcttctggaagtcacagtgaccttttgaagggccatttaaatggcccactcatttccatcttagattacaaaacttctaactaccacatgctgagcattctaagcccaacactcacatcagccacagtaatcatcagttccataaaaggcccatatatttcctagtgaggtgaaattcttgatggaggtatgatggcaaataacagtgttcactttcacttctccgaaaaaaaaatacagtatgctagactgtgagttcttataaaagagcc

SEQ ID NO: 513047 - DNA, 340 bp, Homo sapiens
  misc_feature (105)..(105): n is a, c, g, or t
  misc_feature (126)..(127): n is a, c, g, or t
  misc_feature (130)..(130): n is a, c, g, or t
  misc_feature (150)..(150): n is a, c, g, or t
  misc_feature (153)..(153): n is a, c, g, or t
  misc_feature (157)..(157): n is a, c, g, or t
gctacgagtatccatgcttgctgatgaattgctgagaaactgcagattgtgccttgcatacaaacgcatgcttgagaattgcgatcagtttctctggtcgcatcnggccttgtgggagaagattcnncangatgttctgacttggaaaanccntgtngatcatgctcctgaaccttctgaacgcatttgttattgaaggaaagacaccacccccaaatcctgccatcttattggggctacttttgtcagtgtctgtacccttggcatcggcatctgtgactctttatccatgacctcagtgtttcttaaccaaagttgtactcagcattcctcgcaacag

SEQ ID NO: 513048 - DNA, 1463 bp, Homo sapiens
gcggtgaacctgcaccactgcgcaccaacgtccacgcctctccgctgcctgcctgcttctgacgtgccacctgtgatggtgtgtgctgctacctgtgtctgtgctgagcaccatgtgcctgacctgtgagtgtgtgccaacctgtgcactggccacactgtgccgtcatgatctctgtgctacaatggtgccacctgtgagatctgccctgcataccattgcttggatgcatgggctgcccatgtgttgaacctgtgctgcatgctgcccaatggtgccaagcagctgtgccacttgcaatgaacttgctgacctgagatcctgtgcatgctctgtgacgactccccttggcaagcttgccttgccttgtgtgtgttgcaatggggccctgccatgggaaacctgctgacctgtggcgtacctgtgccacttgaacactccctggccttgccatcctggctgtgccgcatggctggttgacccagtgttgcgccaacacccccacaaacacctctgcttgctgaatgtaccccgtacaagttccaatggggacggcaatgtcacccctgtgccgccaccgtgaacgccacctgtggtacttgcaatggtgggtgtgaactgaatgtgtctttcccagtggacgaccatatgtggatgcccatttggacgtctcccgcctagtacctggacacagcgaaaaccccgcaccggtaccacgaagcgcgcagatgtgggcgaccacagggtgggcggtggcttaggcttatggccatgagcctgaagcgagcagcccaattccgaatcgtctgcggtcggatgacccattttccacatggaatatggcgcatatatggcgcagaatgtggggcgattcctccgatttatccaacccctgccaaatgggaaaactgggtgggacacacacgaccccaaggccgttttgggaagtcacacccatgctggctgggtggcaaacaaacctttccgctctcttcaaccccacggacatcacgaccctgcgccgcgttcgggccctcttgggacttccatcccaccgaagtcccccaacgctgcgcaccacatcagggacgtgggaccagaccgggccctgttgtgaccacatgaggtattgggagggcaacaccaacctggccccgaccagtttactcgagcaggcaacaaaccgtttacattgagacgcattaggggaggcggcaaatgcgcctcctacatacccccgcggccggtaaaccgttttggctctttggtcgggcactctttttcacacacgtcgaccaaccgagccgacgacgaacgactacaaccttccacttcctgccagacgtcatatcgcgcctgaccgatcgctcctcgcagcacagttcacacaagcaactcagcatacgccagctcctgctcgtccgcgaccaacgacggcgccccgatccggcaggagtcccccc

SEQ ID NO: 513049 - DNA, 335 bp, Homo sapiens
  misc_feature (100)..(100): n is a, c, g, or t
  misc_feature (121)..(122): n is a, c, g, or t
  misc_feature (125)..(125): n is a, c, g, or t
  misc_feature (145)..(145): n is a, c, g, or t
  misc_feature (148)..(148): n is a, c, g, or t
  misc_feature (152)..(152): n is a, c, g, or t
tcccctgttctgatgtaatcatggccaatcaggcagatggctctatgcattcaatcgccatcttggaggaatctgccgatcagtttctctggtcgcatcnggccttgtgggagaagattcnncangatgttctgacttggaaaanccntgtngatcatgctcctgaaccttctgaacgcatttgttattgaaggaaagacaccacccccaaatcctgccatcttattggggctacttttgtcagtgtctgtacccttggcatcggcatctgtgactctttatccatgacctcagtgtttcttaaccaaagttgtactcagcattcctcgcaacag

SEQ ID NO: 513050 - DNA, 736 bp, Homo sapiens
ggtgggtgggaggtgaagcggaacggtcccggcgggactgaatgcacgtcgggaaggggaggacgggaagtctagccgtgttgtgaccctgcccactctgttacctgccagatgactgctgaggaaactgcttttcttctcgaggctccgttgcctcgtctgtgcccgggcggtggtgcttaccctggcggggtcgcagtggaggtctcgtgtgctggcgcgtgttgggtctgcgtttcccctctggggtgcttgtggccgcatgagcccagggctgtggacagccttgtgctcacgggtttgtgggtccacagacttcccaatgaaggacagaccgagtgcgatggcttgttggtggccaactgcagacggcttgtgaccccatgcggacacgtgggcctgtgtgtggacccggaactcagagtacatctacgttcttgcttccaaacacctttgaggaggactgcattatgagcttggtgggaatcattgtgggcactccctgccaggacgacagcatagaggcgtacggaatctgtcgaggggcgtccccagggtatgtgaactcgggacacacgacttgtaggtcattgggaaggttccctttgcagcaacgccttggtccaaacggggaggcttgataatcatgttacccacgtactccttgccacaagatagaaaacccaaacccccaaggattccacatgttcccttgtgaccaccaacgtgcaaaaca

SEQ ID NO: 513051 - DNA, 784 bp, Homo sapiens
acccctaaaagccaaactgggaacaggcacagactcatatcaagcatagtcgtcatggacacgtagattcgggcaagtccaccactactggccatctgatctataaatgcggaggcatcgacaaaagaaccatcgaaacattggagaaggaggctgcggagatgggaaagggcgccttcaagtatgccatggcgtctgtggattaaacgtgaaagctgagcgtgcaacgtggtatcaccgattgatatcgtccttgttggacattttggagaccagctaagtactaatgtgactatcattgatgccccaggacaccaggagactttatcacaaacatgattgacggggacatctcaggcggactgtgctgtcctgtattgttgcgtgctggatgtgggtgaatgtgggagagctggtatgctccagatgaaggttgggcagtagcccgaagagcatgccctatctggcgttacacagtgggtgtgaaggacgatactaattgtgcggtgttcacacaaatggattccactgagccaccctacagccagaggagatcatgaaggcatattgttaaggctgtcacgaacttactctttaagattctttggctacaggccgccgacacagttagacacttcagtgcgccactgtactgggtcgtgaaatcggtgagtagcatcgctgggtaggccaagtcgctaagcattgcctatgggtttcacctgggatgcgccctcgtcatgcccgtagacggatggtgcctgcctgtggaacctcggctggt

SEQ ID NO: 513052 - DNA, 139 bp, Homo sapiens
ggcctattggccaccttccttcccttgcctcttccatttttgcaagtgccgctaccaccatggcccctctttttaaggttccctaaaagaccacttgaagtcaacgcagagcaggatgaaagggctggggaaagggtgg

SEQ ID NO: 513053 - DNA, 968 bp, Homo sapiens
agcggggcttccctgagcgctcggcccgggaggaaacgaagatggtgctggcatctggacttcgtcctcgggtggactacaaggaggggacccacgccctcatcagagcagcacgcaggagcaagcgctctcaaggacccggcgactagctggaccagcctggctgaacggccgcacagcgcagctggcgacgactccaccgctccctgcaggtccaccagattccacccctatccgtcacagacccccctccccagggtcgccggtcggctccccgaggcttcctcccccatccccagaaaaacacacgcctgcagtccgcccgccggctccactccccactcttcctacctcccaaccccggcgcgcgaccgaccggtccctctccaccggcgtgctccacgtgccgctccgctgcccactcgactcccccggctctctccctgcagacctgcgctcacctctctcgcacaccacacgcacgacttccctctccttcgcgtactccgcgcaacgcactcctcgcggccgttgcgcaggccccgctcctgtgcgcccccacaacctacgattgaccccctggaagccttctccggcaacgcgcccattccccccggacacacttatgcggcccatcacctcttgacaccaaatctccgacaaaccagctcccttcttcccggctgcgctacgcaattccagcccctggtccgaagcgcgcgcacttcgccccgcacggcgcccgcaaggcccaaccagacacaattttcgggtaccactccgcctgcttggtacaccaccctttggttctctaaacatctcggggtggacactttttctcgctttggggaacggtcgtccctcatgccccgcttcttctcacagcacggaacccccttcttgggccccatcggaacggctttggcagggcccataagcaatacccccgttgtgggaaaccattggag

SEQ ID NO: 513054 - DNA, 436 bp, Homo sapiens
  misc_feature (395)..(395): n is a, c, g, or t
gcccactgcagtcatgaagaaagaggtgctgctgatggggaatagccggtcgtggaagaccaccatgatgtcgatactctttgacgattacattgttcgcgacacccgtcgcctgtcggccagcattgacgcggaacactcccgcgtacgactcctagggaacctggtgctgtacctgtgccactgaggcggcctagagaccgtcttggacaattactttgccagccatcgatacggtgtctgacgtaacgtggaagtgttgatagacgtgtttgctgagtagagcctgtatctgtgtggcatgccttattgccagtcttgtctgtaggccgtacttcatacactctcctgactccaatatcttctgcctggtgcacagagtggatctggttcangatgatcagagtgacctgatttttgatgagcgataggcctc

SEQ ID NO: 513055 - DNA, 226 bp, Homo sapiens
ttcctctcaaaatatctataatatttagattggagagaccgccccgcagaggttcaagccagtaatcccagcactttgtggagcctgaggacgaagcagatcacctgaggtcaggagtaagagaccagcctggccaacatggtgaaacccattctctactaaaaatacaaaaattagccaggcgtggtggcacacacctgtaatcccaacttctaggggaactgaa

SEQ ID NO: 513056 - DNA, 153 bp, Homo sapiens
ggctgcggggaagacggctggctgggaaccctccggcaacactggccttccccccaccacctctcacctgatcttcccgccctccagcccagcccaccttgtccggtctggagcaccaggccacgctgtctggtgtctcttctgtgccgcggg

SEQ ID NO: 513057 - DNA, 870 bp, Homo sapiens
atcggggtgtggcggggggccccgtgcacgtcgacagatgggttgcagccggtgtctgtgtgtctggtccccttggtccccgcgtttggttttcacgcggctcgcgggttctgttcgcttgtctccaatgggttgtttggttttgccgctttgtcccgctgggcgagtggcacacgccctcatgtggctagccctcccggtgcttgggatttgtgccgttctgggtagtatttttggtccctgggcgctttgtatcttgatatccgccttggatgtttgagacttgttgctggttgctgcccttgttttggagctaacggttccccctggtactttggtgttaatccctctgttgacatatctctggggttcgacctttcggtacgtcgtggcttggtcacttcggtggctaacggttagtacgtgcttgtggttagtcaagtctgtggcttgctgtgctctgttcgggcccgtccgcctttgatctgtggtcccggggtttttacctgtcagggctcgaactgttctgggctttctctagaggctggcagaccccgttgttttctcttgcgggtctctccggcttggtaggtccagcccgtacggaccccgctttcctttcgttccgctgatgtctttggcccgacgccggtgggctgttacttgcctttgatgttggccccgggtttgcattgacgcctgtaagatgtagtctattcctattttacgtaaggttttttctggtacgcatgtcgtccggattcacttgaagagatgcaccaccaactttggttttcaactgttatatgaggacattaggccccacgcacagcgtcattgtgtaagagaaaactaacaagtgctcccgta

SEQ ID NO: 513058 - DNA, 114 bp, Homo sapiens
cggaccgcacctccgtccatcaggaatttctatatattgatctctgattggttataaaaacagcagtccaacgacgtgtacacaatgacgctggtctgatgggagcaagatgcg

SEQ ID NO: 513059 - DNA, 244 bp, Homo sapiens
  misc_feature (55)..(55): n is a, c, g, or t
gacacgtgaagggttatttatggttatgatgaccctgtcctgcaactagggtacnttcagccactactgaggaggagggtcccatctctctcttgttttttttcaccgaggtcacagccagacgtggggcaaaggtgttccctgttctacccagccattcctgggcctgccgtctaggggcttacagggcccaggagttcgcagtttacaggccagggcattaggccaggcgcgctcggtgcac

SEQ ID NO: 513060 - DNA, 371 bp, Homo sapiens
  misc_feature (114)..(114): n is a, c, g, or t
tagaggacgctactgagtcatggtcacgtctggaagccctaaaacttgagaggtagaggcggctggatcacttgaggtcagcagttcaagtccacccttggcaatattgcgaanacgcatctctactaaaaatacaaaaaaaaaaaattagctggggtgagggtcgcttgtaatcccagctacttggcaggctgaggcaggagaatcccttgaacctgagaggcagaggtttgccagtgaaccgagatacagccattgcactccggcctgagtgacagggcaagactccatctaaagaaaaaaaagaaacgggaaatcaaatccttaagtcacctagttaaattttactgtatgcagccattgcactccgg

SEQ ID NO: 513061 - DNA, 484 bp, Homo sapiens
  misc_feature (81)..(81): n is a, c, g, or t
  misc_feature (150)..(150): n is a, c, g, or t
  misc_feature (154)..(154): n is a, c, g, or t
  misc_feature (164)..(164): n is a, c, g, or t
  misc_feature (183)..(183): n is a, c, g, or t
  misc_feature (207)..(207): n is a, c, g, or t
  misc_feature (212)..(212): n is a, c, g, or t
  misc_feature (221)..(221): n is a, c, g, or t
  misc_feature (230)..(230): n is a, c, g, or t
  misc_feature (235)..(235): n is a, c, g, or t
  misc_feature (248)..(248): n is a, c, g, or t
  misc_feature (261)..(261): n is a, c, g, or t
  misc_feature (264)..(264): n is a, c, g, or t
  misc_feature (266)..(266): n is a, c, g, or t
  misc_feature (273)..(275): n is a, c, g, or t
  misc_feature (279)..(279): n is a, c, g, or t
aactgcttacccacaatctgctgagctcgcatgtgcggggggtggggtaccgtggctaccccctgcgccttcaggccaccnaggtccgtatctgccctgtggaattcaaccccaacttcgtggcgcgtatgatacctaaagtggagtggncggngttcctggangcggccgataacttgcgtntgatccaggtgccgaaagggccgnttganggatatgangagaatgangagtntctgaggaccatncaccacctgctgntgnangtggaannnatanagggcaccctgcaggtccccggaatcttggacggtatgtccccattaagccgcgggaatcccaaacaatgctgcttaagtaaagaggaaactaagagttgattgtccaggcgccagtttttcttgtaatgactgtatattgtgggtgatctataccctgtttccgaattctgcggtgtgtatcccaacccttagaccaatgatac

SEQ ID NO: 513062 - DNA, 136 bp, Homo sapiens
agaggtcgaggaacgctggcgcagtatggcgaggtcagtgacagacactggcggtcgggtctgaggagggagctggaagttaattaacaccagagagaagagttcctgtcccagaggtcgtaactatgctgtccca

SEQ ID NO: 513063 - DNA, 361 bp, Homo sapiens
  misc_feature (81)..(81): n is a, c, g, or t
  misc_feature (150)..(150): n is a, c, g, or t
  misc_feature (154)..(154): n is a, c, g, or t
  misc_feature (164)..(164): n is a, c, g, or t
  misc_feature (183)..(183): n is a, c, g, or t
  misc_feature (207)..(207): n is a, c, g, or t
  misc_feature (212)..(212): n is a, c, g, or t
  misc_feature (221)..(221): n is a, c, g, or t
  misc_feature (230)..(230): n is a, c, g, or t
  misc_feature (235)..(235): n is a, c, g, or t
  misc_feature (248)..(248): n is a, c, g, or t
  misc_feature (261)..(261): n is a, c, g, or t
  misc_feature (264)..(264): n is a, c, g, or t
  misc_feature (266)..(266): n is a, c, g, or t
  misc_feature (273)..(275): n is a, c, g, or t
  misc_feature (279)..(279): n is a, c, g, or t
aactgcttacccacaatctgctgagctcgcatgtgcggggggtggggtaccgtggctaccccctgcgccttcaggccaccnaggtccgtatctgccctgtggaattcaaccccaacttcgtggcgcgtatgatacctaaagtggagtggncggngttcctggangcggccgataacttgcgtntgatccaggtgccgaaagggccgnttganggatatgangagaatgangagtntctgaggaccatncaccacctgctgntgnangtggaannnatanagggcaccctgcagcggcccgaatatggacccatgttgccgattagaccagggatcctcaacatgctggtgagtgaagagga

SEQ ID NO: 513064 - DNA, 498 bp, Homo sapiens
  misc_feature (4)..(4): n is a, c, g, or t
  misc_feature (25)..(25): n is a, c, g, or t
  misc_feature (44)..(44): n is a, c, g, or t
  misc_feature (89)..(89): n is a, c, g, or t
cggntcttagatggtttttttggantaggccctcaagacccttntgggggttggtgccttcccaccctctggaagacggtccccactgnattagttaacaaacgacacgttactagcagtcacttgatcttcgtggctttgggttaaaagacacacttgtccacataggtttaaagataaagagttgctgttcaacttgagcatgttactgacagagggggtattggggtttatttttttgtaggaatagatttcacttaaggcggcccttttgaatataaattttttaaaaagcaaaattatagaagtttaaaatttaatcaaatttgaagggtttctaagaaatttttaaaaaattgctggttgctttaactgtttcctacctctgtttttgaggaaattggaacaggccttgaaacaaaacaattgaaattttgaaacttgaaggcttttgtaaaaacggttaaaaaaaattttttttttttttaaaaaaaggaa

SEQ ID NO: 513065 - DNA, 949 bp, Homo sapiens
  misc_feature (41)..(41): n is a, c, g, or t
  misc_feature (123)..(123): n is a, c, g, or t
  misc_feature (135)..(135): n is a, c, g, or t
  misc_feature (156)..(156): n is a, c, g, or t
  misc_feature (231)..(231): n is a, c, g, or t
  misc_feature (292)..(292): n is a, c, g, or t
  misc_feature (336)..(336): n is a, c, g, or t
  misc_feature (381)..(381): n is a, c, g, or t
  misc_feature (390)..(390): n is a, c, g, or t
  misc_feature (402)..(402): n is a, c, g, or t
  misc_feature (489)..(489): n is a, c, g, or t
  misc_feature (509)..(509): n is a, c, g, or t
  misc_feature (650)..(650): n is a, c, g, or t
  misc_feature (671)..(671): n is a, c, g, or t
  misc_feature (705)..(705): n is a, c, g, or t
  misc_feature (723)..(723): n is a, c, g, or t
  misc_feature (754)..(754): n is a, c, g, or t
  misc_feature (763)..(763): n is a, c, g, or t
  misc_feature (806)..(806): n is a, c, g, or t
  misc_feature (843)..(843): n is a, c, g, or t
  misc_feature (922)..(922): n is a, c, g, or t
atattgagcatttacagtgtactaggcaaatagaacttacngataacattgtccctgctcttgtaggtgcttacattctaaaagaaaaaatacaccttttttgaaatggcatttttgtttggngttttctgcaangtactgaggaaatattttgtnaagtgagctttggtgtataacttagccccatcattatttgagagaatgggggaggaagagggaggaaggattttnaaggcagacaatgacagaccattcaggataggtagggttttaaagggggataaacacagtntcatcaactaaggggagatttgctgcagtaaataggatgagggnaatagtctgtgggatgcaagcaaaggaagcagggtgccttagggnctgagtggngccagaaagatnatgcggggtttttcgcgggtacatggcgcaccaagtaggagatggttggtgacaagacagaaggctaaaacaggaaggtaatcttgngcgcctgacagatagggggnataaaggatcaaaattgaaggcaggctataagagtatcaagaaattcttaaaaaccgaggaagtgatttgggagcacaaaacttacagttaatgctacccaatgtcatgatgggcccagaccattgtggcttccgtaagtnagaaaatgccatatgccaaanttttgaatggaacacactacatttttttctagtngatccccccctctcccanaaaaaaaataggaactcatttttttcagggnggggaggangagaggggatcatgggacatggaaacagtagttatattagtantatttttgttatgataaattttgtgtttaaacttggnaagagcccatttagctgccaagagggaatcaggaataactttcaaaaaatgtacaatttcctttagagacgtatcaganccaagactaatttacatgaaaagctgt

SEQ ID NO: 513066 - DNA, 468 bp, Homo sapiens
acttatttacagtaatcctttccagattaaaacaaacacaaaatgaagaaatttggggccgggcgcggtggcacatgcctgtaatcccagcactatgagacgccgagacgggcggatcacgaggtcaggagatcaagaccatcctggctaacacggtgaaaccccgtctccactaaaaatacaaaaaattagccaggagtgttggtgggcgcctgtagtccttgctactctggaggctgaggcaggagaatcgcttgaacgctggaggcagatgttgtagtgagccgacatcacaccattgcactccagcctgggctacagcagcaaaactctatctcaaaaaaaaaaaaaaaagggttggctaaaagtcgatcaacctcctgccgagcactgtaaggagagaagcatggcctgggtcacaatggtgtacacctgggccttgggtggccacacggtatctgagagggg

SEQ ID NO: 513067 - DNA, 1254 bp, Homo sapiens
ggtgacaagtttgtcttgcgcagtgctatactccagctgtggcatgcaggtgtcagcaagtatagatcagcaatgaggcggtggtcaatatcctgtacgagctcatcaccacagcggacaaaggtgcactgcctcaacatggacaaggctctctttcacagcatgggcctctacctcagcaccacaacttcctccaggccatccaaccaccatcgagccggggcagacagagctttgtagcaggtcagagtgtccccatccgtacatccgagttcctgctccagttagacagctgacaccatggacttggaggcctgagggaggcaccgtggaactcatccagggccgggccatggcaaggtgcaactgtgtgagccatgcatgtccccaagccccgaggggtgacccgaagcttcaggattacatcctccacttcctacacagtacccaatacccaaaagcggcaccctcagatgcacggtagccctgacgtcccaagaccgggtctcaagacccaggaagtccaataggacctgatcttcatgcgcttgaacatcatcagcccttgaccatggtctgggttgcaacaaagacaagagggcgcttcgtaccatgcccggccggtgactggggaaagtcaccatatgggtggacattacctcattagggggaccacttggatcacgtgagctggaactcttgagttaccaatcttaaattcagaacaacagacgtttcgccacaggcaaagacgggaagccaccagagggatgcgcacagggcggcatcgagcacacggaaccaacgcaacggggagaaaacaagagaaaagagagccaaaaacaaaaggaatacagagggaaagaaacaccagaaagagcaaaccgccacggaggtaaacaacaaaggaaagggaatgggacaataaagaccccaccggggacacccacacgaggaggacatacggcgcccaaaaagcaccagagaggcacggacccatgaagagcaaaggacgagacatagcatctggagaagaacacaacatggcgcagggtacaaaccaagaacacacaacagggggggaagccaaagactaccacagccacaaggatgagcaacaaccacaaaaaacatgggaaagcgacacatcggacaaatctcaagggagcagataacccacataaccccggaacgaagaacacaaaacagcataagagagaggcgcatgaagcgagcaaagaaggcgagagagac

SEQ ID NO: 513068 - DNA, 623 bp, Homo sapiens
agcccctgagtacctcagaacaggcgctcctgagacctccagcgctgcctggaggagaatcaatgagctccgaggatgccatccggcagagcaaccagatactgcgggatgcgctgctgaggagcttctgcatttccaagccagccagagggaggatgaaggagttcctcagtgtgcaatgttccaggatggccaggaaactggtggagactgactcggcctggagaagctcgatactgaatgaggcaccgaaagtgagcagagctctgacgtggagtgtggagacacctgaatgagatgccagccagcacgatggctgatggacaaagggcactacatgtgaaagcccagtgtgacgtccttgctcgtggtgagcttgcaggagagccagagtcgcttgtgagtgctagccactcaagtgaatgccaaggctctggagggtcagggcccggggacggccagctgagcaaggcgacgggagcaaggagacgtgagcgcggaggcgcatgaagaagagaagaaacagcgtgcaggtggaccaagctgcgcatgcagggacagagcggtggaggacgagccccgatggagcgccaggcgcctcggaggagaagggaacgggccaa

SEQ ID NO: 513069 - DNA, 355 bp, Homo sapiens
cagattttaaaataatatttctacaaaatatataatttaaacagaaaccagactattaccttggaaagcccagctctctccttggcaagcttctgtttctttcttcctgcaagaaatgcaaagttatatttacattttgtcattataaaaatgggaattaaaagaattctaactgctgtggcagtcattaattccatttgcaaaacatttctaactctaggaatctatccctccctgtgatctgtcaagagcatatgacatgttctggtcaatgagctgtaggaaatgtgacactgcactggagcttttctccttccctttggggcagaagatctagcaatttgcaagatggggg

SEQ ID NO: 513070 - DNA, 215 bp, Homo sapiens
attcgcggccgcgtcgactgacttttaaattttgttgttaggtttgactagccttaaaaaaatttattgttggccgtgcacagtggctcacgcctataatcccagcattttgggaggccaaggtgggcagattacatactcaggcgttctaatcttgaccctccaatatggcgaaacctgtctctactaaataatacaaaaactaaccgggtgtg

SEQ ID NO: 513071 - DNA, 240 bp, Homo sapiens
atcccgaaagaggatcatcgtgccacgctaggccaatttgaaatgcgtggctttccagttttgtgtgatgaagtaatccaccgtcagggtgtagggcaccgtttcatttacataggtcatgagcctttagccatggattaaccggcacccccccaattagtaattacccaatttgcgcattgtccaccaagcgcagaagattcgccagctcgttgtccagccgttgatcatcgaggtgcg

SEQ ID NO: 513072 - DNA, 168 bp, Homo sapiens
caaatctatagagatgtgtgtgaaaacagaaggtagtccaccgagattcatatccagattggacagttagtgttgagtcgaaggggatgatgatgaagacccgtatgttgcttaattgcttgagttgttcgaagatgactctgatcctcctcctaagaaacgtgctcc

SEQ ID NO: 513073 - DNA, 825 bp, Homo sapiens
gttataattactatacgtcggccgcttattcgtgaaacacttaggtatcaaaatcgcaagacaagtggtgccaccacgccaccggaattgaaaatttgtcatatcataaaaatcttttccaattcgacaaattttttgcggtccctccaagtacaaatgtgaacactgtgcaagcccgctccccccccttttaaaaaccctgcatttccctacataacaccccgacttcttgctgatcagccacatacccgaagcatccgtatctaaacttatgcactggccccaaaccttgagagggtgatatttgccgcccaattagccactctgcgacccctctttggcaacacgattaccttttctgcacaccccttgctaatatatagctcccaacaagagggtacccccgttcataatacatgaggcactctacctttcggattatcaaccgcctacaatacaaccccggcagttttataagggccaaatccaagactccccttcgcccaatcttgctactccaacaatggcccccagagtttcaccctcccatacccctccacacaagtgtatttgcacctttatgtgcacccctcttaatcttgcccacaaattcttcatatcgttaaaaataacaccccacctctcttcccacccctcctctgtgggctcaataacacccttgggcccccatcatcatctcttgaaatatccatgcccccagaatagaccagtgactgttttacccctcaaagtgagattccaggtattccaaaatttcccctcccttttcccaaaagcccacgtttaaacctcccccacaagaca

SEQ ID NO: 513074 - DNA, 111 bp, Homo sapiens
ttacattggcgaatttgaaatcattgatgaccacagagctgggaaaattgttgtgaacctcacaggcaggctaaacaagtgttgcgcgatcagccccagatttgacgtgca

SEQ ID NO: 513075 - DNA, 405 bp, Homo sapiens
cctagccgaggtgacagagcgagatctgtctcaaaaaaaaaaaaaaaaattcacactataattgggaaatgactacttctcttctgctaatatccaaaacacattccgagcctcacaaaacaacttgtggcagtaaacagcacagttaagaacttacactaagtccaaatattatgttattagctggtacggtatttgggttcatcaaatattgagatgataagccaaaaataacaactttaatgtaacttaacttagtttcaaggaatcaaggggtattatgcacttttaccagaatctttataaaaagctagaaaaaatttatcaataaattaatcaccactgatgtaagtcacctgggtaaatattccacagtgcctcatttcaaatgtttaacacacttaa

SEQ ID NO: 513076 - DNA, 116 bp, Homo sapiens
taaaaaaaggttggaaaaattactttatgaatccattatttctatgaataattaattaaactgtaatcctggattagatacaatttaataatagttcaattccaaaataaaagtta

SEQ ID NO: 513077 - DNA, 126 bp, Homo sapiens
  misc_feature (86)..(86): n is a, c, g, or t
cactctagaggatctcggcggatggggtctgtaggcccagctgggaggtccctcactgggtcagaccccgagacctccatgccagngagaattcaagtctcagccccagaacactggcgggggtgg

SEQ ID NO: 513078 - DNA, 126 bp, Homo sapiens
gatgctattactgttcggatgatgactcaggggtaggcaggcgggggcaaagctggcggcacgtccttgagtgtgtggcgcagctcgcggcgaggttctggatgtacagccgcaggccctcctgca

SEQ ID NO: 513079 - DNA, 1691 bp, Homo sapiens
  misc_feature (403)..(403): n is a, c, g, or t
acacatgctttgtactgatatgtgtcggtcgctgcgccagtttaatcatatcccgctgtggtgtctagatacaacgcaaagtacgatgttttgggcggacaagcttgatagttagtcgtcggctaaggaggggatcctctccaccataggggttgtgtacatccataataacgcctactggcgtttgtggtttataactcgccgcggccgccccagttgtttattagtatccgcggttctctaatagtggtattgccgaagggccccttgtgggggtggtcgacatattttttcgtggccaacccatatcggggcggcacaatataaatgtgtgcgctcattcgcggataatatttgctccccaacgataatgaagagggcgatagattttgttggtgtctcncgttgtgatgtttggcgctcaattgattttctcctgcaacatgtcgggtgatcgcttggtgaaatggaagagtgttgttgcttgtatatcattgcctggggggaactcttctgcctcgcttgaaaaagaaagttgggtcactaatactttccttgggaaaaaatttgtaaggaggtgttgctcggcatgaggtttaatacagcccccagcatgatctccctcgtggtttctcagtgggatattgccttgcctggtagttggcggcttgatggcgccaccgcccgccgtgcacaccacccccacgagaaattggtttttcacttgggtgtgagagaataagggggccccggcctcggatattttctccggggagaatccttgatacttctgtcttcgttatatttttccacaacaaatgaaagcgttgttgcggctttttgtcccacaagaaaaggggcgcacattgttatagacagcccttttaaattggcctcgaaaaaaataaggtggggcccaacacctataaagagggtgtctctttggtgccccccagttgcccccccagcgcgcaggaagttcttctggcgcggtgtgcccccaaaactctctctttaggaagagcgcgtctgtcctctgttgtcgccgggaagaggcccttctgcttataaaggtgtgttgtgctatgtcacgagtgtttctcatatcacatatggggagaaaagttgtgggcgcccacatagagcgtgcgcagagagtttgttgtgggttcttgtggatatactatctctgtagagcacacagaagaggcgtttaatactccatgtaagatttttgtggtatggcctctgtgatggatctccaccacccgtgtagaaccccctgttttatacattactttaccgtgtgtaccacatgcgtgttgcgcgccacacagatgttttgtctctcagacacacagagggtgttgcttgtggcgcatctcaagagtgtatagatatctcatgtcgtgcccctggggacacccacacatgggttaagaatttggcccttaagtatagcccctgccctgtacccacagtgggaccattttggtaacaccctaagaatgtagaattcttgccccacccacacccccatttccagaaccagaaagaggtgggaagacccagaaccccctgcccatagcccccacccgtccccccagcataaccgggtttccttgccagctgtattttggaatttggatgttgctcttcttaagaccctttaataaaatgtttggtaccaa

SEQ ID NO: 513080 - DNA, 132 bp, Homo sapiens
atctagaggactccccgaaacatctcgaggctttatacatgtataaaatcagtacaatcactatcttccctttgtacatattatttggcatgtatagacataactatcactcaatcagtttgcatctattct

SEQ ID NO: 513081 - DNA, 932 bp, Homo sapiens
tcgccgttactccgacggacgactaccacgtcggtacgacggacgaccgtcgacggttacgacgggacactgggacggcactttgctgtctgcaactcgacacgttgacgggtgcacaacacatgcgtgacgtacctacaacaaccttttaactatggcgcaagcaaaaccatactccaagaaagcatcatcaacatcaccaccagcagcagcaccaccagcagcaacagcagcagccgacaccaccgcaatagctgcaaatgggcaacaggccagcagccacaactgcaaggcttgcactcatggcactgcacagcacattttcagcaaaacccaggcagcagcaagcaccttcaccccaacgacagccgtctttatggtagggcaacatcttccctccccgcacgatccactgcaggcacagcacaatgcaggcaacactcatttgcagcacaaatcatggcacacaggccaggcgccacagtctgtcccatcaacgatcacaggcatccacaggcataacgcgatatactatcccgacaaagagaacaaagcgacgaaaaccctcagacggacagaataagcaccaacaaaagatagagacggcaataggcggaccgcaaacacaacctagccacgaccaaccccacggaagggcacagaaggcacagagcaaccccagaaagctagcccgaccaccagtgatcgccacccatagcccccacgtgaccgccggcacaaactacccaccctatacaccacagaatacaccagaaccaacacacgccatgccaccataccacgtactagaatgggctagaaacacccaacccagacaaccgctggacaatgcagacaaggcaacaggcaccgagcaacgagccgcggaagggacaaacgagacacaccacagggaaaccgaaaagcaggcc

SEQ ID NO: 513082 - DNA, 1017 bp, Homo sapiens
catggtggctcacgcctgtaatcccagcactttgggaggccaaggcgggaggatcacttgaggcaggagtgcgagaccagtgctgtcaatgtagtaaatcctatctctcccatgtaaaaaaatccattgcaccaggcgatggtaggggaggggaccatgggtggctccacgcgcatatctgggaggagcgtgtggtaccaaagagcagttcagtcaggagagcgtggtgaggcagttgttccagcttgcagtgaggaggatgggtgcttccccatgcatgtccaggctgggtgcgagagttatgaccctgtgtctaaagaagactcggcgggtgccctgataagcgaggattgtaagacgtcatgcgttggtcttgcagggactttggggagggcaagtgcaggaggatctccctagaggggacaggagttctgagaaacaggcctggggcaaggggaggagcaagaaccgtattctctccctctggagtagaggacaaaatcgtcagcctatgatattccacacgatctattggggccgagctgcggcacttagataggcatagtaaacaactgcaggggctacaggagagccgcctagactggaggagcttggacacagactctgatgcccaagggatcccctgggtcgaacgtggatgggggcgtttacatctggcgcacaataaagaatcgggcgtggcgaagcgggtgttgtgaggcacaccgcaagttgtcgcttggggacctcggaagccttcaagagggccggcagggactatcaaataccggcgggggctacacatgagcgagtccctacgcgccgcggtgcgcccgacactttcgagacgcagacgccagtctgacagctgacacgacaccctattaagaggcagttgactagacttaagcaacaatccggcgcaggaacggtacaacgggacaggacacataccgtcacgggcaactatcaatctggtgccacggacaaacgtgatacgacatcacctacaagatg

SEQ ID NO: 513083 - DNA, 563 bp, Homo sapiens
agcggagatctgcctctcgctgtgtttctccccgaggggtgcttgtggccctcgaggatctccctccctccctcgctgccctcccccctcctcccccgcctgtggcacgggcagcgaggcccgaggacgtagcgacacgacgctgcaggacggcgaacagcgagaggacgcgcgctgatgcgcggtgagcccacgaacccaggaagcgaccggaggatagagccacgagtgcacacaccaaacgggagaccgatcaacgccacaatacggtgaagcacgcgcggtaggcgctcagggacacgatggaggtaccagacgggaagccagggccaggacacaaagagcccagtagaccacgagggaagggatcgcgtggagagatcatgcagaggggagcataagggcacgaaagcagtagcagtccacaagcgagaaaagcccgcaagaagggaagtgcgccaagcacaaggagagaaagggcaggaacggtacagccgaacgagatcggacgacagggggcagcggaacggtaagaaatgagacagggatcacgagggaaacgg

SEQ ID NO: 513084 - DNA, 318 bp, Homo sapiens
  misc_feature (26)..(26): n is a, c, g, or t
aaattcgcggccgcgtcgacctgaanattcgaatctagcgacaacgatgaattacatagaggcggactacgaccatatgcgtgctgttctacatgagcggagtcgggctcagggcgctctgagccgagtgacacgggttgatccaagtggcaaaccctctgcccccttacccgacaaaataggtgtgcattcacaggaaaccgttcaaccagagcccaagaagctgccagctgcacaacaatctagcagcacagaggtcagtattgatcggtggaccaagtcgactgaccgaagcgcgctacagaaggctctcgagct

SEQ ID NO: 513085 - DNA, 761 bp, Homo sapiens
tctggagaatatctgtcactcctctaatctagagaagtgaccgttattcagaagatgactacggacctatttgtagatatgttcacgacggacaattgtgagcagcaactttgaattaaacatcttccagtgtgaggacagttgagaaacgtacatcaggcgaagtctgctgtctactgtcaccatcgtttatgtctccccatagtcccccaggagctctttcctttcccctctagtttggggtgtgcatgttggagttgtagtgggtggttgtaacactggagccattctgccttgtatgggttgtacacgaaagcctcattcttttctgtgaccctttcggtttgcatacaccctccttcccacctacctgtcctggggctgttgagcagcataataatcccgggagaatgattcccctcatagaaagacaaaagctccatcccctcatagttaagtacgccacgtggtgtcctgggaatttctggttggatttggtgccctgaacttttttattaagaaatcagatcccagggtgagagtaacaaggccaattgtggcaagaaagaaacctgttgtgttttctttgtgagctatgaaaaagaccctgtttggtgaactatattttagaacggagaggacggtggtctggagaaagttgggtctggttttctggcacaaaaatgtgatagttgcggaggaacactttgtatggttggagttcagaaagctgatctcaagttgggggctagtcaaaaatg

SEQ ID NO: 513086 - DNA, 184 bp, Homo sapiens
  misc_feature (62)..(62): n is a, c, g, or t
  misc_feature (65)..(65): n is a, c, g, or t
  misc_feature (68)..(69): n is a, c, g, or t
  misc_feature (73)..(73): n is a, c, g, or t
  misc_feature (112)..(112): n is a, c, g, or t
tcgtagctcttctgtcccttgatgaggagatgcctctcatggtctcagagtgtcccagtggnacnggnnccantacctcttgggttcttagctagagactgcatccctggcncaagccaggctctgtatcttgctctgcttctctccttgctctagccttcctggctgcctcgagacaactccc

SEQ ID NO: 513087 - DNA, 672 bp, Homo sapiens
  misc_feature (271)..(272): n is a, c, g, or t
  misc_feature (293)..(293): n is a, c, g, or t
  misc_feature (311)..(311): n is a, c, g, or t
  misc_feature (348)..(348): n is a, c, g, or t
atctgtctatatactactatcaatttgctcggattctgacgcagtcgggggggaacgttactagggcttacttccatagtgatcgcaatacagatacacattctcttactgaataagtatagactcattagactgttcatcaccagccgggcaaagccacagtcaaaaaggcatggggctgaaagggagagtaaaattttgctcaatttcttggtacttaggataaaaggtcctgttttaaaccatggctcatctcttcctcaagatgttnnacagatattgaagctacatgnggctggaggctaaatagntaagctcaaactcagaaaaattgaattgaagggtttnaggtctgaggagacacacatctaccaagatcacaatcagaagatcagcgatatagcagagttgggctgaatctatcgaaaactacaatccagttcctgaccacgctcaattactgaatcagatgtaaatgaccagaccagccactgtggcttattgcctgtaatccccggcactttgggaggccgaaacaggcagattgcttgagtctcaggagattgacacccagcgttgggcgacgcatggcaagagccgtgtctcacacgtagataatacaagcaaagctaggccaggtcagtgtagtgcagtgcgctgtagtcggccagt

SEQ ID NO: 513088 - DNA, 104 bp, Homo sapiens
ctctggaggatgaacatagtggatgcctcacattttcagcatttctgtacagtctcactggctcttcataatgtgtctgtagaacagatgctctatttcacaga

SEQ ID NO: 513089 - DNA, 117 bp, Homo sapiens
ggctcggaccctcgtggtgattgttacagcagccagaggaactagatagactcatcctaaaacccacgctgcacaccatgtttgttctctttagccccgtgagtctcacggaaagcg

SEQ ID NO: 513090 - DNA, 371 bp, Homo sapiens
ttttttgtagtttagaaaaattgtttgaattttagaaagctgttattttcatgagttattttcattttgaaaaacttagaggctggaagtggtgctcgtgcctgtagtcccagtacttggggaggccgagacgggtggatcacttgagcccaggagtacaggaccagcttggggaacagacgaaactctgtctctacaaaaaataaaaaagttggccggacatggtggtgtgtgcctgtagtcctagctgtttagggggttgaggtgagaggattgcttgagcctgggaggttgaggctgcaatgagccatgatcacgccactgtacttcagcctgggtgacagagtgacaccttgtctcaaaaaaaaaaa

SEQ ID NO: 513091 - DNA, 408 bp, Homo sapiens
gtagaggataaaccgacgccgaggaacctaagctgcgagcttactatcatgtcagatgtatgtatgaagaaaggagactagtgagagggggtatttatcgcaactgctgcattaattgcctaggacctcaacagcttcatgaaagtctggggaatgttcatgcataaggttattgccttagctgacttaaaattgccccatacaatggtacatatcaacccttagtgaagccttttaaaaaaacaaacaggttgaaaaatgggttaaagtaggcaaatacagcatatctgcctttagagctatcaactcaggaattctctcaattatgaaatcttgcagagaagttatatttctttctcaaaatccaggtgatgacaatattccttactccagatctggcatttgggt

SEQ ID NO: 513092 - DNA, 176 bp, Homo sapiens
cgctgcctcaaagctcctgagtagctgggattataggtgctctccaccactcctggctatttttgtattttttttagtagagttggggttttaccatagttgcccagtgctggtctcaaactcctgtatgtcacgtgatctagcctacctcccaaagtgttgggaactgaaatgag

SEQ ID NO: 513093 - DNA, 377 bp, Homo sapiens
ggagcctgctatcgctgtgcagcggttcatcatggagagtggtgccaaaggctgcgaggttgtttctgtctgggaaactcctagacacagagggctaaatccatgaagttagtggatagcctgatgatccacagtcgcataccctgttaactactacgttgacactgctgtgcgccacgatgttcgctcatgaccgggctgtgctgggtcatcaaggtgaagaatcatgctgccctggtgacccaacctggtaagaattggccctaagtaagccccatgactgaccacgtgacgcattgtcgaaacccaaaagatgagatacttagcccatccacccccgatctcagcaacaggacattggtgggaaacccagaact

SEQ ID NO: 513094 - DNA, 104 bp, Homo sapiens
gtcctcttctataggacataagagggaccaaagcatgaatcggaaggtgatgcagttcatgggaaagaaggtggatgaaacagtgctagataaaattgtccggg

SEQ ID NO: 513095 - DNA, 647 bp, Homo sapiens
gcacgagtgcatactggtagggacactaatatacatggatgatgaggcaattgacatggcactaggcatacaattaagggttataaataaccagttacacttaacctctaaattataaaaattaaagaaataactcatcctcttaaagatactaaaacagaatagaaaagtaatatatccataaaactaaacataactttatcccatttctaaaaacctcttccttactatatcataccagaccaccctaacctctaaacccctaaaactactacttcttaaccccagtaatccactaccacacatctaaccctctccaccccatactaaccaactacttttccctaaaccaaaaacctcttacaatcccttcttactcacacacaaaatggacccactattctagatactaccctattttacaatgatgaaacttagacactagcaaatttaatacactaactcatattcctacagcctataaaccctaatacttagaacttacaccttcaccccaatacacccactctacttttactatacacactatttaacagactagttatatctgtacccacaaatagacttggatacccactttaaattgtctttccctttaaaatcggtccttccttttcccctttgtg

SEQ ID NO: 513096 - DNA, 245 bp, Homo sapiens
gccgaattgtttgcaccaaccaaaacctggcgccgttggatcgtagagtgaccacacccaaaaaccgttacgccatctgttctgccctggctgcctaagccttaccagactctggtaatgtttaaagggtacatcgtatttgggaaggttcctgaaacctccctttggatagtttaaggataaagttaaggttacaggaggcccaggaaggctgtttttgctcctaaagaatctaaagcctggat

SEQ ID NO: 513097 - DNA, 347 bp, Homo sapiens
accgaatgatagtcgggatctgtctagtatatacgaggacccgctatggaggcctccctccgcgaaaatggtgaagaatatgaaaatcagccggcacgccaagtacacttggctctttctgtggctaagccgatgatgagtagacggagctgtggggaactggcactgtggttcctggcactgaacgacagtggctggcggtgccgggacgtacaataccacttccgctggtcacggttagagtccgtgcatcataagactgaaggagttgaaagaccagtagacgctcctctactctttgagacatcactggcctataataaatgggttaatttatgtatcaaaaa

SEQ ID NO: 513098 - DNA, 207 bp, Homo sapiens
  misc_feature (63)..(63): n is a, c, g, or t
  misc_feature (132)..(132): n is a, c, g, or t
  misc_feature (162)..(162): n is a, c, g, or t
  misc_feature (171)..(171): n is a, c, g, or t
ggaagcaaaaaaacaaaactaagctcgaatttgcttccaaacctgtagattgcatctaaccangtgtccctatgcacctcagagtactggaatacgaacccagcgagaccttgtcccctcccattttgctgnacttttgttggtgaaaatgagaatgagttnatccctacntacttagtttaatgcatttgaccccagaaaacccca

SEQ ID NO: 513099 - DNA, 141 bp, Homo sapiens
ccccaaaaaactgtcagcagctgcctgcttttttgtgatgtatgtatcctgttgacttttccagaaattttttaaaagtttgagttactattgaatttaatcagactttttgattaaagggttttctttcttttttaacca

SEQ ID NO: 513100 - DNA, 213 bp, Homo sapiens
gatggacgtattatatatatacatatatacataatatacataaatattcataaatctatatacacataatatataaatatatatatcataactatgtatattcatatcataaaatatgtacacaaaatctatacactaaatataaatatatatacataaatataaatatatatacacacctcaatgaaaggtattaccctgggtagtcacaga

SEQ ID NO: 513101 - DNA, 259 bp, Homo sapiens
  misc_feature (119)..(119): n is a, c, g, or t
  misc_feature (158)..(158): n is a, c, g, or t
ctagaggatccctttacgcaggataggttggtctatactttctataagtcttagtagattaacatgcagatcccattcagtgagttcacctctaaatcacacgatcaaaagggacaagnatcaagcacgcagaatgcagtcaaaacgcttaggctagncaaaaccccacgggaaacagcagtgattaacctttagcaataaacggaaagtttaactaaagctatactaaccccagggtttggtcaaatttcgtggccag

SEQ ID NO: 513102 - DNA, 482 bp, Homo sapiens
cgatctagaggatctcatgcgcgacgcttccatcaaagttacaaagaggagctggtaccattccttctgaaactattccaaataatagaaaaagagggactcctccctagtccattttatgaggccagcatcatcctgatactaaaacctggcagagacacaacaaaaaaagaaaatttcaggccaatatccctgatgaacattgatgcgaaaatcctcaataaaatactggcaaactgaatccagcagcacattaaaaagcttatccaccacaatcaagttggcttcatccctgggatgcaaagcaggttcggtgtatacaaatcaataaacgtaatccatcgcataaacagaaccaatgacaaaaaccacatgattatctcaatagatgcagaaaaggccttcaataaaattcaacaccctttcatgctaaaaacactcaataagctaggtattgatggaagcgtcgcgcatgggtaccg

SEQ ID NO: 513103 - DNA, 180 bp, Homo sapiens
atgaacctggcacatggttgtcccaggaaggtaaaatatgccagctattgcaggcaacccatacctcagctataataacagactagcgcgcgggggcagcaggccccaacgcgcggtccgagagcgcagagggccccctttgggtatagggtagttggggggggcacctccccggtcttg

SEQ ID NO: 513104 - DNA, 130 bp, Homo sapiens
  misc_feature (99)..(99): n is a, c, g, or t
acaagcgtgtgctcaccctccgcaagtcttgctggtgcaaccaaaagcggcgagctctggagaagattgacttaagttcattgacaccacctccaagtntggccatggccgcttccatgaaccatggagg

SEQ ID NO: 513105 - DNA, 439 bp, Homo sapiens
cacgaggacgcgagacgaactcaatttcttcccgctgatctattggccgatcgtgccgggtgctcaaaaaccatccccggaagcgctggcccgcatcgatgcttacatgaagcagggtggcacggtgcttttcgacactcgcgatgcgatcatggcgccgcccggacctggtggtgaggctcgcagtcctggcatgctggcgctgcgcgaaatcctttcctcgctcgatattccagagcttgagccggtgtcgaaggatcacgtcctgaccaagaccttcttcctgctgcgtgacttcccgggccgcttcaataccggccagctctgggttgaagccctgccgacgcaggacgacctcgatggcgagaccgagaacaagcggccggcccgcgccggcgatggcgtatcgtcgatcctgatcacatccaacgatctcgca

SEQ ID NO: 513106 - DNA, 817 bp, Homo sapiens
tgcctgatgtgaattcttagttctccacttcctgcttgtccaaacttggttacttaacccgtctgtgtcttcttagcttccttatctacaaaatgaagataataatagaatcaaattcataggttgtgaagattgaataagttaatatgttagtacatgtagaatgtattgttataagtaccagcttataaataccagcttctgttattgataagtagaaagatgaatggaaaacaaaaatacgtataatcaataggccaacagctagtttttgaaaagaccaatatgatacagaaaactcaggacacaggagtaataaacaatcaatatgctaaaaatgaaacagagatataacaactagtgattttcggggaacactggccccggtctcttctcaccctgaccaccactatacattactcttcaccgaagaatcacagaggaacttgaatgaccatgacacaatttgagttcataactaacaaaagagatatgggccagcgctgtggtccatgcctgtaatccgagcactctgagaggccagtagggagatcgccgaggacaggagttcgagactagccgggcacacaggcgagaacctgtcactaataccacttcaacagcacagctggccatgtggcgtatgcctgtagccccgctactggcaggcgaagcgaggcctgcgccaggctcaagcgctcaaagggcatggaccccccacgcctcaacatggcgcccagcgcggcacccctcacacacaaaaacaacccacaacacgccgcgcccgccccaaaaccacacccccaccggcacacaa

SEQ ID NO: 513107 - DNA, 274 bp, Homo sapiens
agtaggagatagtggtgttgcagccgtcctcaccattatcacatcaggatgttgtcttgctgtacctcggactgctgggaataaggttctttcaattatgctcaagaatcagagctctcaggctctaagggtgtatgagaccactggggctaccatagcaaagtgccatagcctgagtggcttaaacaagagtgatttattgtctcacagctctggatgctaaaagcctgaaagcaaggtgtctgcatggttggttccttctcagggctgtgag

SEQ ID NO: 513108 - DNA, 194 bp, Homo sapiens
tctggtaaaagaaaagttctcactaatgtggctcaggcgggtctcaaactccgggggctaagctatcctcccaccttggcctcccaaagtgtgggaattacaggcctggcctgtaagctttccccacgtgtgttcacttttatttaaaaaaagtgctcccctctctcccagtcttaaatctcttttccacccct

SEQ ID NO: 513109 - DNA, 235 bp, Homo sapiens
  misc_feature (11)..(11): n is a, c, g, or t
  misc_feature (137)..(137): n is a, c, g, or t
  misc_feature (146)..(146): n is a, c, g, or t
  misc_feature (170)..(170): n is a, c, g, or t
  misc_feature (172)..(172): n is a, c, g, or t
caccgtccggnagttggcgtcctttctccctctccgagtgctgctcctgtcattgtggccatggacgataccctgttccagttgaagttcacggcgaagagctggagaagctggccaagaaggcggagaaggactcnaaggcgganaggccaaagtgaagaaggcccttntncagaaaaatgtagagtgtgcccgtgtgtatgccgagaacgccatccgcaagaagaacgaaggt

SEQ ID NO: 513110 - DNA, 360 bp, Homo sapiens
tttaagggggaaaaaacccccgttttttaagtttttaaaaaaaaccccaaaaagggggttttcgggtttaaaaaagtccttgtttttttcccttttaaagggccgggggggggaaatttttttaaaaacccctgggggaatttattctttttttataaaaaaaaggcctttttttgctttttggccaaagttggggataaaaggaaaaaaagttgtccaaatgtaattttccgtcccattcccccggaaaacaaggttttgaattggcccgtaaaaggggggaatgactactggaaggtaagtcaaaggggttttcccccccgtttttttttttttaaaaaaaagtttcttcccatggga

SEQ ID NO: 513111 - DNA, 299 bp, Homo sapiens
  misc_feature (25)..(25): n is a, c, g, or t
  misc_feature (68)..(69): n is a, c, g, or t
  misc_feature (72)..(74): n is a, c, g, or t
  misc_feature (80)..(80): n is a, c, g, or t
  misc_feature (86)..(87): n is a, c, g, or t
gctagagtgcacttgtggtacgtgnttcctcgtaaccacaagtgaaggtttattactgaagattgacnnttnnngcctanaaaagnnaaaaatgaagaaagtgaaaaagaagatgcctaaatgtggtgaattgtgaaattactttcagtggtttaagaagcaatggagaaaatgataatacagcataatttttacatttgatatcttgttattgatcatacttttttttgaactttagcattgaaaaatcgtacagtcatttcattatttttaaaataaaattttctctttgtctgaaa

SEQ ID NO: 513112 - DNA, 266 bp, Homo sapiens
ccacttatgcggggaggcggatgaagtctgggccaggaacaatggtaattgtgggacttaacaaagagtgagtacagctgaaggagccaggagcagaaagtatatgcatcaggtatgaggaagaaaatagattttggaagttatgagaaatgtagagagtaagtggagcatcgttcgtgattttgaggaccgtctaaaagtattagggcggcagcgggagctgcagggagtatgcgaatgctatgaagcccagggcatagggtggg

SEQ ID NO: 513113 - DNA, 343 bp, Homo sapiens
gcgtcgacccggatatatatatgtatatatgttaagcataacataagaaagaaatttcattagctgggcatgatggctcactcctgtaatcccagaaccttgggaggctgaggtgggtggattgcctgaggtcgggagtttgagaccggcctggccaacgtggtgaaacctcgtctctactaagaatacaaaaaattaggtgggcgtggtggcaggcacctgtaatcccagctgctagggaggctgaggcaggagaacggcttgaacctgggagtcagaggttgacgtgagccgagatcacaccattgcactccagcctggtgacagagtgagactctgtctg

SEQ ID NO: 513114 - DNA, 896 bp, Homo sapiens
cccacgcgtcgtgatttcctgccagaacacggagcctccagaacatgctgaggaacaggactgacaccactgcctctgactggtgccatggaacccctggagtctaccactgtggaagcctgactgcaaggcgatgctactggtctggaatgcagagagagggcggtccagcgagagctgaccacgagagctggcgctagacagtggcggaagcctgtccacggaattctacgctaccctatgcgtcgtatatcgagcaccaactcaagcgcatgctagcgcacgggatgcgctacacgaccactcaaccagtgcccacgggaggctcagaccactccactggcaagtgcacaagagtgctccagacgaagcgtcgacgtgactggcccgacggaggcacagcaccactccaatggtaaccacaagaagcgcggaccactccaccagcaaccacggaagcacagaccatctcctgagccacaggtcgctgcgaaggcagagaccactgcagccatcaagccatggaggcccagaccactgcactctagaagccagtggaagcacatgagccacttccacgcagcagtccagtggaggctcagaccatgtcaaatccacagccatggaggcacagacccactgcatcatgaaagcctacagtgggggccacaagagcactcaaacccccagatgacgacggactgcacctgaccaactccacttggcaaaggcactgggaagggccctagtaccacgagacaacccatgtgtcgaaaaagtgcccttgtacatggaaacctactaccaaaaataaggtctagaaccaccctggggggcaaaaggacgggccattggagcgacctccgttcctcccctccacgcggaataaagtccat

SEQ ID NO: 513115 - DNA, 1321 bp, Homo sapiens
  misc_feature (280)..(280): n is a, c, g, or t
ggaaaaatcagtgaccaagtgcgacatgcgagagaaaacgatagcgaaacgtatagagagaccaccggacacttatgaagaaactgcatcgaatctaacaggccaaagataaccaaggtagcatcataatgacagtgatcgagattaacacgaatagatgagatattaaccttaaatgctatgtgggcatataatgccagaattcaaaaaggatacatgactggtcaatataggataatagtcaacacatccaatcgataggtgcctggtcattcaaggntagcatcctagtcatcaacagttgacagaacagtactgactagattgaggacatcagcaaaatcataaggagcatgcgtgtgaagatattgttacgcaaagtcaaatatggacacacagagagataggacatacatgaagcctagggtgcattgacaggatgcacgtacgtgtgctgctgcataaagaaacagaatctttacacataccaaccatacatgcactacaccaaaaatggcagcaataggaaaagggggtcatttaccagtagacgtgtgtgtacccagggcagtgaaattggccaatatacggcagtagacgtatatctacttcctatcagtaatatttatgcaacctctaaataaacaaggtatgtctacaccatgaattcaatataatagccaaagattctttaaagatggaaccctacgagccgtaggaacttagcgatcttcttctcacacattaaatatattggcgatgacttgtgagaccacttccaaattgtacaattacttaggaccaggggacatattgacgtacatggataatcgcgaagaggaatttaccttgggtacattgcaagctggaaaaaacttacttattggtttttatttaacgtggaggaagggccaaaaggaattaagtttgttataaaaaaacaattgtattatgtggggagccaggggggacccacaatgagggtgataaggaacaaggggagtgcacaaaaagggggacaccgagaagagagacatgtggggggaagagaaaagagcgaagagggttcttcaccaagaaaaaaagacccggggggggaaaccaagaagggtttcgtgggaaaaaccacgaaggagactgagggagaaccacggggggaatctcaacaacgagggaaccaggaggagcgtgcaattaaaactcgcccggggagggggagaagagagaaggggggagcaagacacggacgaaacagagagcagagagagtcgaaaggagaggggagcaaagaaagcgaggaaccacggagacaacaacaaca

SEQ ID NO: 513116 - DNA, 293 bp, Homo sapiens
tgaatgtgattgcagatttgcaaaatttgcagagttgcaaaagcccttttgtacctcatctcttggacaatttaggtggagagaaacatatcattggcagtatgaaaatattgttaccaaggtaacgagagaggggtgtccaaacgttttggaacgctgatttacatattgggtttttgccctgtgaatatttcctctactctttcattttattcttccccctcccaagagtaatttaaattatctgctgaaatggaattgcatatgttttgaggccaataaatttttcagca

SEQ ID NO: 513117 - DNA, 555 bp, Homo sapiens
  misc_feature (332)..(332): n is a, c, g, or t
atgaggctgagacctactgggccacattcccagactgttaaggcattctaagtcacaggatgagaggaggtcggcacaagatcaggcaataaagaccttgctgatgaaacagactgcagtaaagaagccggctaaagcccactaaaaccaagatggccacgagagtgacctctggtcatcttcactgctacactcccaccagcaccacgacagtttacaaatgccatggcaacgtcaggaagttaccctatatggtctaaaaggggaggcatgaataatccaccccttgtttagcatatcaccaagacataactataaaaataggcatcacngagcctcagggctggtctgtctatggagtagccattctttcattcctctactttctcattcaacttgatttcactttactattgactcaccctgaattctttcttccgtgagatccaagaatcctctcttggagtctggatcgggacccttttcctgtaacactgagggtctttctgatagataccttcccgtagttatggaggaatggtggtgaatacatgg

SEQ ID NO: 513118 - DNA, 216 bp, Homo sapiens
aagatgcttacctaccacggcgtactccaccagaaaaccatcgcgaactcctgcgagcagcttgtgacttacaaaccttgttgagaagctgcttacatggacttctgtccttgtaaaagcttccccttggatagtggccctctgtagtatgcctggagatccattccaatgcactcactatcgcccaggatagcaccatacgcccagtgtacggca

SEQ ID NO: 513119 - DNA, 82 bp, Homo sapiens
  misc_feature (27)..(27): n is a, c, g, or t
  misc_feature (45)..(45): n is a, c, g, or t
gatcatgtaggggtccatttaaaaatnaccctaaaacttaatggnttaaaataacaaatatgtatgacacaatttatagaag

SEQ ID NO: 513120 - DNA, 251 bp, Homo sapiens
tctgactgatggacttacgagccagagacagacgaaaacgaggccctaagtggtaggcttcagggctggtgcccaggaagaaaaaccgagcgtagaaagacctgtggagtaggctcagagaatgtcctgaaagattggggagaatcacaccaggaaaagccttgcacaaggtgatggtacggtaaggaccacttaaagaagttcaggccacgaaaggaaaaacgaattcaaattattaaacctttggtgag

SEQ ID NO: 513121 - DNA, 440 bp, Homo sapiens
  misc_feature (16)..(16): n is a, c, g, or t
  misc_feature (29)..(29): n is a, c, g, or t
  misc_feature (39)..(39): n is a, c, g, or t
  misc_feature (45)..(45): n is a, c, g, or t
  misc_feature (57)..(57): n is a, c, g, or t
  misc_feature (61)..(61): n is a, c, g, or t
  misc_feature (84)..(84): n is a, c, g, or t
  misc_feature (88)..(88): n is a, c, g, or t
  misc_feature (114)..(114): n is a, c, g, or t
  misc_feature (162)..(162): n is a, c, g, or t
  misc_feature (407)..(407): n is a, c, g, or t
  misc_feature (423)..(423): n is a, c, g, or t
  misc_feature (434)..(434): n is a, c, g, or t
gggttttaccaacttnttgtgtttgcagnaaacatattnctgttncaaaacttttgnaagnccctttacggtgtctagtactgncagnatgtttttgtatgtgtgcacctctgnaccatgtgtgtacatatgtgtcttgctggaaagggacatattcgctgntccccgtgctgctgggagggccgcctcacaggcctcacggttcccaggccccaggcacagtggagggcagggcgtggctgcattcccctcacggctaccctcccaggcgggcttgtagccctcactgggccagacctccagggtgcggaatcaaataggaagcatgcagagactcggcagcttttcctctgatgtgtaagttatttggaacgcgtgctgtgtcccgcgatgtccctgatgtactntgcaggcgcggtgctncgtcttgtcgncagctg

SEQ ID NO: 513122 - DNA, 232 bp, Homo sapiens
ggagctcggtaccgagcgtgacttgggactatcactgtcccgacactctggctgtccaagggcccctgtgagctgggtgcagtcatgggaagaggtacgggatgcagtctagggagctggattccctgatccgagaccaagtggcatgtgtgtccctttttttgcctgctccagggagctatgaagtagatcaaataatatggtgcgtggtcaagtggctttccaaaggtca

SEQ ID NO: 513123 - DNA, 930 bp, Homo sapiens
  misc_feature (337)..(337): n is a, c, g, or t
  misc_feature (376)..(376): n is a, c, g, or t
  misc_feature (877)..(877): n is a, c, g, or t
gactccaagtgccagttccttcctggtgttcagccactgtgttaatcctctgcgagggcctgctacctgcttctctgctgttgtgaaatgggttgaattcttgatttgattcttggttgaagtctgcatagccaaagcaagataagcaaaaagaacaaatctggaggtatcacattacccaacttcaaactactacaaggctgtagctactgaaacaggatggcaaaggcataaaaacagacatgtggaccaatggaacagaatccagattccagaaataaagccaaatacttatgccaactgatctttgacaaagcaaacaaaaacataaagtggngaaaggacaccctattcaaccagtggtgctgggataatngacaagtcacttgtagtacaatggtactgaatccacatctctcgattataaaaaagaatctacttaagatggatgaaaaaattaaacctaagacctgaaacaataaaaattctaggacagaacatcagaaagtctcttctagacattggcttaacaaggacttcatgagcaagaacccaaaaggaagtgcaacaaaaacaaagataaatagatgtgacttaattaaactaaaaagcttctgcacagcaaaagaaataatcagctgaataaacagacaactcacagaatgggagaaaatattcacaaactatgtacctgacaaaggactaatattcagaatctacgaaaattcaaacagacgagagaaaaacaaataatatcatcaaaaattaggctaagatcatgaattgacaattctcaaaagaaaatatacaaatggacaacaaacataaaaaaaatgctcaacatcactaattatcatggaaatgcaaatcaaaaccncaatgcaatactactgtcctcctgtaagaatggacatcattaaaaaaaaaaaa

SEQ ID NO: 513124 - DNA, 129 bp, Homo sapiens
gaaggaggttagcagctacagagtgccataggcccagcaccatcaggaaccttgctgtggtagcgcctgagatgcaggttaaagtgctccagtccctgggcctgaaatcaaccctcttcacctggccat

SEQ ID NO: 513125 - DNA, 631 bp, Homo sapiens
ctcggaggaggcccacaggggcaacattctcttcggtcgtcccggatccgggttatccgacccccgcgcgcctccaccatccgccgaagtcgacccccacgagatccaagtcgtatacctgagggcacccggaggtgaaatcggggccaattctgcctggccccccagatcggccccccgggtctgtctcccaaaaaagttggtgatgaccatgcccaggccacgggtgactggaagggcctgaggattaccagtgagaactgacccttcagacagacaggccccagattgaggtggtgccttctgcctctgccctgatcatccaagccctcaagggacccacccagagaccagaaagaaaccagaaaaaccattaaacaccagtggggataatcacttttgatgagattgtcaaccattgctcgacagatgcggcaccgatccttagcccgaggaactctttgggacaccttaaagaagatcctgggggctgccccgatcagatgggctgtaatgttgatggcccccatcctcatgacattatcgatgacatcaacagatggtgctttgggaagccccagacccagtttagccccaagggaaacatttccaataaaggatcatttgacca

SEQ ID NO: 513126 - DNA, 691 bp, Homo sapiens
gagcggcgcggccagcgtcacggcggcggcggcggcggctcctccttggacccccggagctccccgcgccgcggagcagctggcccctaggcccctagagccccgagagctccgagagctccgctcggcgtcccgcagcgcctccctgccgctcccgccccgggctggcgatgctgcgccgacccgcgtcccgcgctggtcccctggccgcccggactgctgctcagccgaggctgcttgtgcgggcggcggggtctgggccgcgccgaggaatgcacggtgcaaaagtggtgtgcacaggagcctgactgcagagcatagaacgagtgacatcatacaggattgggtgctgacccacgaagaggacagaccatcagtacaacaagcacaagccctggctggagcccacctaccacggcatagtcacagagaacgacaacaccgtgctcctcgaacccccactgatcgcgctggataacagatgcgcctctgcgatttagcaggtgagattagcggatccaacattcacgggcagaatgtccacttgatgcagtggtagtggataaatccactggtgacgcggagtcattcgttccaacagagaacctggactgtgagctgcagaacagactatccattcaaccatccaggcctaatgactgtgggaagggacctgatggcaccaacgcga

SEQ ID NO: 513127 - DNA, 294 bp, Homo sapiens
tagagatcccccacaaatgttaacctcagcgatatacggagaataggacaacgtaaccaaagaaatctctgtcagcagctccaacaccatctggttaatgctaacgtagtcagtagacatacctcgcacggatacaataagatcccggccgacgaccacaatctcattggagtcacagcagagctcgtggatactctataggccaaagtccgcggcaagatgctcagccctgtagtccctgccgagcgtctgtgtccgcctgttcagtaaccagatacggcagagccgggcgca

SEQ ID NO: 513128 - DNA, 147 bp, Homo sapiens
gggtctcgggtacaggccgaatcttctcaaagagtgaagtcaattgagtctcctcttcagcgagtccatggaacgttctccagtctctctcctcaccagactggaggaaaatatgtacagtacaagtagcgcaccgagtgtatcaga

SEQ ID NO: 513129 - DNA, 738 bp, Homo sapiens
  misc_feature (363)..(363): n is a, c, g, or t
  misc_feature (459)..(459): n is a, c, g, or t
  misc_feature (466)..(466): n is a, c, g, or t
tgtgggaaccacccctatgtatggaaactctttctcgcaaatggtgatttgccccacccaccagaggttttgtgggtttacaccaccgatatataggcccaccggggcgcctttggtaatataatccggaaccgcgcccacggcttagagccctaatttaaacccggggtttccctattaaggttatttcttcgaagggccctcttcgcggtgttgtgggcgagagattttccgcggcacacgcaagggcgccacggctctcttgggccttcccacactgcccaagtggtgaggctcacgaggaactttctaaaggggaaagaaccacgcctggagtttctcgttgaatggtgagaagaaagngcacgtcttctttgggccgtgccacacacttgctccacacacacttttcttgtggccgctatatataaatttctcttcgtatagcacgccacaatnttgaggnctacacctcgaaggaaggaaggcccgggcacagaaaagggccgaagggcctcgccttctgagacctcgccgctgtgcctctgtgccacgcgaaaggaggtaggcacctcttctgagcttattctattccccccccccaccccccggcacggcttggaaatgtaaggactctttttaacccttgttttgttttttaaaaattaatcctgtgaaatcctgtaaaaaaaagaaagaaaaactcgagcattaactcggtcgagaagagatatcgct

SEQ ID NO: 513130 - DNA, 502 bp, Homo sapiens
tggggaggcaagggaggaggattgcttgagtccagcgagtttcagaccagcctggggcacatagcaaaactccatctctacaaacccccctaccccaaaaaaacaaattagcctggtgtggtgcacctgacctgtagtcccagctacttgggagagtgaggcgggaggataaaaaccatacactacaggagtttgaggcttccgtgagctatgatggagccactgcagtccagcctgggcaaaagactcaagagcctgtctcaaaaaaaaaaccaagacagaatcatatgggggacatggttcacaactaagaatgcaaagtagatttcatatcgatcaagtctcgcacacaatacttgccccggcattttggcacaactcttacaccccatagccaaactatggttggcattgctggagcaagtgtcgtctgacataagtgcgatgacagtgaaatctacaaaacctatgtgcgcaactgggacttcatttgccactgatg

SEQ ID NO: 513131 - DNA, 944 bp, Homo sapiens
gcttcgtgcaggttggacgggtggcctatgtctcctttggacctcatgccggaaaattggtcgcgattgtagatgtaattgatcagaacagggctttggtcgataggaccttgcatctaccaagtgatgagacattgtcactggccttcacaagctgcatgcagctcactgatttcatcctcaagtttccgcacaggtgcccgacccagtaagtctgtccggacacagcctggcagaaggcagcactatctcatacaaaatgggccagctcacacgatgggccaggatgattgacgccagagaaaagtgaaagcctaacgtatgacgagcactttttcgcatcagttttaaagtctatgcaaggcgaagaacattgaggcaacagaatattctaatgaatgaagttaagaagcgttcgcaaaggtcagtatctcctgaaagcttctcccaaataaagtcaccctggtactaaggggttactggtgctgctgctgcttgcttgctggtgcttgctaaacgttccagcaaaaaagagactcacacgccacgcagaggataacaaagagctccatggcctagaagggtatctctgcctgagaaacagccatcagtcccaggaaagcagccgtcctgtaccagaacgcgtcagaagggtcaaccagagctccacgcccagaatagtcaccctgctccaacagcgcatctggccaagtactagcagtaatggtggcaactcactaaggaagtaagtcgaagggttctttatgaccctgtttgggcctagacgaattttgccaacaggatctttcgggccccaatatgggaaacccgggacgaactttttgcgtgcgggtgtggcctacaccttttaggaagcccttgggcacctataaaggttgccgcggccccactctttattggggagggttccaggtacggggtac

SEQ ID NO: 513132 - DNA, 380 bp, Homo sapiens
aaaaacagtattgcctttaccccctctgaagacggccagtatgagtacttcctggatcgaccagcggtcaggaatgaaatccgattaaacatcattgggcatggcgacaaaggtggagtgaccttcaaaagcgaattgaaaaatgcgcagtcttattcacccgaagcgttcgttggactgatcgcgcccatgctggaaaaaaccagcgcttcccaaatcagaatgatcagtagtaaatccggcagtacaggtttcgctgaagagttatccaaacgcttgaacgttcccgtgaaggcccccgtcggtactgtcacacagttcgaagtcatgaaggacaggtattggattttggaaaagcttcccacccacgtcgaccccat

SEQ ID NO: 513133 - DNA, 301 bp, Homo sapiens
atttatgatagtagtcctcttaatggctatgaggtgggatgtgtgttttaagttcttagaagtttctagattctgtattctgagttatgacatatactgcagagtttatgttacttagaatgtttgccacgaccatgtcctctgttaagaaaagagataataggcataaatgcacataacttgtaccagatagcttctgaggcatgtggccatatgctttatacttgtgaccctgccctttgaacaaaagaatggcacctgaaacaccagaccaacaattaggtgttttggtggaagaaga

SEQ ID NO: 513134 - DNA, 329 bp, Homo sapiens
ttagcacttgctgtacccatcgtgtgagaggcctcaattcagaagtatttctctctcaaggcatgttgtgaacagcacaaggtcagacataaccaggtccacacacgtttatgtctttccacagggtgggaatatattgatgctatttcaattataaaagccacgagctacgaggagttgcctcgagacaattcccttcagtactacttgttaacttggtagaccatgggcaaagctcaagccagtccacgtgtcagtcaatactgcaaactatacatcatagtgtacttaaaatacaaacgctatggtttaaacattctccatcaaaa

SEQ ID NO: 513135 - DNA, 428 bp, Homo sapiens
atgtctccctcaatagattataaggtccaagaggggatgattgtatatcacgatatcttagtcctagcgcaatgcctagcacatagtaggcacccaataagtatggttaagagaatgaattaatttgtttagtgggttcaccaatgtgtcatcagctgtcgcatatctcattattgttagaaaagcacacttaatttagaataaattcgtcttcaaagaacagttatcattttttctgttggttggtttgttttttgagacagggtctcgctctgttgctcaggctggagtgcagaggcatgatctcggctcactgcaacctctgcctcccaagttcaagcaatgatcctgtttcagcctcccgagtagctgagattacaggcgcgcaccaccacgcatctaatttttgtagtacaacctgccggtgg

SEQ ID NO: 513136 - DNA, 118 bp, Homo sapiens
agcggggaacaatcactttggctagcaacctagcaaaagtgaacaaataggattacatgaagtgaaaaagcttatgtacagcaaaggaaacaatcaacaaagtgattgttccccgcct

SEQ ID NO: 513137 - DNA, 124 bp, Homo sapiens
acagtcccccaggaaccctgccacatctccttcaggcccaacagctccccactgctgcccacggtctgggccaccatgaagcagcgggaggatcctgagaggtcatcctgccaagggctcccgg

SEQ ID NO: 513138 - DNA, 491 bp, Homo sapiens
gagaggaaaggataaagatacccaaatggcagtcaggtttttacattctacacgagggttaacactcattcaaagtggtaaaacactgatagtggctgtgatatgttttttatgtgtattatcatacctagagataccactaagaaaagtatacaaatagatgtactaaaaaacaaaaaaaaaccccaaaaacaaaaatcactgaaaacaaatcaacacagaaccattttttaaatgttcaaataacccacagacaattaagaaaatagaaacagaagaatgaggagtcagaaaaacaataaaagacttagcccaaacatatcaataattaccttaaaagtaaatagtcttaacaaccaaataaaagacagagattgtcagagtggataaaataacatgatccaataatatgctgtctattagaaactgatttcacatacaacttcatatgtagattgaaaataaaaggatagaaaaagatataccataca

SEQ ID NO: 513139 - DNA, 207 bp, Homo sapiens
agagtcaacaggcctgtggattggcatcaaatacacgagtcttacgctgcggggacgtgcgtgtgcgccccgcaatgccacggaaggctttcataattttaacttgtacagagcttgggaaatggggctgcaaaggagagcagttcccacgccaggaaccaacgtgaatagcattggaatcagcataacagccatggaattcaggca

SEQ ID NO: 513140 - DNA, 221 bp, Homo sapiens
tgtcgtctgcaggtgaatgcttctgcgcctcttctcgggaggtcagcttttctcgatgcaccgagggcctgccctgttgtagcgaggaaccatcttcacacgcatcgacgtcggctgagcgtgtgcagccacgtgtggcctaccctgtgaaccggccgctgcgtagtcggccctgggtcgccgcttccagcccggaccagcttcacatgcaccttctgcct

SEQ ID NO: 513141 - DNA, 387 bp, Homo sapiens
tacttgacctctgtgagattttacatttgaagtgttcttataattgttttatatatacgtatagtcttttttttttccctgtcagggtcagattttctatcacagttacttttggttagaaaataaaatatgactggggtcccatttagaaggactttggttaagttctcatctcctcaaaaaggtaaagtttaagttttttagttaaaacatgtaaatgagttccttggtgaaaggtattggtttaagttacttacacttggggcatgcaaaagctgctcttctgaaccagcactaccaggttaactttaaagggaaactgatcatgagattggatgacccaattcctgaaaaagaaagggacgattttgagaaggcccaggtttg

SEQ ID NO: 513142 - DNA, 297 bp, Homo sapiens
ttggggtttttaaatgccatttttaaaaaagcctttttttcccccctttaaaaaagggtaaactcaaatttggttggatttttcccggattccccccaggaattgggtggttttaaaaccccaaatttggggccaaattttaaacctttaaaaagggttttgggggcaaatttttgggggtaaaacccaggagaattttccaaaaaagggggaaaacccctttcaaggtgcccggccttttaaaaacccaaaaagccttttggttttaattaattagccgaggggttgaggcctcca

SEQ ID NO: 513143 - DNA, 253 bp, Homo sapiens
atctcatattacataaacaaaagtaatttattttgattagttcagttacatgcctggaaatggcagaaggttaacaccacgagcttctcctatattgtaattcaaggatgtagctagattctgtgataggagttgtcatggaggccctgatgcatttacctcgtctgtgccccctcaaacacttgttcccggtaatgaatgaaggaggcagctatctctactgatgtgatcaatacagctttctctctccact

SEQ ID NO: 513144 - DNA, 283 bp, Homo sapiens
gagaaagggagggagagcaggctctgaggtttaatcagttgcatccagcttaaattcccccaaacggcggttccataaatgaaacttctttttaagtcagaggccagagcatatgcgtcccattaggaattcggcgaagccaccactgcgcgccccctgggctcactgggctggactcggccctgcccggagcttctcagagccccgtgggctctgccttgccccgcacacacacgcgcgcccacgctccgcgctctcccttggccgagacaactgggcgaac

SEQ ID NO: 513145 - DNA, 676 bp, Homo sapiens
attcccttaccaagaccattcctttttatcttccaggttcttccccacaggttagttgcgtcctactctgagcagccacgtgtattgtccttccatggatttagactggccgtacaatgtattcttcacatggaaacatattggttgagctttgccatcctcatctagccttcgttttgtgacgggttcactcccttccttatcaccccagtgtctctccacatttctgttgtcgttgagcgcccttggatcacgccagttggattttatagctgctccctctatctgtgtcacagaactatgctgcctcaagtgatcttggctccctaatggaccattgtgccccttggatagttatccgctgagaatctctaatctctctggtgttttccctgccttaaccacaaattgtggtgcgttttgtacattgcacgtatccatcacaaagttggattctgactattttgaacaccaaagtcagtccagccttttcaatgtaaacaatatttattaaggcaatctcgagtatgttatggaatccatttccaaagactgttgagacggaatcatgtctgaatataacaagatgtcgattctgtgtcggaacatatggtgacacggagctagtgcttgtgttacatataatgcactctgtctcttaatttatgtaaataaa

SEQ ID NO: 513146 - DNA, 529 bp, Homo sapiens
  misc_feature (240)..(240): n is a, c, g, or t
  misc_feature (324)..(324): n is a, c, g, or t
ggctgcggtgagccgtgatgatgccactgcactccagcctgggtgacagagcaagtccctgtctctcaagaaaaaaagacgcttccacgaactccgaggtactagttcgggtgggaaggaagagcaggaaagagacagcttgcattagttgaatgcctccaaggtgacaggcactgtatgggaaactctttcacgataattttgttcatacagttctgtaggtgggatataattccactntacaaatgaggaaactgaagctcagagggccccagatcacagcaagaggcacagataagttatggctaacttatctactatgtnaatgagaaacaactgaaggacctagaacttgtggcctgaagaagaggaggccctggaagagcagaaccaaggttttcagatatttaaaagtctgttcttcaggagagaggttcaactagcttgtctcttgtctaggatcacagcttcagggagcaaatcaatccatgataacgggtgggcattctcactcacagagctaccaaaa

SEQ ID NO: 513147 - DNA, 129 bp, Homo sapiens
tatgcaggcctgcctctggattcattccgtgccaaagaaggtgaacagaagggcgaagacgggggggagctgacatggccctagtgcagactccaagcaagcgaacttcgaagtggacagcttacacca

SEQ ID NO: 513148 - DNA, 240 bp, Homo sapiens
  misc_feature (15)..(15): n is a, c, g, or t
  misc_feature (40)..(40): n is a, c, g, or t
  misc_feature (44)..(44): n is a, c, g, or t
  misc_feature (46)..(46): n is a, c, g, or t
  misc_feature (211)..(211): n is a, c, g, or t
  misc_feature (238)..(238): n is a, c, g, or t
ctgatcctcgtcagngcttctggttcactggggccaggcncgantnggtttgcctgggtgccagcaggggctggcagagagatccacaggcccaggctgatctcttccctgctcagaggtctttccagtccagatcgtccaagctgcgtccagtggctcctggaggagtcagtgggtactgtggcctggcgcctgggtagctggccgtttngtgccaagtgaccttgtccttgctgtngg

SEQ ID NO: 513149 - DNA, 257 bp, Homo sapiens
cgcattgtttttgcacgtgtagattgccatatactgggccaattttgaattgatcagccatatcgcagcgcaattgcgtctgtcatcagaaaacacggggttctcgtcttctatgtgggtaggcctgccaggtataaataccactcagccacaccaaacacaatggagccacttgtgcctggatgcaaaaagtaaactaagtgtggcatatcctccagcttgaaccataaagcataaagagcctacccaacaatcaa

SEQ ID NO: 513150 - DNA, 122 bp, Homo sapiens
  misc_feature (43)..(43): n is a, c, g, or t
  misc_feature (68)..(68): n is a, c, g, or t
  misc_feature (85)..(85): n is a, c, g, or t
  misc_feature (89)..(90): n is a, c, g, or t
gaggatccaaaaaccataaaattcatcatccccagcaggtgcnctagctatactttattacagcaaancacaaccacacgctganctanntcgtatagataaacaccaatcatgggtcggcc

SEQ ID NO: 513151 - DNA, 308 bp, Homo sapiens
  misc_feature (290)..(290): n is a, c, g, or t
ccagatgagtaattcgtacaccgactattcccacgaccatatgttcctggggaaatcacatgaagaagacgccaagcgaaccttgtgggtagtggctctgaccgtcgtaatgatggttgctgaaatcaccgcaggttatctcactggctcaatggcgttgcttgctgatggatttcacatggcaacacacgctggagcacttggcatagccgcagctgcttacggttacgcaaaaagacatgcctcaaatgctcgctacagttttggaactggcaaggttggagacttgngtgtgctttcacagggta

SEQ ID NO: 513152 - DNA, 808 bp, Homo sapiens
tttttggtaaagacaggggtctcaccatgttgcccaggctgatctcgaacttctgggctcaagggattccttcccaccttcagcctcccgagttagctgagcactacgggcacgttgttcaccacgcctgtggccaatcttttgtgttttcttctcagcctacagacgtgggctttcattactgttgtggccaggcgtggttctcgaacttccgtggacctcatgtgatttccactccggctctcagccttcccacaacgcgtgtcgtgggcacttccagtgcgtgcaagccaccctgacacccgtgccaaggtccaatctgcctctctcactgctttaggctaatcatggtccccacagcagcaatatggcaaccacctttcactgtccccacccatccacacacccacctcgcgctttctcgtccgtctctctctctccgcccgcactacgcgcgtccctgggtctcccgcccccttgctcccccccttcgcgccctttgccccacctcccccgctgcgctggttcgccacctacggggcttctctatccagtcctcgcgctcctccgtccttcccccccagcgcctccaccgtgcattctcttctccaacttctcgatctgtcttcctcctgccacctcagcgcctcgcgccgcaactaactgccttggttggccctatcccactcgctctgggcctcggctcttttctctcctctctccctctccccctcctcccgtacacagccacccgcggcctgctcgctctcttcgtttgccccccagctctcctctccaccacaccctg

SEQ ID NO: 513153 - DNA, 667 bp, Homo sapiens
  misc_feature (77)..(77): n is a, c, g, or t
  misc_feature (89)..(89): n is a, c, g, or t
  misc_feature (93)..(93): n is a, c, g, or t
  misc_feature (101)..(101): n is a, c, g, or t
  misc_feature (111)..(111): n is a, c, g, or t
  misc_feature (134)..(134): n is a, c, g, or t
  misc_feature (150)..(150): n is a, c, g, or t
  misc_feature (155)..(155): n is a, c, g, or t
  misc_feature (182)..(182): n is a, c, g, or t
  misc_feature (191)..(191): n is a, c, g, or t
  misc_feature (224)..(224): n is a, c, g, or t
  misc_feature (235)..(235): n is a, c, g, or t
  misc_feature (241)..(241): n is a, c, g, or t
  misc_feature (261)..(261): n is a, c, g, or t
  misc_feature (265)..(265): n is a, c, g, or t
  misc_feature (299)..(299): n is a, c, g, or t
  misc_feature (301)..(301): n is a, c, g, or t
  misc_feature (305)..(305): n is a, c, g, or t
  misc_feature (320)..(320): n is a, c, g, or t
  misc_feature (331)..(331): n is a, c, g, or t
  misc_feature (338)..(338): n is a, c, g, or t
  misc_feature (347)..(347): n is a, c, g, or t
  misc_feature (358)..(358): n is a, c, g, or t
  misc_feature (362)..(362): n is a, c, g, or t
  misc_feature (373)..(373): n is a, c, g, or t
  misc_feature (388)..(388): n is a, c, g, or t
  misc_feature (404)..(404): n is a, c, g, or t
  misc_feature (407)..(407): n is a, c, g, or t
  misc_feature (410)..(410): n is a, c, g, or t
  misc_feature (436)..(436): n is a, c, g, or t
  misc_feature (482)..(482): n is a, c, g, or t
  misc_feature (487)..(487): n is a, c, g, or t
  misc_feature (564)..(564): n is a, c, g, or t
  misc_feature (578)..(578): n is a, c, g, or t
  misc_feature (585)..(585): n is a, c, g, or t
  misc_feature (588)..(588): n is a, c, g, or t
  misc_feature (595)..(595): n is a, c, g, or t
  misc_feature (635)..(635): n is a, c, g, or t
tatttgataatagttcattttattaaataatctataaagtcagaccagtgcattgggcttgttaggggaaaccattncttcctactgtnacanagcctggnagattatatnaggggccaaaacattcccttttnttcaatttattaatgngagtntgggattaaagtagatccttgcatgtnagggaagcngccacacatctggtttaagtggggcccaaaggnaagttattccncattcnccaacttccccccttgaccncccnccagttcctgtttgctttttccatcaatcaactntnagangccctaaacccaaanagttcccattnaactgtncccaaaggnatagatatggnaganatctcactccnactctcacctttggnattaaataaacctggnacnggnaggggaactatgggtgaaaccaagtnaagatttttaagaagctttgacagaaacattaagaataacacccgnatgcnaatccagaaaaaagcgctactggggggaaatagttttagccaatgttcttaaaatgctcataagggagggttggggnattaccctttaganaaaagcnctnagaactntggataaaacgggaacttggatggataaagtttgggcctnctgggccaaaagttccgagggcggcccggcaa

SEQ ID NO: 513154 - DNA, 228 bp, Homo sapiens
tttttttggggggggcccccttttgggggcccccttttcccttatctttggaacccccccccccaaaaatatattttctcgggggcccccccccggggccccccttgggggggggttttttcccccccccccccttttccctttatttttcggcggaaacccccccgtgggggttttttttttcccctgggggccgccccccccccttaagcctttttagttttttta

SEQ ID NO: 513155 - DNA, 278 bp, Homo sapiens
tgacagtggggtaacggagaggaagaggaggaggtggacagacaggagagacaggacgaagccagagatggctgaacacacagcacttcttggtcccttcgagaataaggcaccagagtcagtaacgtaccccgttgttctgtgcgattaacacgggtgctgaagggagggccggttggctagctgaagagagtgggccttgcaggacgctcacaaccttgcacaccagtggcctacttgagccatgtttgtatcttagaccaggtccacggcctgta

SEQ ID NO: 513156 - DNA, 968 bp, Homo sapiens
ttccacaatcgggcaactttaaggttccacccagtgtgcgccgtgtgggtgcgaaggttggtgtcccttcgttctgtaaacgggctcaggtagtttgttgaagaggaccatacgaggaaaaggtgtagaaggtcttggtccgctcggcgtggccctggttggtacgcgataggggaaagaaacgcaagcttgcgctgtggtatacctaagctcgcgcacacccaagtaagtatcgctggctacacccgtattggtgttccaacattaggttgagtctatttaaagtttgtaaatccccgattgtggaagtgacaacacccttcgagttaaaatcttgtctataagaggaatgagcgcagaagaagtataatgtcgtgggtataataccctaggtaatagcccagtttatcaaaataatctttgtacaagagacttggggtggaggataaactaagagtagaaaacatgaggattatctataagtcaataaaatgaatatagaaaagatattggtgggaaaggacatgtagacgataaattagtaagactgcataacagaaaatccattgtatagaatgagagtaaggatggaataagagactatcgcttaagccattacaattgagacacggtatgttcgtcgtgcaagaaggatacgacggaatgagtcaaggagcgctctgtagccacgccgactacctctgaaggcgtacactggtccaaagaatacaggatggggctcctgggacctgtaacttttagatcatgtagctgagacataaatttgttgtgtactacgtttggtattttgtcctattgtttctctaactaagaactcggtcgtaaatgtggtttgttactgtagcacttaggaacactgaaacataaaacgtgaacagttccaagcgggacagtacatatctgtatgaagcgtgtcctctgaataacttccctgagggctccactcg

SEQ ID NO: 513157 - DNA, 255 bp, Homo sapiens
agctaagtaggaaatgtacataaagcaataagtctgaaactggcttccccaactcccccgtttcttccttttccttatccttataggcctgtccctttgcctctgcccttggattggttggcaaactaaaaggacttgatgtacataactcctgtccctttttcccgttacaaggttggggacttgccccttggcttttgccttcttcatttgtgccctttggccttggggttgcattctccttccctgcccttt

SEQ ID NO: 513158 - DNA, 106 bp, Homo sapiens
ttcgagtgaacgaacatgacactacagtcagacagtggtaaacgttctaattgttcgctcctagtactaggcttagcacttaactatttcactaactactagttac

SEQ ID NO: 513159 - DNA, 1006 bp, Homo sapiens
  misc_feature (1006)..(1006): n is a, c, g, or t
agcggatcatgagttcaagaccagcctgactaacatgctgaaaccccatgtctactaaagatagaaaaattagctggacatggtggcaggcacctgtaatcccagctactcggaaggctgaggaaggagaatcacttgaacctagtaggcagaggttgcagtgagccgagatcacgccatgcattctagcctgggcaacgagagcgaaactctgtctcaaaaaaaaaaaaaaaaaaaaaaaaaaaaaaaaaaaaacaagaaatccgttgtgtgtttttaaacccaaaccccctctttaagggccttgtttgggggctccccgaggggagatatgtgggagaattgaaaagcgccaattttttctgtgtgtggggagaaacacccgtgggtgtgtcccctttttaacagaacacttcttcaacaaacaaaccagcggtttcggcagggggggggcgtcttctcccattttaaagagaggactggtgagctgaggagaaccccaagaggggtttcatagaaaatagacgtgacgactagggggcgagctcgccccggttatatattaccacgctttctcatctattatttttagggggccaccacttggtaaaaactcctcccgcgagggtaattgggttggggctccatctatatagacaatttcccgctagaatgtgtcgcgcgcgcgctgggaaaagtgcgccccaatatgtgggcccgtgaaaaagagcccccagtaagagggagcgcttaaatcatatttctctcccaccaacacaggagacacgccatctatctttacacccaccactgtgtgatatgctcgaacacgaggggtattacttcccaagatgagacagcaccccaatcgagtggggacccgcccaagaaatacatctctctgctatatataatagcccccaaaatgtacccaatctgttcttggaaagagggcaacagtgacaggaggggtgcattgtgccttcacgaacagatgagaataatn

SEQ ID NO: 513160 - DNA, 398 bp, Homo sapiens
agatcttatggctcttgggcctgtgagaaagtgacattctttacttaccacaggtcaggaacacacgttcagggactgtgcagacaaggtatgaggcccggttccccaaggggtgttttattggctctataaatcaaggttaataccttaaagggaagcgacaccattccaggcaaagacttagtaaaataaccaggttcttcaattgtgtcctgtgtcaaataaaaacaggttcttatttcacttatgcgaataactatattggcgcaagtgacgaatacttacaagtgggttccaaattttggagaaatcaggttgagagaaacaaataagctccaaatttcgttcataggagtatacttggtaaaagctgtgtagcttgggttccttggctctgt

SEQ ID NO: 513161 - DNA, 491 bp, Homo sapiens
  misc_feature (31)..(31): n is a, c, g, or t
  misc_feature (33)..(33): n is a, c, g, or t
  misc_feature (61)..(61): n is a, c, g, or t
  misc_feature (90)..(90): n is a, c, g, or t
tgctccgaggactactcgaatcgacggttcncnaaatgtttttccatgccaacagcagcancagcatccaggcactcagaaatacaaatngtcaggtaccactccagacctactaactctgaaattctaagaagtggttttatcaagtcctccagtgtaattacatggtcaaatttaagaactagggctatatgccaaagacataagaggaaactatgtagccaattactgcagaacagcagttttcaagatttcttagtcaaagcctgaatttggggctgggcatcgtggtcatgcctgtaatcccagcactttgggaggccaaggcaggaggatcctttgagttcaggaattcgagaccagcctgggcaacatagtgagactttgtctgtactaaaaataaaattagccagatgtagtggtacacacctgtaatcccagctactgaagaggctgaggtggaaggatcgcttgagaatactttatctcaa

SEQ ID NO: 513162 - DNA, 534 bp, Homo sapiens
  misc_feature (33)..(33): n is a, c, g, or t
tggggaggaggtaaagagggagttgtttccaanagctcttccgccccccctggggaaacacttttttataggcaagggggggccccgaaacccagggttttccccttgcccccttccgggggtaggtttcccaaaaaccgggttcgcctcccctggttgttaaagggtttttttcccacgcaatttccggtggggtggggggccattgggcccccggaaaaaaattaaaaacccccccctcccgggttgggttccggggggttttttttttttttccgcaagttccccgtggacaaagggggggggggggggggggggtttttttttttttccttttgggatggggttttggcccccccctccccggaaaagggctttttctttttttgggggaaaagggggggggggggggcaacccccccttccccgggttttttggtttgggggggggtgtttgggggggccccccttttttttttttcgggggggccgggttggaatttaggccccccggggtgcctggggcccctgcca

SEQ ID NO: 513163 - DNA, 111 bp, Homo sapiens
gaggctggtgactctgaggatcccgcttgcgtgctccttggtctactgcgggcctcagcctggtcagccaggagcttcttgcgggccttatcttgcgcatggtgtacctga

SEQ ID NO: 513164 - DNA, 446 bp, Homo sapiens
  misc_feature (421)..(421): n is a, c, g, or t
tggctcatgtgatccgtcaaactcctgttggttgggtccacttttccctctggacagatgtgagaaattgaggttcacagaatgtgaagggacctgcccaatggatcaccctagcctctcagtaggtattcgggacaattaatgctctttcaggctccaaaggcccatgtggttcctgaagctttccatggacagtggcaaaaacccaggcagccactgagttggtggttggctaccagtgccacagaagaaagtctgtaggaggagatgtcttagatgagagaaaattgcagaaggaggatgaaaaaaaaggctttggtgaattactgtgggttccagcatgtaatagtcccctgtgggttggagaggggacaagatgaggaagtgagttccctagagcctgaaaattgtttcctgaatnctcggggtaggcatggttagctgaa

SEQ ID NO: 513165 - DNA, 241 bp, Homo sapiens
atagaggataccccccttgaaaggtagctagacaggagaggccatagtaatctacttaccgagctacatagcggtaagctatgcaaatacctatagagcatattctataggctatagcaggctagtagtaacttccaataccctagcctaccatatagtcacaattgcctagtactataccctactagtagtagtagtactatacacattagaacattaactactctacttagatgtagta

SEQ ID NO: 513166 - DNA, 206 bp, Homo sapiens
ggggaaagggaaaaaagggggggtgggggggtccttcccttcagaaaatgaagtttttccccacgcctcctttccagggggtttccggggggcggaccccaaaggtttttttccaggggaaccccttttttttttttccccctggcttaaatgtttttaaatggtttttaccaacgggccttttttaaaaagggggttgccccgga

SEQ ID NO: 513167 - DNA, 221 bp, Homo sapiens
tttttaacctttaaaaaaaaaatatggggataaattctccccctagattcctatttggtaagagatccctttttttacccccagtttttggaggtagttttatttgaaacattttcagtcccctttacaacaaaaagcagcttgtttttgcagctttgttagcttttaaacttccagattaactgggtagccatttcagtagccctaaaagattacctcta

SEQ ID NO: 513168 - DNA, 1194 bp, Homo sapiens
  misc_feature (42)..(42): n is a, c, g, or t
ggcctgcttcaagatggcggtgcaggagtcggcggctcagtngtccatgaccctgaaggtccaggagtacccgaccctcaaggtgccctacgagacgctgaacaaacgctttcagcgccgctcagaagaacattgaccgggagaccagccacgtcaccatggatggtggccgagctggagaagactgttgagcggttgtcccgccgatggaactccgtggtcagcctgctggacatggcgtggtggagaagctcagcgtcctcaagaggaatgtgcggtaggaatccataccaggccagaggacgagcagcagaccaagactgtgcaagagccggatcgagacacctcaaagagcatagcagacgaccagcccgcggcggacagagtgtggcagaggaagcgcatggatcgcatgatggtggagcacctgactgcgttgcggatacatacaaaacaggcatgttccaagcttggcgcatgcagagacggaatcagaggacctaagtgaatatagacagctgttactgacagagcccacaagaggtggagggcagtccctagtagaggcgtgtaaaggaccacaccgtgcacattggacctgagtgccacatgacaacacagtcccggaatccggacagcatgaaagagcttgacctggcaatacaagcaccataagaaatccaggacagtacacttgaacatcatccggcacgcattaccgatccatggaaacgcgaaatggagaaccatggaacagcaaagcgacaacagcacaaaagcaggaaaagggaggcccacaaggaacgaagaggagcgcacgaggaccatggagacacgcatggcacaagcgcggccggacaacgaagcaccaccccaacaaaggacccaactgggcacctgacgggggagagaacatagatcaacaaatacccggtagaaacgatatactgaaatcactacatagtgtgaaaaaaaatacagttacacaccacaacactgtacggaggacaattaaagaataagcaaccacggtgactcaagaaaacgtagacataaaagcagataggacgaagagaaaggagagcgaaaactgcacaaccctaccgaacgatagtaagacaccagagaagaaataggagcagacgagaataatacaaaagtcaatacaaagaaaaatactgtacaaaaacaaag

SEQ ID NO: 513169 - DNA, 886 bp, Homo sapiens
atgtgcacggtaatggctggctacttggatatatatttcgagaagaagtgccacaacgagggtcgtgtgctctacgggccctcagagcaccaaaacacactggaaacaatacagtatttctactggaaaaaccatttgcagttaaagcaggtgaagccgttgaaaggaaaggtcacagttcacgaagaatagagaaaagatccacgttctctcaccgtgaccctcacgctgaataattcaactcaaacttatggtctccagtgaaacagccataaaagcacattaccttgtagtctcctactgtgggggtacgagtgggtcagcaggagggagcgggttttattgtgagcacgatggagtggatgatggaccctatttcctaatgagcctcctcaagtaagagagaagtgctcattgtgggaatctgacatagttcagctgatggaagagaatcagctgatcctcatggttcttgccacgtaactcattttcttagacgtgttgctccaccagatttaagcaaatgtaactcccacattgggttatctatatgacaaatcattgacattggctatatttagaagagagatagtctgtggttggtaataagttgcttactatgaaattctaaagcaaatggtggttatgggtatgtattgacctagtacaccggtactacacattctgtatggactcctctgaggggggtttaatggtttggtaaaaagtcggagtctaagattgtttacagtaaattgggaagagcttgacttaataaaaaaatttggaagggagagggtttgagaaaaaggggcaaagagggtccctggggaacatacggaaatttatggggaacaataaattcggggaaggaggaggttaaata

SEQ ID NO: 513170 - DNA, 181 bp, Homo sapiens
ttttggttagttgagatgtgccacccagagtggctgtgatctctagacggtacacttagctgtgtagtcccaccagtaagtacatacccatgtccagacaggagctcatgattccgtaaaacatgtgaacttatacccagcttcccattgtggaatttacattactactgaagggtggcca

SEQ ID NO: 513171 - DNA, 599 bp, Homo sapiens
ggatagtactatagtatttcactacacttctattctcagtaaccaagattgcttggggattaaacctactataagcaaacagtgagaaaggaagtcttgagagccaaaaagagagggcatgcagcactgagtaccgtccatggaccatacgtctaattatacaacgaccgcagcctcacaggggaacgcaagtgaggaacgaataagaacagcaggaggataccgacgtgtcaggagaaagaacgccgcgcctacgtcggtcgagtaccgtcttaggaaagcaggtccagaagcaaggcaccggtgacacaaccacaagcacgaaacgtagaagcaaaaaggaagtacagagaagaaatcaaaacaacgtatacaaacatcattgagaagacaaaaaaaatcacatgaacacaaggctaaatacaaaggacaagaaaacacaaacgaggaaaaaggcagacagagcgaaaatccaacatacaaagagaacagcgtaaataccatccgtaccacgtattaaccaataaacacaactcaggggactgaataaaaacaaacggagaagcaacagaaccattagataacaaaaaacaacgaaa

SEQ ID NO: 513172 - DNA, 762 bp, Homo sapiens
acagaactattttgtggggcagtcctgagtttaagaactaagagtggctgtggttatgtgaatatgttcagttcttgaatttacaactagtaactccaattcagtaaatggtatcactgttccccccttttaaggatttgatctagacttcgattagtaatgttcaactctttcacaaagatggtgagtgccatcttaagacttactggagattggtatatatttagatttatataaactggtcatgtgaatatatcgtaaatacatggggagaattagctttcacgtgtcttagaaccaagcaagagttcacctggtgttgtagtgttcatgtttcagtgttgcgcgtccttaaaggcaagggttgaagataaataaggtagcaatgactatagattttggccttaactatgagcaatctaatgataatttccccgtgtttttaaaatggtttctttgacttattgaaagggatttggaaggtgtggtttatgtgtaatatctaaagattattgcaagcactcgtctttacatcgttgacagatctataaggtcacatgcttgtagaatagttaggcaagttaaaattcactcttgaattgcttttacaatctaagtcaaactaagttatcattaggattgtcttttaaacagcattcaggaacaagagtgtgaactgtggtatttgattgggaatgggctttggcaagttaaaggaattaagtacgaaatatgccatatttagaaacaaaaaaagggggg

SEQ ID NO: 513173 - DNA, 1373 bp, Homo sapiens
ctagatcgcgagcggcctgccctattttttttattttttaatgttcaaggagcacttaaatagtacaacaaattgatagcagttttgtacacaagtacttatgcataattttatacgtacaccagctacaaacttctgacatcactttactagctacaaacgaaacagacacagaggaaaataatttcccgtgtccaatgaacattttcatacactatactgacgatttcccacatctgtcaagtattaggggctcagaaataacaagatagtctaactatatattcacatctattttctctgtataacttataatatattattatattatgagaacacaagggtcctacgactactagtttggccccacggatcaggcagattagacaaatagaagaaacacacaaacaccgacggacatacacatgacaaaacacatacacaagccacacaacgaaaaacaaagaacgaaaaaacatacaccgagaaactaaaaagaacacacaaaagagatagatagagagaaacaaacaacaaagagacaaatacaaacgacacaacacaacaaaacacacacagaacaacaacaaatcaaaagaaaaataaaaaaaagaacaagaaaacaaacaaaacacgatacaaaacaaaaagaagggaacaagagaaagagaccacaccaaacaacacagaaaacacagaaaaagaaaccagacaacaaaaacaacaacgacacacaaaaacagaagacaacaaggaaaaacaacggaagccaaaaaaaaacacaaggaacaacaaaaagaaaaaaaaaaagacaaaaagaaaaacacaaatagaaacaagagggaacgaaaaaacagagaaaacacaagaatcaaaacgataaaacaaaaaacagacaaaaaacaacagaaacgaaaaaaaaaaacacaaaaaaaacaacaaaagaaacaaaaagaaaaacaaaaacaaaacaacagaaaaacaaaagaaaaaaaaagagagaaaggaaaaagagagagaaagaagaaagaaaagagaaagagagaaaacgacaaaagagagaaagaaaaaagaaagaaaaaagacgaggagagagaaaaagaaaaaaaaaaaaaaacaaaaaaagagaacgagaagtaaaacaaaaacactgttctctccgcgctgcactgaagaagagcaagagaacaaagaaaaaggaggagaaaaacaagacagaacaggaagagagagaagagaagaaaaaaagaaaaagggaaggaagaagaagaaagaaaaaaagaaaaaaagagaagagagaaggaaaggagaagaaaagaaaagcaaagcacggtacgatagacaagaagcggacaagattatgatataaagaa

SEQ ID NO: 513174 - DNA, 133 bp, Homo sapiens
gggcaggcctactgagccatatccctagagactaatgccgaaggccatgtatgacctcccactaaattcaagtcgcctaggactagggctggggccttcctagaagccccctctcagaacctgttctcaccca

SEQ ID NO: 513175 - DNA, 135 bp, Homo sapiens
tgaggatcccgattaagacgcagaaggggaatctcgccttgggggacacggatctttggcagtgggaggaaagagaggagcagaaaaaataactatcgggcccgggcacagtggctcacacctgtaatctcagca

SEQ ID NO: 513176 - DNA, 191 bp, Homo sapiens
tgtaatgtcagttcagtgttccctgctggatcaacatggttgtcactgctgactgaggagtcggaggcagtgtgcacctggtagcgcctggcgcagttggccaagcttttgtagagccctacctgcgggatgctgcccagtctcacgctcactgtggtgtgctgctgccctcccaccacaaacgtgggatc

SEQ ID NO: 513177 - DNA, 248 bp, Homo sapiens
ggctcaccgtccgtctgtatctttcttagcaccagatgacatcagtctccaacatgtatctgatcggttggtgtggatcagcaaaaatctcccagtgacaacatcgcaatagtttctaacttctcttaggtggctctgggactgggagaggggtaggatgtacaggggtagttcgttggagaaccagcggtatttcacatgaagctgtataattcattgtcataatgttggttagcaaagattaaatg

SEQ ID NO: 513178 - DNA, 469 bp, Homo sapiens
ggtcgacccgaaattgtgccactgcactccagcctggatgacagtgtgagagtctgtctcaaaaaaaatatatgtatatatattgttaagactaaatgtcttaataaataaagaggctgggaatggtggctaatgcctgtaatctcaacactttgagaggtgaggttgaagtatcacttgagcctaggagttgaagaccagcctgggcaacataggagcctcccatctctacagaaaaatgttttttaaattagctgggcatgatggcatacgcctgtagtcctggctactcaggaggctgtggcaagttgatcacttgagccccggagttcaaggctgctactgtaagctgtgatcgtgcccttcactcagcctgggctggagagtgatactctgtctcaaagaaaaaaaaaaaagtttgcccatagggggcgtattaaaatcgacgcgcccgaatttgtagtattca

SEQ ID NO: 513179 - DNA, 345 bp, Homo sapiens
gatactgtagttggaaccagttgatgacggtgctggtcttccggttgagctgggtggctgaggtcttcgatggtttttggtgacggcgctatggcttttgctgactacgctcgtttcagacgcctccttctcctccggaccccgcaccacccggggtttcttctcctggtgctgcttctgtgtgctggcgccctggctgtcctcggtgcctgactagggctgttcgtacgcttggctgtcactgacttgatctgtgccgccgcttcattgtatgctttctttctccatctcgtttcatgttccactcaggttcttccagagttgtgtggaggtcgcttcagctca

SEQ ID NO: 513180 - DNA, 605 bp, Homo sapiens
  misc_feature (65)..(65): n is a, c, g, or t
  misc_feature (79)..(79): n is a, c, g, or t
  misc_feature (145)..(145): n is a, c, g, or t
tcaataaaagagacggtttaatgaaggccacctcggaataaactcgttaattggccagggtgccncttgtcatccaccncgagtaacgatctcgttcagcacagttgcctgctactaatgattgccattgtctgaggtagtggcngcatgccatatggacgagcatccgtaccagtaatgtaggcatatgtgaggcggtacttgtctctttcaggtcccacgtttgaacatggcatagtctacagttgtggttctaccatcccagtctaacagttccgctcttgatgtatatcggatgcagcactgtgtgcttatcaaatgtatcttctcattttgcagccacatttctgttgtgacagtagcagacagatgtctcggatccttcttagtattgaatacagtttttcttggaatatgcgcggcaatctagtctcttctgaaacacagtccattcatttccgcgacccatcgatttcaccgtagactaagaatagctggttagcttgcagaggtttaataaagtatagcccgctctgtttagcactctattggcaatgtcatgactatctttcccagtgatatcatgcatttgcagcgtgtcgttg

SEQ ID NO: 513181 - DNA, 448 bp, Homo sapiens
  misc_feature (8)..(8): n is a, c, g, or t
  misc_feature (10)..(10): n is a, c, g, or t
  misc_feature (12)..(12): n is a, c, g, or t
  misc_feature (129)..(129): n is a, c, g, or t
  misc_feature (168)..(168): n is a, c, g, or t
  misc_feature (194)..(194): n is a, c, g, or t
  misc_feature (197)..(197): n is a, c, g, or t
  misc_feature (296)..(296): n is a, c, g, or t
  misc_feature (328)..(328): n is a, c, g, or t
  misc_feature (348)..(348): n is a, c, g, or t
ccaaattngncnttttaggaaagcgtgagtgtggcaaaggtcacttgttaacatttttcttaacaagaatgtcataactactcattcatttttattttgtccccacgtttggtatttgttttgttttgngtttttccttcctgatgtcctttgcttttgtggaagatnggcctgttgataggcagaaacatggnggngatcctctatgtaaaatatagttgcttcttacacatcagaagtatttcactcattttggaatcacaggattttcatgttttcataaatacacacattgntttgataattattagcaattagcttattttgnagcattagatggaaaaatgnttaagctaaagagtttaattttcttgattttggttccactttaataattcaagaggcctccaagttcaaggaccaagtccttctattttagaattgggaa

SEQ ID NO: 513182 - DNA, 1340 bp, Homo sapiens
  misc_feature (538)..(538): n is a, c, g, or t
  misc_feature (544)..(544): n is a, c, g, or t
  misc_feature (780)..(780): n is a, c, g, or t
gagaccgcggtcggcacctcgttgagctcagaatctcagcgcgtatgtcgatcctgtggactcgtgcacgaccagcctgccctggcctcatacactaggcatgagtgtattgatcggcccaggagccttacgatccgctcggacacacgggtctcctggcgattgctgtcacacggcccggcttatcggactgggacgatggaagtgccactccctcgcgtgaccggtgcatctctctctctttccagttcggttggcggagctgccgctcctacgtggcttcacaggtgtgctgattgagattgcgctagggtgtcattggtgtgtcgacgaaagtggactatccgtatttgatcgagcgtcgaccgtgagggttcgcgagcatcctcagatgattgattggccactgcctgataaccccccttggatagctcatgccacagtacgcaccagcacagggcacattcgcgttcggcccaatgcatgcaggactcgatgcattgcagaagacacaactgcctgcgcgcgagccaatacnccattntctacgcacaatcgcagggcgttggctcggtgggtcttcctccgcattggcattggcgagcgcgcctgttgctttggtctgggactccggtaggtgggtccctccccttggtacagacctccatagggacgcaaatccggtccgtacaaaaggatagagaccctaggtgattccactgtttccgtcaaattggtctcaaacaagcaccaccatggtctattgttaacgttctgggnctgatttctcaaagagactcgatcgtcttttattctcgctcgtttaatcgactcttgccttgagccaaccggtgatcgctagtttgcgatatttcggttgtaataggaaccatgcctgtgactgtcagcagggttacgattgctatctcaacgaaactagcatcgttggcctcccaattcattatctgaaggaggaggttaagttgctcactttcacgctcccaattggacccaattccccttggcgggttcctggggaaccttgggttttgggaccggggtgaacccttagaacctaggaactaaacgcgttcaattgcaacagaattcctacaaccccggaagacaggccgggagttaacaagggcttttcaaaacacaactccgaagcgggccagaaagccgggggaaacatttctgttggcgttttgaaccattttcacatgggacgcaacaagcctggttgcctaacacgttcgcccccttgggaacgtttcggagccaaaggaaggaattggggcccacacggggttggttttaccaagatttcactgcccctc

SEQ ID NO: 513183 - DNA, 585 bp, Homo sapiens
ggccgggcgcggtggctcacgcctgtaatcccagctctcagggaggctaagaggcgggaggatagcttgagcccaggagttcgagacctgcctgggcaatatagcgagaccccgtcccagaaaaaggaaaaaaaaaaaacaaaagacaaaaaaaaaaaaaaaaaaaaaaaaaaagtgtgtgggggcgcgcgcctggggccccggaaaagcctttggtgaacccattgtgcgtgtgtggggcgccgggggccccaagagagagtgtaagaggagaaaagaggtggcccaagagaggtgtgttcccacgagaggagaacaccgcggggcacgagagaaaagagaggacgggggagttctctgtcaccacaattgataaaaacaccgccgggggggggcaacacagagcgagcgcgcgctatcgtcgagaaaacaaacattctcaacagggggggagacaacaagcgagagggagcgccaaaacagaggggggcagactctatatacacacagacgaggagaagtccaagaagagaggagcaccgcgaatcatctacaatattaaggccccctcgcgcggggggggag

SEQ ID NO: 513184 - DNA, 239 bp, Homo sapiens
atggtatgaagggataacatcctgatgtctccattgaagctcctctgttgcaaaatactacttggcaaagttgctgctatttaaagtagtgagtttgatcttggactttgatctaaatcttttgatcttgaaagaaggatggcgtagcaataccgagagggcaagacagattttcttccaagaagtgtgataaagttaaggggatggtcaagatccagcaagtgactcggacaactcgt

SEQ ID NO: 513185 - DNA, 141 bp, Homo sapiens
ctggcggcgcgcgcccgattctagctgtggtaggcctcggcgactccaaccagttcttccgggacgtctacggcgagactttgagggccagagtcccaatgtgcacccttggatgtgcgggaacgggtaccgcagctcgaa

SEQ ID NO: 513186 - DNA, 437 bp, Homo sapiens
  misc_feature (377)..(377): n is a, c, g, or t
  misc_feature (401)..(401): n is a, c, g, or t
cttgatgcatttcttgtacagtgtaagggtctgtttttaacatcaccagcacagttttaagaatgtgacggttgctgagcggttcaggtcagcttaggaagaaaaagcctttgaaaatggaagttctgtaaacagaatttcaggtgttgcattcctgtcttaaacacatttctttaaatccacacaacggcagacttttctaccaggtaataagcattcgagataactgatagccagcataacttactgacttaccagttaagtatagtcatcacttactgtgaaattccagatgcctgccagctcagcttgtatcttcatccttcgagaagcatctcaacaggctgggtttccctgtgttggtttagaaagctttnctgcctgggcattaaagaaagaangtggccttgtgtctgctctggacagatcctggagga

SEQ ID NO: 513187 - DNA, 103 bp, Homo sapiens
catggatttgctggtccagtccaactaggcttaatagggactcgaattcgagcctcgaattcaagtttctaccgttagaagcttgaattcgagcagtagtagt

SEQ ID NO: 513188 - DNA, 949 bp, Homo sapiens
  misc_feature (949)..(949): n is a, c, g, or t
ggctgtgccgtcccacccgcccaacatggtgctcatccttgctgagacccctgcggtctgtgcccgcgccagccagctgccccggtgcacgcctgtagtcccagctcgcccggtgccacaagctctctgctgggtccatccctccccacctgggttcctgtctcctctgcatggccctgccggtgctcttcctgcagacgccgtcaaagcgtctgttcattgcatgaagttgaggcaggctgtggagtggactctaggccctgattgggccacaactttgtgtggctcacccaggccttagcctttccaggcacccttatcaagtgttgatcccttcccttccaccaaagagcaagttcccagtacgtcataccccgggtttgtgaaaacgatgccatgcttgttacataggtcttccctcagacaagggccactacaagctatttcccgcattcctattgacgcacttgagtctgggatgcccccatctttgtgtatgcaaaaagggattttctgtgggaaaaaaactggtcttttggcccccatttccacaaagatgggcgcgaattacgctcgggcaacccaacactgttggaaacccacctgggaagatatggcgggcccaccagaggaagagaggcacgagatgggacccattccattgggggacccaccccagtttgaaaacggtgcttggtgcttcgaaggcaacccttgtgcccctgtatgggacgagcagggacagggacaatggacgggctgttgaaacaaaaagtgattgagcaggtaccagctgtgcacaaggactatggcttcccccgcgttgtgactctaatagtggccatgggaccaagttggcaccatcaaatggcacaatagaggtgtggaccattgggcacagtgtggccttggcaagcaacttccctacccgcgaatttttaagataacn

SEQ ID NO: 513189 - DNA, 590 bp, Homo sapiens
atgaaaagaatacgggaactgtttacagaatgcgcgattgtgcaaaaatattagcaaagttgtatattgtctcgctgtacaacaatgaagaaataagattaggtcatttacaagaaatgttttacagattacaataggctataacttagtatattatgaataaaattgatggcacatcatacatttttacatcacagattcagtgttaaaagaattcagacatgataaagcttagacttgacaagaatgatgtcatagaatgaggcaactgaaactgaaatggcatgtgtaagtaaaattaatccccaaattaaaggattccttagattgggacataataacatctgctgagtacactttggtcaataactggtcataaagataaacgccattcaatattagttaaaaaatcagtttaatgctgtagtataaataaacaagtacaagcacacagtgtataaaaaataataaaaaccatcttaatattgcttacatcctaatactatcagttatattcggggacagcagactaggatattggtgtaactactataaagataccttctgtatctacatgctgtaactaaact

SEQ ID NO: 513190 - DNA, 103 bp, Homo sapiens
gggggggggcccccccccttttttaaaaaaccccctttttttttttccctttgaaaaaaaaacccgggtttttggggggttaaaaaaaaacccttggggggga

SEQ ID NO: 513191 - DNA, 311 bp, Homo sapiens
atgcccactctcaccactcctcttcaatgtagtactggaagtcctagccaaagcaatcagacaagagaaagaaataaagggcatctaaatcagtaaagaggaagtcaaactgtcactgtttgctgatgatgactgtttaccttgaaaaccctaaggactcctctagaaagctcctagaactgataaaagaattcagcaaagtttccgaatacaagattaatgtacacaaatcagtagctcatctatacaccaacagcaaccaagcagagaatcaaatcaagaactcaaccccttttacaatagctgcaaaa

SEQ ID NO: 513192 - DNA, 103 bp, Homo sapiens
gggctctcgagcgctgctctgagcagcgtcaccctttacaccagaaagctggcggcactatggggaaaaaacaaaacaagaagaaagtggaggaggtgctaga

SEQ ID NO: 513193 - DNA, 285 bp, Homo sapiens
  misc_feature (116)..(116): n is a, c, g, or t
cggctacagcatcacatccactaaatgcacagttgttgaagtcacgccctgccagacctctactaccacattgttccctccggtgaccagtttgtccgtcactgtcaggagaatgncccgtgtcgaatcatcgatctccatccgagccaaaagttttccatatgctgaaattactgaattgccctcgtttatagtatatgatacagtggccttcgttggaggcagatatcaagcatggggataagcagttttctggtccttaagggctctcagcaaatctccgtg

SEQ ID NO: 513194 - DNA, 500 bp, Homo sapiens
gcacgcggggagaatttacgcgtgaggctgtgagctctgaaacccactatatgagctcctttagagttattacacacacgagaacattgtgatacacagagatattctttctttttgtgacaaaacatatttcaaaacttaacttgtgaaggcaaaaattggtttaatacccgtttaaccattataaatatttcatgtgaaggaggaaaacactttggaaaaccaaaatgagatataaggcctatccagggtatattgagaaagtgttgagcttatattggaaattatatggttcaatttacaaggttcatggaaaaaaatttactataggttaacttcctgtgacacattgtgcattggaacacagaacactttgaagtgcactgtcacggtcagaactgtgttgcgaatactctaaatactctggatacacttaagcgcgaatgtgtgtggttaaccgtgggtgaggaaactctattataatttaattgtgaaacatg

SEQ ID NO: 513195 - DNA, 89 bp, Homo sapiens
agcggggcttgggtgtgagggtggcagccttgtgctcaagccgaggctgggctggaggatggagaaggacacggggaccacacacagga

SEQ ID NO: 513196 - DNA, 277 bp, Homo sapiens
gcaccaggtcgacgaaaaggagcgcgcgctcgcgaaattgcaacttcaactcgccgaacaagaggatctgattcgcaaagggttggtgcaagaggaaattgccatgctccgctctaccaaggagcagttggcggcgttgcgcgatgagcgggacaggctgcatctgtccaacgagggcgaacgtgcgcagctgatggaggccgctcgccgcgaatctgcgctgatcgtcgatcagggactttctctgaaggctcactgggaggggttgatctctgcc

SEQ ID NO: 513197 - DNA, 863 bp, Homo sapiens
aatatagtgggatcgtccggcttcggagcggcatatgcgttgtgccagaagtagtcacagagactggcatatgagtgatgtggagaaaggcacagaacgatttgtaataaatcggacagtgtccccatgtgccacgacacgtgtcatgaagggaggcaagcacatatgactggcccaaaatctccagtggtctcttatgcgcggaagacaggtcaggcccctgtgatactctgtagcacagagcgccaagtataggacactaccggcatcatttgtggaagaggatacacgtgatggagtcttgggagaactcctaggaagtacgtcccctgggattcagaacctgatctccgtcggcattaccacagaaggaggatagggcagactataatagcttatctcaaaagaaggctactaatgatgtccctacatgggccatgtgcgttattattacaataagagacattgtctcttgactggttatgttgtaccactcctttattatgatctcatacccagaatttcagatcatgattgctgtccgacttctttggtcgcggcgtcctgattttcctactgatactggctgtggcttcatgtatctggtgcagtttaaggatttctatgtaggtacttcccatcccaatgctctggtgtccctggcacccgtttttcagatttgagttggacttcgtctgaagatgttctctttccaaagaatggccagtgccactttagactacggggcgggcaaattgacctcatactggtttggcaacgcttattgtgcaaagcttttcgttttaaccagcggaacacggggtgtgagagcatggcctaagcagggggcaaaacggaggcta

SEQ ID NO: 513198 - DNA, 1596 bp, Homo sapiens
gccaccgcggacgagcgcggagttctggagtctcggacccgaagccgccacagggcgccccgcctcccgcccgccatgcccgcgccccgcgccccgcgcgctctggcggccgccgcgcccgcgtccgggaaggccaagctgacgcacccggggaaggcgatcctggcaggcggcctggcgggtggcatcgagatctgcatcaccttccccaccgagtacgtgaagacgcagctgcagctggacgagcgctcgcacccgccgcggtaccggggcatcggggactgcgtgcggcagacggttcgcagccatggcgtcctgggcctgtaccgcggccttagctccctgctctacggttccatccccaaggcggccgtcaggtttggaatgttcgagttcctcagcaaccacatgcgggatgcccagggacggctggacagcacgcgtgggctgctgtgcggcctgggcgctggcgtggccgaggccgtggtggtcgtgtgccccatggagaccatcaaggtgaagttcatccacgaccagacctccccaaaccccaagtacagaggattcttccacggggttagggagattgtgcgggaacaagggctgaaggggacgtaccagggcctcacagccactgtcctgaagcagggctcgaaccaggccatccgcttcttcgtcatgacctccctgcgcaactggtaccgaggggacaaccccaacaagcccatgaaccctctgatcactggggtcttcggagctattgcaggcgcagccagtgtctttggaaacactcctctggatgtgattaagacccggatgcagggcctggaggcgcacaaataccggaacacgtgggactgcggcttgcagatcctgaagaaggaggggctcaaggcattctacaagggcactgtcccccgcctgggccgggtctgcctggatgtggccatagtgtttgtcatctatgatgaagtggtgaagctgctcaacaaagtgtggaagacggactaagcctagagaggccgcaaggggaccgccccaggcaccgccagagtgtcctgctacctttgtctcacatgattccagtgcagtagtgccaaaaggccccttcccacgtccctcgagctctgtagcctggtctgtgcattgtggctgtcaaatccatgtgtcccccctgtggtctgtgtgtgacaccaccactgtgtcccagtgtctggcccagccatggctggatgtgcatctggcctatgaccctgtgcccacttgtccatgtgcttactgtgaaccctgtgcctgtgtttcatgttctgtgtcacgtgaccctgtgccccgcctcccggggtgcccgtgtggcctgggtcctcggccctgtagccctggcccggtcccagtccggtgccttccaccctgccctggcctaccacagctgcctccgggcctcggcctggcttcaccgcattccaggggctgcagccccctgcttctcccgccattggccttaactggccctcgggccctctctccgccccggacagggtggcacccaccactctcaggaccaccctgccaaggcagaataaaccggatcctgttgca

SEQ ID NO: 513199 - DNA, 446 bp, Homo sapiens
ccgatgacaagtacttctttatgtccgatatagacatgctgaggcaagcaacgctggcgatatggagagcttgctcaagaccatgatcaatcattagatctagaacgttaagatcatgtccttggctgagaacgatctagattagacttgccttgattgtactagagtaagtaaattttgtactgaggatgactataagtgatcagaatcagaggcttgtgtgacagcagaaactcaccaaattccagctggtagcatgtactaggcgtgaactgagatccaagattaagatggcttagttaagccggacattattctgtcaaagaagatgaactatagaaagctctattacaaccaggtacgcaaaggctacttccttatccagacacgaggtcagtgactattagaggccagccgtgcattacgtctttatgagctgacagcct

SEQ ID NO: 513200 - DNA, 885 bp, Homo sapiens
  misc_feature (532)..(532): n is a, c, g, or t
  misc_feature (885)..(885): n is a, c, g, or t
gcagcagtcctggagctgtgaggagatacgggaccgtcaccctgcctcgcctgcgtcccgccgacgggcgcttctgtcctctggacccattccaacaattctcgtaaaacatggtggagttactatgaacgttcgtaggctcgtgcagcagacatgcgctctgcccggagggatagttacaaagaggcatatcgtgacaactggctactgaagtggcatccagataaaaatcctgagaagtaaagaagaagctagcagcagaaaattcaagcaagtagcggaggcatatgaagtgctgtcggatgctaaggaaacgggatcatctatgatcaaatatggtcagaagaaggattaaagtggtggagggaggaggtgggaagtcatttttgacagtccatttgaatttgggcttcactattccgtaacccagatgatgtcttcagggaattttttggtggaagggacccattttcatttgacttctttgaagacccttttgaggacttctttgggaatcgaaggggtccccgangaagcagaagccgagggacggggtcgtttttgtctgcgttcagtggatttccgtcttttgtaagtggatggtcttctatggatgcaggatttacttcattggggtcactgggtcacggggtcctcactctattctcttccacgtcatttggtggtagtggcatgggcaactataaatcgatatcaacttccactaaattggttaatggcagaccaatcactacaaagagaattgttgataacagtcaagacagagtacaagttgaagatgatggccagttaaagttcttaactattggttatgagcagctgctgtgcttggataacaagtgattcaacgcacgcgcttagctn

SEQ ID NO: 513201 - DNA, 1625 bp, Homo sapiens
  misc_feature (1609)..(1610): n is a, c, g, or t
gccaccgcggacgagcgcggagttctggagtctcggacccgaagccgccacagggcgccccgcctcccgcccgccatgcccgcgccccgcgccccgcgcgctctggcggccgccgcgcccgcgtccgggaaggccaagctgacgcacccggggaaggcgatcctggcaggcggcctggcgggtggcatcgagatctgcatcaccttccccaccgagtacgtgaagacgcagctgcagctggacgagcgctcgcacccgccgcggtaccggggcatcggggactgcgtgcggcagacggttcgcagccatggcgtcctgggcctgtaccgcggccttagctccctgctctacggttccatccccaaggcggccgtcaggtttggaatgttcgagttcctcagcaaccacatgcgggatgcccagggacggctggacagcacgcgtgggctgctgtgcggcctgggcgctggcgtggccgaggccgtggtggtcgtgtgccccatggagaccatcaaggtgaagttcatccacgaccagacctccccaaaccccaagtacagaggattcttccacggggttagggagattgtgcgggaacaagggctgaaggggacgtaccagggcctcacagccactgtcctgaagcagggctcgaaccaggccatccgcttcttcgtcatgacctccctgcgcaactggtaccgaggggacaaccccaacaagcccatgaaccctctgatcactggggtcttcggagctattgcaggcgcagccagtgtctttggaaacactcctctggatgtgattaagacccggatgcagggcctggaggcgcacaaataccggaacacgtgggactgcggcttgcagatcctgaagaaggaggggctcaaggcattctacaagggcactgtcccccgcctgggccgggtctgcctggatgtggccatagtgtttgtcatctatgatgaagtggtgaagctgctcaacaaagtgtggaagacggactaagcctagagaggccgcaaggggaccgccccaggcaccgccagagtgtcctgctacctttgtctcacatgattccagtgcagtagtgccaaaaggccccttcccacgtccctcgagctctgtagcctggtctgtgcattgtggctgtcaaatccatgtgtcccccctgtggtctgtgtgtgacaccaccactgtgtcccagtgtctggcccagccatggctggatgtgcatctggcctatgaccctgtgcccacttgtccatgtgcttactgtgaaccctgtgcctgtgtttcatgttctgtgtcacgtgaccctgtgccccgcctcccggggtgcccgtgtggcctgggtcctcggccctgtagccctggcccggtcccagtccggtgccttccaccctgccctggcctaccacagctgcctccgggcctcggcctggcttcaccgcattccaggggctgcagccccctgcttctcccgccattggccttaactggccctcgggccctctctccgccccggacagggtggcacccacgagcgtgccttcattgaaacccaacctcggggggggctacaatgggtccaatgataaaatannccccaggtacacggg

SEQ ID NO: 513202 - DNA, 150 bp, Homo sapiens
gtcagtgtctctgacagcttatactaaattataagaggactgagctcattcagtccttgtgtgctgcagactacggtgatgtcaatcgcagtcccctacacaggacctttttgggtataatagtataattgggatgcactgggtccctct

SEQ ID NO: 513203 - DNA, 1608 bp, Homo sapiens
gccaccgcggacgagcgcggagttctggagtctcggacccgaagccgccacagggcgccccgcctcccgcccgccatgcccgcgccccgcgccccgcgcgctctggcggccgccgcgcccgcgtccgggaaggccaagctgacgcacccggggaaggcgatcctggcaggcggcctggcgggtggcatcgagatctgcatcaccttccccaccgagtacgtgaagacgcagctgcagctggacgagcgctcgcacccgccgcggtaccggggcatcggggactgcgtgcggcagacggttcgcagccatggcgtcctgggcctgtaccgcggccttagctccctgctctacggttccatccccaaggcggccgtcaggtttggaatgttcgagttcctcagcaaccacatgcgggatgcccagggacggctggacagcacgcgtgggctgctgtgcggcctgggcgctggcgtggccgaggccgtggtggtcgtgtgccccatggagaccatcaaggtgaagttcatccacgaccagacctccccaaaccccaagtacagaggattcttccacggggttagggagattgtgcgggaacaagggctgaaggggacgtaccagggcctcacagccactgtcctgaagcagggctcgaaccaggccatccgcttcttcgtcatgacctccctgcgcaactggtaccgaggggacaaccccaacaagcccatgaaccctctgatcactggggtcttcggagctattgcaggcgcagccagtgtctttggaaacactcctctggatgtgattaagacccggatgcagggcctggaggcgcacaaataccggaacacgtgggactgcggcttgcagatcctgaagaaggaggggctcaaggcattctacaagggcactgtcccccgcctgggccgggtctgcctggatgtggccatagtgtttgtcatctatgatgaagtggtgaagctgctcaacaaagtgtggaagacggactaagcctagagaggccgcaaggggaccgccccaggcaccgccagagtgtcctgctacctttgtctcacatgattccagtgcagtagtgccaaaaggccccttcccacgtccctcgagctctgtagcctggtctgtgcattgtggctgtcaaatccatgtgtcccccctgtggtctgtgtgtgacaccaccactgtgtcccagtgtctggcccagccatggctggatgtgcatctggcctatgaccctgtgcccacttgtccatgtgcttactgtgaaccctgtgcctgtgtttcatgttctgtgtcacgtgaccctgtgccccgcctcccggggtgcccgtgtggcctgggtcctcggccctgtagccctggcccggtcccagtccggtgccttccaccctgccctggcctaccacagctgcctccgggcctcggcctggcttcaccgcattccaggggctgcagccccctgcttctcccgccattggccttaactggccctcgggccctctctccgccccggacagggtggcacccactaggacacctggcaggaataacggatctgtgaaaaaaaaaaaagggggggataaatacacc

SEQ ID NO: 513204 - DNA, 540 bp, Homo sapiens
  misc_feature (34)..(34): n is a, c, g, or t
  misc_feature (43)..(44): n is a, c, g, or t
  misc_feature (88)..(88): n is a, c, g, or t
  misc_feature (475)..(475): n is a, c, g, or t
ggaccatcatcctaaattattatgaatggaaacngtaaactannacgttcatatccactccccaagattacatcaagagtggcaggcntgggacaccagagtttccggaatggctcctcagggctccagctgcaacaaactcgctgtgccaatgtgcatgcagttcctgattctaatcaaataagtatcataaccgagttcacccgaaatagagtatactgcacagaaacttaataatgggtgagaaagacacattcgtgacattagcaattattaccatacgtggtcaaatccatttttattttctgttttctcatttagtgagtcctctgggatctacacacaggtaccaattttttgcctattcctggcaccgcgcactgcttaatcatcctccccacactgactttgttgaccatgctcgattgtcaataccaatagttctccaggggtggctcaggtacccacaggggtncctgagatcctttaagggtctgcgagatcaaacaattttcataataatttaggatgatggtaccg

SEQ ID NO: 513205 - DNA, 1361 bp, Homo sapiens
gccaccgcggacgagcgcggagttctggagtctcggacccgaagccgccacagggcgccccgcctcccgcccgccatgcccgcgccccgcgccccgcgcgctctggcggccgccgcgcccgcgtccgggaaggccaagctgacgcacccggggaaggcgatcctggcaggcggcctggcgggtggcatcgagatctgcatcaccttccccaccgagtacgtgaagacgcagctgcagctggacgagcgctcgcacccgccgcggtaccggggcatcggggactgcgtgcggcagacggttcgcagccatggcgtcctgggcctgtaccgcggccttagctccctgctctacggttccatccccaaggcggccgtcaggtttggaatgttcgagttcctcagcaaccacatgcgggatgcccagggacggctggacagcacgcgtgggctgctgtgcggcctgggcgctggcgtggccgaggccgtggtggtcgtgtgccccatggagaccatcaaggtgaagttcatccacgaccagacctccccaaaccccaagtacagaggattcttccacggggttagggagattgtgcgggaacaagggctgaaggggacgtaccagggcctcacagccactgtcctgaagcagggctcgaaccaggccatccgcttcttcgtcatgacctccctgcgcaactggtaccgaggggacaaccccaacaagcccatgaaccctctgatcactggggtcttcggagctattgcaggcgcagccagtgtctttggaaacactcctctggatgtgattaagacccggatgcagggcctggaggcgcacaaataccggaacacgtgggactgcggcttgcagatcctgaagaaggaggggctcaaggcattctacctacctttgtctcacatgattccagtgcagtagtgccaaaaggccccttcccacgtccctcgagctctgtagcctggtctgtgcattgtggctgtcaaatccatgtgtcccccctgtggtctgtgtgtgacaccaccactgtgtcccagtgtctggcccagccatggctggatgtgcatctggcctatgaccctgtgcccacttgtccatgtgcttactgtgaaccctgtgcctgtgtttcatgttctgtgtcacgtgaccctgtgccccgcctcccggggtgcccgtgtggcctgggtcctcggcctggcttcaccgcattccaggggctgcagccccctgcttctcccgccattggccttaactggccctcgggccctctctccgccccggacagggtggcacccaccactctcaggaccaccctgccaaggcagaataaaccggatcctgttgca

SEQ ID NO: 513206 - DNA, 290 bp, Homo sapiens
  misc_feature (62)..(62): n is a, c, g, or t
  misc_feature (159)..(159): n is a, c, g, or t
  misc_feature (164)..(164): n is a, c, g, or t
  misc_feature (182)..(182): n is a, c, g, or t
  misc_feature (225)..(225): n is a, c, g, or t
gcatacttgacaactgtggactcccagttttgttggagaattgtttttcttaacattacttnagggcttaataatggagatgtaaacttcatggatgtcttcggattagattccatgtagttatttcctttaaaccatcagccgcccttttatatggtnttcantctgactagaatttagtntctgtgtcagcacagtgtaatctctattgctattgccccttangactctcaccctctccccactttttttaaaaattttaaccagaaaataaagatagttaaatccct

SEQ ID NO: 513207 - DNA, 1761 bp, Homo sapiens
gccaccgcggacgagcgcggagttctggagtctcggacccgaagccgccacagggcgccccgcctcccgcccgccatgcccgcgccccgcgccccgcgcgctctggcggccgccgcgcccgcgtccgggaaggccaagctgacgcacccggggaaggcgatcctggcaggcggcctggcgggtggcatcgagatctgcatcaccttccccaccgagtacgtgaagacgcagctgcagctggacgagcgctcgcacccgccgcggtaccggggcatcggggactgcgtgcggcagacggttcgcagccatggcgtcctgggcctgtaccgcggccttagctccctgctctacggttccatccccaaggcggccgtcaggtttggaatgttcgagttcctcagcaaccacatgcgggatgcccagggacggctggacagcacgcgtgggctgctgtgcggcctgggcgctggcgtggccgaggccgtggtggtcgtgtgccccatggagaccatcaaggtgaagttcatccacgaccagacctccccaaaccccaagtacagaggattcttccacggggttagggagattgtgcgggaacaagggctgaaggggacgtaccagggcctcacagccactgtcctgaagcagggctcgaaccaggccatccgcttcttcgtcatgacctccctgcgcaactggtaccgaggggacaaccccaacaagcccatgaaccctctgatcactggggtcttcggagctattgcaggcgcagccagtgtctttggaaacactcctctggatgtgattaagacccggatgcagggcctggaggcgcacaaataccggaacacgtgggactgcggcttgcagatcctgaagaaggaggggctcaaggcattctacaagggcactgtcccccgcctgggccgggtctgcctggatgtggccatagtgtttgtcatctatgatgaagtggtgaagctgctcaacaaagtgtggaagacggactaagcctagagaggccgcaaggggaccgccccaggcaccgccagagtgtcctgctacctttgtctcacatgattccagtgcagtagtgccaaaaggccccttcccacgtccctcgagctctgtagcctggtctgtgcattgtggctgtcaaatccatgtgtcccccctgtggtctgtgtgtgacaccaccactgtgtcccagtgtctggcccagccatggctggatgtgcatctggcctatgaccctgtgcccacttgtccatgtgcttactgtgaaccctgtgcctgtgtttcatgttctgtgtcacgtgaccctgtgccccgcctcccggggtgcccgtgtggcctgggtcctcggccctgtagccctggcccggtcccagtccggtgccttccaccctgccctggcctaccacagctgcctccgggcctcggcctggcttcaccgcattccaggggctgcagccccctgcttctcccgccattggccttaactggccctcgggccctctctccgccccggacagggtggcacccaccactctcaggaccaccctgccaaggcagaataaaccggatcctgttgcaaaaaaaaacaaaaaaaaaaaaaaccgggggcatctaggcgggggggggaaaaaggggcatggcacggggcccggggcaaaagaggtcctggaccagttttctggcccacggggacactgggaggccccaaaaggaggccgaaaatccgaaaagcggggacggacg

SEQ ID NO: 513208 - DNA, 910 bp, Homo sapiens
ggtcctcatgcatgctcctcatgcatggtcctcatggatccggggtcctcatggattccggggtcctcatggatcccgggtctgcctggatgtggccatagtgtttgtcatctatgatgaagtggtgaagctgctcaacaaagtgtggaagacggactaagcctagagaggccgcaaggggaccgccccaggcaccgccagagtgtcctgctacctttgtctcacatgattccagtgcagtagtgccaaaaggccccttcccacgtccctcgagctctgtagcctggtctgtgcattgtggctgtcaaatccatgtgtcccccctgtggtctgtgtgtgacaccaccactgtgtcccagtgtctggcccagccatggctggatgtgcatctggcctatgaccctgtgcccacttgtccatgtgcttactgtgaaccctgtgcctgtgtttcatgttctgtgtcacgtgaccctgtgccccgcctcccggggtgcccgtgtggcctgggtcctcggccctgtagccctggcccggtcccagtccggtgccttccaccctgccctggcctaccacagctgcctccgggcctcggcctggcttcaccgcattccaggggctgcagccccctgcttctcccgccattggccttaactggccctcgggccctctctccgccccggacagggtggcacccaccactctcaggaccaccctgccaaggcagaataaaccggatcctgttgcaaaaaaaaacaaaaaaaaaaaaaaccgggggcatctaggcgggggggggaaaaaggggcatggcacggggcccggggcaaaagaggtcctggaccagttttctggcccacggggacactgggaggccccaaaaggaggccgaaaatccgaaaagcggggacggacg

SEQ ID NO: 513209 - DNA, 148 bp, Homo sapiens
gcacggagctcggcccgcgtgagggccctcccctccccgccgttccctcctccgtcagccccgcaccgcccgggagagacggtttgccaggcctggggcgggcggggaggcctcggggaagggggggcccgctcctcaggcgccgagg

SEQ ID NO: 513210 - DNA, 1603 bp, Homo sapiens
gccaccgcggacgagcgcggagttctggagtctcggacccgaagccgccacagggcgccccgcctcccgcccgccatgcccgcgccccgcgccccgcgcgctctggcggccgccgcgcccgcgtccgggaaggccaagctgacgcacccggggaaggcgatcctggcaggcggcctggcgggtggcatcgagatctgcatcaccttccccaccgagtacgtgaagacgcagctgcagctggacgagcgctcgcacccgccgcggtaccggggcatcggggactgcgtgcggcagacggttcgcagccatggcgtcctgggcctgtaccgcggccttagctccctgctctacggttccatccccaaggcggccgtcaggtttggaatgttcgagttcctcagcaaccacatgcgggatgcccagggacggctggacagcacgcgtgggctgctgtgcggcctgggcgctggcgtggccgaggccgtggtggtcgtgtgccccatggagaccatcaaggtgaagttcatccacgaccagacctccccaaaccccaagtacagaggattcttccacggggttagggagattgtgcgggaacaagggctgaaggggacgtaccagggcctcacagccactgtcctgaagcagggctcgaaccaggccatccgcttcttcgtcatgacctccctgcgcaactggtaccgaggggacaaccccaacaagcccatgaaccctctgatcactggggtcttcggagctattgcaggcgcagccagtgtctttggaaacactcctctggatgtgattaagacccggatgcagggcctggaggcgcacaaataccggaacacgtgggactgcggcttgcagatcctgaagaaggaggggctcaaggcattctacctacctttgtctcacatgattccagtgcagtagtgccaaaaggccccttcccacgtccctcgagctctgtagcctggtctgtgcattgtggctgtcaaatccatgtgtcccccctgtggtctgtgtgtgacaccaccactgtgtcccagtgtctggcccagccatggctggatgtgcatctggcctatgaccctgtgcccacttgtccatgtgcttactgtgaaccctgtgcctgtgtttcatgttctgtgtcacgtgaccctgtgccccgcctcccggggtgcccgtgtggcctgggtcctcggccctgtagccctggcccggtcccagtccggtgccttccaccctgccctggcctaccacagctgcctccgggcctcggcctggcttcaccgcattccaggggctgcagccccctgcttctcccgccattggccttaactggccctcgggccctctctccgccccggacagggtggcacccaccactctcaggaccaccctgccaaggcagaataaaccggatcctgttgcaaaaaaaaacaaaaaaaaaaaaaaccgggggcatctaggcgggggggggaaaaaggggcatggcacggggcccggggcaaaagaggtcctggaccagttttctggcccacggggacactgggaggccccaaaaggaggccgaaaatccgaaaagcggggacggacg

SEQ ID NO: 513211 - DNA, 1562 bp, Homo sapiens
gccaccgcggacgagcgcggagttctggagtctcggacccgaagccgccacagggcgccccgcctcccgcccgccatgcccgcgccccgcgccccgcgcgctctggcggccgccgcgcccgcgtccgggaaggccaagctgacgcacccggggaaggcgatcctggcaggcggcctggcgggtggcatcgagatctgcatcaccttccccaccgagtacgtgaagacgcagctgcagctggacgagcgctcgcacccgccgcggtaccggggcatcggggactgcgtgcggcagacggttcgcagccatggcgtcctgggcctgtaccgcggccttagctccctgctctacggttccatccccaaggcggccgtcaggtttggaatgttcgagttcctcagcaaccacatgcgggatgcccagggacggctggacagcacgcgtgggctgctgtgcggcctgggcgctggcgtggccgaggccgtggtggtcgtgtgccccatggagaccatcaaggtgaagttcatccacgaccagacctccccaaaccccaagtacagaggattcttccacggggttagggagattgtgcgggaacaagggctgaaggggacgtaccagggcctcacagccactgtcctgaagcagggctcgaaccaggccatccgcttcttcgtcatgacctccctgcgcaactggtaccgaggggacaaccccaacaagcccatgaaccctctgatcactggggtcttcggagctattgcaggcgcagccagtgtctttggaaacactcctctggatgtgattaagacccggatgcagggcctggaggcgcacaaataccggaacacgtgggactgcggcttgcagatcctgaagaaggaggggctcaaggcattctacaagggcactgtcccccgcctgggccgggtctgcctggatgtggccatagtgtttgtcatctatgatgaagtggtgaagctgctcaacaaagtgtggaagacggactaagcctagagaggccgcaaggggaccgccccaggcaccgccagagtgtcctgctacctttgtctcacatgattccagtgcagtagtgccaaaaggccccttcccacgtccctcgagctctgtagcctggtctgtgcattgtggctgtcaaatccatgtgtcccccctgtggtctgtgtgtgacaccaccactgtgtcccagtgtctggcccagccatggctggatgtgcatctggcctatgaccctgtgcctgtgtttcatgttctgtgtcacgtgaccctgtgccccgcctcccggggtgcccgtgtggcctgggtcctcggccctgtagccctggcccggtcccagtccggtgccttccaccctgccctggcctaccacagctgcctccgggcctcggcctggcttcaccgcattccaggggctgcagccccctgcttctcccgccattggccttaactggccctcgggccctctctccgccccggacagggtggcacccaccactctcaggaccaccctgccaaggcagaataaaccggatcctgttgca

SEQ ID NO: 513212 - DNA, 637 bp, Homo sapiens
catctacctcctatctacctatcgtctacatacctacctactcaattatcatctagctagctagctatttacacctttttgttttctacaaatgggcatgttgtctgaataacaatctctgaatgtccagtccacttcattcattcattcagtcaacacaaatttgcttagcagtttttatgtcccgggtccaagggcctgggtacaataattaattagacacaatcccttccctaggaatgttcccaatcctggcagaacacaaactcacatagaggcactcacaggcaaaccacaaacacacatgcccacttagccccccacacaggcctgtatacccagaggcgtctatccacaccaacacacacattctaacagacacacatatcaacctcacgtgcccaaaggcacagatgcacatgcagaaagcctcagagaccctcaagtcagccacttacatatttattgtcatgaattactttgtaacaaccaatattttttaacaccccctacgtataaggcattattttaagtgcattttgggcattatatcattccaccctcacattagacattgaaggtagccactattattaccttcaatttagtgacgagtaaaccggcctcgtgccgaatt

SEQ ID NO: 513213 - DNA, 125 bp, Homo sapiens
catgttttttgctactcagagcagtctggaatatagaagcggatggttggggggaagtaagtaactggagtgtgtctttagtccaggtgccccaggctgctaaaattataattttttttctttga

SEQ ID NO: 513214 - DNA, 822 bp, Homo sapiens
tcggcatgtacgaggctgggttttagctcacgcggcctgggtgcatgcggtccggtgtggatcaatggagacgcgcaccctgccacctgcgttccctgagactttctggcacctgcaccgcgcgctgcagtgcgcgcttctgatgactgtgccagtgttcctggagcatttgctccatgccctcgcctgcctgctgtggccccgtgtgtggcccctgtgtgcttgctgctgctgctgcctgaccccctgctgtggtcttgtctctccaacttgcagctgtgtcctgcctgtcttctgagctgctgtcctcatgctgcctgtgtgcctgcctatgccactgccctgcctctgcctgcctctgcttggtgccatgctgctgtcttactacacttgcccatgcactgctgcatgctccccctgcgcactcctgcttgagccatgcttgcgtactgtgtgctctgtggccgatcacctgtgctgctgagccctgctgctgctcacggggtgtgctgtgcgcctagtgccagcttgtgctgggatcctgcacatgctgaccttcctgcagcaactgcgggtggacttggccctgctgcctcggagagagcttcctcccacaccctgagtgagccacgcccttgaagaacttacctctgctaatgacgggaggacactgtcccctgtgcatcctaggcagacttgtgtcttgaatgagctggtggaagaacagtgccgcacagtggctatgacccaactggacactgtctgttactgaggatccctctctgtgctgctagctgcaaggactatgcattggcgagaagc

SEQ ID NO: 513215 - DNA, 81 bp, Homo sapiens
gatgtgatcatgcccccttagcgggtatgtttgagggagggacagaggttcggttttcccttcttttcatcccccccccca

SEQ ID NO: 513216 - DNA, 1727 bp, Homo sapiens
gccaccgcggacgagcgcggagttctggagtctcggacccgaagccgccacagggcgccccgcctcccgcccgccatgcccgcgccccgcgccccgcgcgctctggcggccgccgcgcccgcgtccgggaaggccaagctgacgcacccggggaaggcgatcctggcaggcggcctggcgggtggcatcgagatctgcatcaccttccccaccgagtacgtgaagacgcagctgcagctggacgagcgctcgcacccgccgcggtaccggggcatcggggactgcgtgcggcagacggttcgcagccatggcgtcctgggcctgtaccgcggccttagctccctgctctacggttccatccccaaggcggccgtcaggtttggaatgttcgagttcctcagcaaccacatgcgggatgcccagggacggctggacagcacgcgtgggctgctgtgcggcctgggcgctggcgtggccgaggccgtggtggtcgtgtgccccatggagaccatcaaggtgaagttcatccacgaccagacctccccaaaccccaagtacagaggattcttccacggggttagggagattgtgcgggaacaagggctgaaggggacgtaccagggcctcacagccactgtcctgaagcagggctcgaaccaggccatccgcttcttcgtcatgacctccctgcgcaactggtaccgaggggacaaccccaacaagcccatgaaccctctgatcactggggtcttcggagctattgcaggcgcagccagtgtctttggaaacactcctctggatgtgattaagacccggatgcagggcctggaggcgcacaaataccggaacacgtgggactgcggcttgcagatcctgaagaaggaggggctcaaggcattctacaagggcactgtcccccgcctgggccgggtctgcctggatgtggccatagtgtttgtcatctatgatgaagtggtgaagctgctcaacaaagtgtggaagacggactaagcctagagaggccgcaaggggaccgccccaggcaccgccagagtgtcctgctacctttgtctcacatgattccagtgcagtagtgccaaaaggccccttcccacgtccctcgagctctgtagcctggtctgtgcattgtggctgtcaaatccatgtgtcccccctgtggtctgtgtgtgacaccaccactgtgtcccagtgtctggcccagccatggctggatgtgcatctggcctatgaccctgtgcctgtgtttcatgttctgtgtcacgtgaccctgtgccccgcctcccggggtgcccgtgtggcctgggtcctcggccctgtagccctggcccggtcccagtccggtgccttccaccctgccctggcctaccacagctgcctccgggcctcggcctggcttcaccgcattccaggggctgcagccccctgcttctcccgccattggccttaactggccctcgggccctctctccgccccggacagggtggcacccaccactctcaggaccaccctgccaaggcagaataaaccggatcctgttgcaaaaaaaaacaaaaaaaaaaaaaaccgggggcatctaggcgggggggggaaaaaggggcatggcacggggcccggggcaaaagaggtcctggaccagttttctggcccacggggacactgggaggccccaaaaggaggccgaaaatccgaaaagcggggacggacg

SEQ ID NO: 513217 - DNA, 616 bp, Homo sapiens
cccgctgactcacgtatgttcaccaggctgtgccttaggcgccgggccgtgcgacggcatgacttcgtctgcggtttcgccgaacccatcgccgccacagcagccaacgcggccgccgcaccacgcggacccccctgcccgttgtgctgacgaccatcctgggctgtagcaccctgtccagactggcctgcccgaccagactggcccgattgaccggcaccggtccccgcgccaacaccgctgcctggcccagccccagcaccagctgcgttaccggctgccgcaacgtacggccgcgccaacaaatgcgcacacaaaatttccagcaataactgtggcgaggtggcgccacgcatctgcggcaatcgctcgtttactacgtccgcataatgcgtcagcgcctccgggctaaaccacccagcttgttccttcaacaccgccacgcgatcctgcggggcagacaccagcccctcatcgaaagcctcgggcacagcttggattatcagcagatcccgcaggcggtccagcaagtcttccacgaaacggcgtggctcgtgcccagcattgatgacgtcgttgacgatgcggaataattcgcctttttcgtcgtcggcca

SEQ ID NO: 513218 - DNA, 163 bp, Homo sapiens
cccaacgcgtccgggcatatgtcatcttattgcgttttgctttattgcacctttgcacaataatgcacttttttacacaatggaaggtttatggcaactctgcgttgagccacgtctaattggtgccatgtttcccataaaacttctcctttcatgtctcgta

SEQ ID NO: 513219 - DNA, 385 bp, Homo sapiens
tgtgtcgggggacagagggaccattttagaaagataccaaagtaaagtcaaaagaaagacatgtggctataggcgtggtggctcatgcctataatcccagcactttgggaagccggggtaggaggatcaccagaggccagcaggtccacaccagcctgggcaacacagcaagacaccgcatctacagaaaaattttaaaattagctgggcgtggtggtgtgtacctgtaggcctagctgctcaggaggctgaagcaggaggatcacttgagcctgagttcaacactgcagtgagctatggtggcaccactgcactccagcctgggtgacagagcaagaccctgtctctaaaataaattttaaaaagacatattaaaaaaaaaaaa

SEQ ID NO: 513220 - DNA, 102 bp, Homo sapiens
ccgagcttgagcagtatgaccccccggagttggctgacagcagtggccgagtggtcagagataagtggtcagcagacatgtggcgcttgggctgcctcatta

SEQ ID NO: 513221 - DNA, 484 bp, Homo sapiens
actcgaaatgttgctaacatcatgctcaacaatgagccctggaaaattcctggaatggattattaacacatgagagtctgtaagacactctagaaacagggcacggtgatgtcccatggggccagcacgtgctcgcaactgtacaggcatttgctctttgtaacacggattagatagcctgctcgtgcccaggtgagaacatgcagcacacgcgcatctcgtagtcagcagagattttgacgtgcttctaacaaacatcttgtagacgacgatggagctatgggggttggaggagagaacatataggaaaaatcagagccaaatgaaccacagccccaaagggcacagttgaacaatggactgattccagccttgcacggagggatctggcagagtccatccagttcattcaacacctggttagaaaactggggccagcacacagggaaagggtaagctggtttcatgatcgtatcaatgcgca

SEQ ID NO: 513222 - DNA, 380 bp, Homo sapiens
aagggggcagacgcgaatccggctccttagtggcaatggcctgtgcacaggaagctgccaagtcctgagtgccgcgtcctctggcccgaggtcgctcctgcaggtccgggggacgccctccaaccccagcccagctcctctgagtgccacatccactggcctgaggtcacccctgcaggcccgggggatgccctctgaccccagccctggcgctgcctgctcctgtgtctgcctctctcctgcacccacctctgccagctttcgtttgtccatcagctcggtggcttcttgggcctccagcttgtgaatctctgtccttgcctttgagatttccctctgccgttccatttccaggctctcttcccggaccctctcgccga

SEQ ID NO: 513223 - DNA, 193 bp, Homo sapiens
gactgtacctctgcacgagacatctgtagtatctgtatgtactacagccgtctctagcagatataaaaagagacaaggaacccaagaatatgaaagttcatcatggcaccgacgattctctactgcctatacttgcccttagccaaacgaaagtgtgacattctcatgattaccacgcattggacctacaaaa

SEQ ID NO: 513224 - DNA, 873 bp, Homo sapiens
tgatgtgaatggacagtttctatgcttttccttttttccatcccttccctaccatcaaaagcatacctgctctaattaaaaaaaaaaaaaaaaaaaattcaagttctcagcgtgaattgggtgggtaagccgcacttagcaaggggtataccattagctaagtggtatatttctatttacaatacgggaagctccttaaattttactatttagaaacacgtggtacaataactcgcgggcgtaacacatttttggacagaatttatctcttttgggggtggcaggggggtgctactacactttagtgttcttgggtgaaaataccacgtggggggggctcctctccttacaacaacctttgtggaactaaaaaacaaaacttcaaatctcttctccaccgtggtcgggggaaattccccttttcaggtctttccagcatttggcattgggagggggtccctcttgggattttctcatatttaccatgtgctcaaaatttacttgcgggcgtactcaataaataagcctccaagagttcccccatttataatgtcttcaaacactggggctactgcaggggggtcccaaatccgggcttgggtcaccacttggggggcctttcaaactcctttccaatctgggggtatggctggtcggacccttttggcgagggtcttacagcgccttgggtcaagcggcgaatgggcccattgtccgaccttgatggggcggtacccacgcgcatggtgtctgtcaacacccggttgatccggaaagggccccttttttgactgtttcctgggcttgcttgtccggattttgcctttggcccctatttggggttttgccgcggcaatgcctcctcatgcggtc

SEQ ID NO: 513225 - DNA, 476 bp, Homo sapiens
tcaagaccataaactggactctgctggaaaagcggaggttggagccacccttcaggcccaaagtgaagtcacccagagactacagtaactttgaccaggagttcctggacgagaagggggggcttttccaaaagggacaagaacctcatcgactccatggaccagtctgcattcgctggcttctccttggtgaaccccaattcggggaacttctggaagattgagggtcctgggaagattagggtagccctggcttcaacccaaacctgcccgctccccacgataagcaccattgggactgtggtgacttggtgctggccccgccctgggcccaaaaagttccttggtggcgtgtgggcggggtctcaagggaaattccctgtgagaagtgtgtgaaaatgggtttcctctgacttcgggaggggaatagtgaaacccgtgtgtcacaacatgaatgtagttaacaattggaaata

SEQ ID NO: 513226 - DNA, 481 bp, Homo sapiens
ccaatcagcccattttgtaatcgccccatctctcatgagggagtctcatctcccatttggggatgaggatgtttccttgtcttccaggtggccacgagcctgcttctctgatccaagtgtgctaagagtcaagtatccctccctaactactgttagccatcccttaaagtgtatttcctacctagttataatgtgaagtaatttgatacccccaaaactcaaaaccttcagataacacaatgcaaaacagaacacagcctttgattttgagagggatttatctgcttttaattccttgggtttcatgaggaaaacagaggggttttttttttccccaaaatggggcctgtggcacctcctctgttttcccaatgagtccgaggctaccggaagttatcttggggcctctcctgtgtgcattaagtgtggcaagacaaaaaaagtcgacccccccgcgaatttagtagtagtaggcggccga

SEQ ID NO: 513227 - DNA, 271 bp, Homo sapiens
gctcgacattggttgtcatcccgccccacaccaacataacaaccctcggagccttgccaacaactgccggggtaaatttcctaatgcacgtaggtgtaggtactccccccgctcccgcctccaaggtccagaagcttatggcggtcattgtgttatttgaagttattcagccgcaagccgccacagtcatcagcttcgaagccccaaaggcagatgccacctacccatatctcagcgagcgcttttctcaaagacatgttgcaaagacaac

SEQ ID NO: 513228 - DNA, 189 bp, Homo sapiens
  misc_feature (1)..(1): n is a, c, g, or t
ntcatatgttctcctcgcgacaggtgtgtgaacacctcacaggtcgcgccgtgtgaaaattgcagacaaacggaatgtgatcgacttgacgccgaacgcgagggaacacagaatgacggcgcgtagggctgaaacctaacaccatcaaaaaagcctagggctccacccctgggcttttttggtcgacgc

SEQ ID NO: 513229 - DNA, 701 bp, Homo sapiens
ggggttaaaaaagagtaataaaaggatttaaaaaaaaaaaaaaattttaacaactaactaggaaaaaaaaaaaaaaggaaaaacacaaaaaaaaaaaaaaaaaaaacatttgggccccctctggccctcctagtctggactctagcacacttttgttcgcggccccatttttggccccctttgccccattgccctctatgggggcctgtttcactttcctgggcccctttttccaccacgcggactctggaaaccccggggtgtccccccttttaagccttgcggctcatccccctttttcccctgggggtattatcgcaaaggcccccacctgttgccctttccaaaacttttgcaccccctttggggaatgggaattgtgcccgcctatatttcggtaaaaaccccgtttaaaatttgttgaaccccgtctttttttaccccctatgccccaattgccatatccccctttttttctcaaaatcatcctccgatatgggctagggtgttgcccccttggaacacaagtctccctttttagaaaacgggctctcccgcgttaaggggcaaaaaccttgtttaagggggatgggcccctttgcggccctttccccttagttttggggcccttgggccgtcaaggcctttgggccccctgggggccccccttttagctctccggggccctgaccttgtgggct

SEQ ID NO: 513230 - DNA, 130 bp, Homo sapiens
cataactccagtgtaggcccaagactgtacaacctcattttcatactaggatttctaacatggccctgtgagctgccgaggtcctgcatcacagccttccctgcgaagggacatgcggatctgctgcatc

SEQ ID NO: 513231 - DNA, 129 bp, Homo sapiens
ctcgatcaaactcagagtacatgtcgcttaaacggcatggactgataacaattttattaaaatggataatatattttatcgtttttaataaaattgataacctggatttgctagaaaaatagtgatttt

SEQ ID NO: 513232 - DNA, 150 bp, Homo sapiens
agagccccccttttttataaacttagtaaagtcttggagactaaaagcaagatagtttgtgacccataagcttcccaaaaactagaatagatttttactgaatagtgggaaatctgatgggatatgttttttaaaggtcccaatgtaata

SEQ ID NO: 513233 - DNA, 228 bp, Homo sapiens
gcttcagtggtttcaggtcccgagccaggcccaccacagtctctgcttcaacaggatcccacagctgtggtggccgggcatggatttgctggaacttgtgcagcgcacataaggcccgatgcaggcagtgagcctggagaacttactgggagctctgggccaccacatgtggctggagcaggtactgcgtccagagacttatgtctcacagtgtggcgcatctttcct

SEQ ID NO: 513234 - DNA, 311 bp, Homo sapiens
  misc_feature (9)..(10): n is a, c, g, or t
gccttggcnnctatgccatttctgttgtagtttggggcagtgcaggggacctgtgtggggtgtgaaccaaggcactactgccacctgccacagtaaagcatctgcacttgactcaatgctgcccgagccctcccttccccctatccaacctgggtaggtgggtaggggccacagttgcttgatgtttataaagagaataggttgatttattttacatgcctttgaagtaattgttgaaaaataattccaaaccattttctaacccaaaaaatgacattttttaaaaggacaataaacgttggttcaaaatg

SEQ ID NO: 513235 - DNA, 102 bp, Homo sapiens
agaggattccagttacagcgcaggggaagcttggttgaaccctgtgctggtgtctgaccaccctcccctctcttgcacccgcctctcccgtcaggcccaagt

SEQ ID NO: 513236 - DNA, 256 bp, Homo sapiens
tccctcccctctccaagagcttaaattatttaaaacagggaaaagaggaaaaaaaaaaaaggggcccgccctaacccaattcttgcccctcgcgttttttggctggaagtggaggtagtgtgtggatcctgggggcccccgctggttgggccccggccctcgtgcaaacgccggtgcccccggttaacgcgtcatataatagtcaaagcatggtcttccattcagacccaaaagagcgccggatacactatcgagg

SEQ ID NO: 513237 - DNA, 509 bp, Homo sapiens
  misc_feature (31)..(31): n is a, c, g, or t
  misc_feature (35)..(36): n is a, c, g, or t
  misc_feature (43)..(43): n is a, c, g, or t
  misc_feature (80)..(80): n is a, c, g, or t
  misc_feature (90)..(90): n is a, c, g, or t
  misc_feature (109)..(109): n is a, c, g, or t
  misc_feature (128)..(128): n is a, c, g, or t
  misc_feature (136)..(136): n is a, c, g, or t
  misc_feature (143)..(143): n is a, c, g, or t
  misc_feature (146)..(147): n is a, c, g, or t
  misc_feature (165)..(165): n is a, c, g, or t
  misc_feature (171)..(171): n is a, c, g, or t
  misc_feature (185)..(185): n is a, c, g, or t
  misc_feature (188)..(188): n is a, c, g, or t
  misc_feature (190)..(190): n is a, c, g, or t
  misc_feature (210)..(210): n is a, c, g, or t
  misc_feature (227)..(227): n is a, c, g, or t
  misc_feature (236)..(236): n is a, c, g, or t
  misc_feature (243)..(243): n is a, c, g, or t
  misc_feature (264)..(264): n is a, c, g, or t
  misc_feature (267)..(267): n is a, c, g, or t
  misc_feature (332)..(332): n is a, c, g, or t
  misc_feature (337)..(337): n is a, c, g, or t
  misc_feature (347)..(347): n is a, c, g, or t
  misc_feature (412)..(412): n is a, c, g, or t
  misc_feature (428)..(428): n is a, c, g, or t
  misc_feature (466)..(466): n is a, c, g, or t
agtgtcacggggggcatgtgtctgtgtactnaagnncagtganaaggttgtcagcattccagtgagccctggagccttcncccccccaanaacacaaggtgaaagtgtnctgggcgaggatcgggaanccacgggngtcctantanncattaatggtgaggatgncattgnccgtatggcccttnatnancagctcaagatcctcacccnccgcttcctggggaagntcctggaancctaaancaggcagggccggtggatttngtnggataaaaagtgatcccccttccttccctggcccttggttgtgacacaagatcctcctgcagggntaggnggattgtttnggattcccttttgtttttccttttagttttccatcttttcccccccgggggcccattggaatttnagtaaagtttgggggngggtcccccccttcctgtcccccccccccccagcttgnttttgttggcccgtctttcaataaaaaaaagctgtttggttta

SEQ ID NO: 513238 - DNA, 320 bp, Homo sapiens
aggtcccccctggcttgcttcaggtctctcggcttactgctccctccgtgtctgggattcaagcagttctcctgccttagcctccagagtagctgggattacaggcacgcaccaccatgcccccagctaatttttgtatttttagtagaggcggggtttcaccatgttggccaggctagtctcgaactcttgaccttagatgatccgcccaccttgacctctcaaagtgttggtattacaggcgtgagccatggcgcccggtctttcctatctttctgactgtatcttcagatcactcctgaacctgagacctgagcaag

SEQ ID NO: 513239 - DNA, 803 bp, Homo sapiens
tggcttttattcttagatatctcatgactgacgataatggctgccaagagtggcaatatgggatcttcatgtccgtagtgccatttctattggtcgttctaaagaagatgaactcttgttaacaaatttgtaaaccatatgtcgggactcttgttctcactgtactgctattccctgcctactgtggcatcattttcggaaggcagtatcagcggatcggctctgacaagtcttggctagacggtataagtttattgtgtttctatgtatgttcttgtaaagaaataacaaatgttctgttgcaaacgatctgcttgttggattctgagggtggggagggagagagagggagggagagggtagtgaagagcctgccctcctatatggattcttcagggccctccacatctgaggtggctcattcccatcacacacagattgtcctggtgttcatttcaaggccagtgttcagcagcagcgtttggaacagcagagttcatgtgagaccacccacgcctccgcacccacgcactaccttgcatatgacagcagtacgtaggagtactccatcctagttttcatgcaacagttctatacaagaaactgtgcgtgtgaccttcgcggctaggcctggactctggcaatagagaactacaaatgaaaccccttgtttctctttccgtccaacaatctgctgtagacgctcttcgcacccgtagccctgtccaccttttgtagcattaacgttaaagtcagtgcactgcaggcagataaggatgcgagatagaactatattgtacgta

SEQ ID NO: 513240 - DNA, 703 bp, Homo sapiens
  misc_feature (304)..(304): n is a, c, g, or t
cagctccctcagccacgacaccccaatacagggatttaaaatctgccttcataatttacttgtggccgggcgtggtggctcacgcctgtagtcctagcactttgggaggccgaggcaggtggatcacctgaggtcaggagttcaagaccagcctggccaacatggcaaaatcccatctttactaaaaaaaaaaaaaaagagcgggtcataggggggggtgcctgtaatcccagctacttgggaggctgaggcagaagaagtcgtgtgaatccagggacggcaagtaggttgcagtgagaggccnaaagattcatgccaactgggatctgccagccggggagaacacgagtggaagacgtcatgtctcaaaattagttgaactacactaactagactaaacacttgtatttctacttgggtgggtggtggacctttctggtgaaatgtcctaaaaggctcccttaaaagcttgcatttgcctcgtttgaataagggattaaagagcccctgactctgtataactgatggttatcagacttaactttaaaccatggggagctcttagaatataggtggggtctggccacaatcagattttatcgaatgaataaccgggtaataaacttgttcatagccgttatgcacaattcttctttatgaatggcgttcagcgttttcgtgccgtggcttatgggagtcctcc

SEQ ID NO: 513241 - DNA, 110 bp, Homo sapiens
ggtgatatgcaggtggcagatcagttaggatattgcatcagtctaggcaagagatgagtagggcttgactaagtgcagtgaccatcggagtggtgcaatgagatatgaga

SEQ ID NO: 513242 - DNA, 699 bp, Homo sapiens
cgggggtcaatattggccaggctctcacacccccacaaattttttttttttccgctcgaccaccccacggtcccccggggcggctgagacgaagtcacatggcccaaccaaaaagaatattttttgacgccacgcctgagtccctgcaggaaaacaaaatcccgagtaaaaagccatctgacacgaaccgcacgaaactacggccaccaaaacgcccgcgacgccagaacttacagactataacccagaaccggcaacaccccctacatacgagaaggccgatcttacaaacacacacacgaaacgccccgacacatgagcctcacactaacctccttcctttaacacacggcgcggccggtgaactcctaccccagttctgagtcctgctcacactccgccaagcaccctcgcgataccagtgcaccgcgaaccccctccaaaatagagacgacaccgcccgcatctccaccgcccaaatcgaacacacagccttcccatctgcccacgaacgaaacaacccgaccagcccgcaagcgctgcggcggccgccctcggcccagtccaaccctcgacccgcgccaactgcatgctgcgcgcacggaaattcccgctacccccgcgcacaacccgcctacgcgcgacgcagctatcacaaccacatcgggcggcgcgacctccaaccctcaggcgagtgtg

SEQ ID NO: 513243 - DNA, 1407 bp, Homo sapiens
tcccaggaccacagtcccccaaccagccaacgcctgaggaacgggggaagttttaattaaatccacagaaagtaaaaacccaaattgcgggaggagaaccgtggggagatgtggggccacccacgggacggtggagacgtctcacggccacccagggggacgtgtgggagagtgggggtgacacgagaccaagaaaaccaagagccaggcgtggggtgtggccaaggggggctctccgagcctctcgagggggccaactccaccgaggggcccaccgagaaagagttctcgctgtgggaaacctcgaggtccagacacaccgagaggcgagagcctccaatgcgggacggagggatctcccacaccagacacacacagagagagagagaaactctgtggggtgttcaccgcgaaaagagcgccatgcgatacacaagtgcgcgcgcgtattctccgacaaagaaaagcgcgcgcgtgcacgaagagcgcggcgggaagtagatgtgcgcactgtggcgcacgagtgtcgtgtgcctctgtgtgtgtcctctcacgagatgtacacactgtgtgtgtgtgaaaaatttgtgcgtctgtgaaacaccaatgtggcgggcgcgcccacacaaatctccgtggtgggagccacaacactcgcgcgatgaggggagaagagaagagccgcgaggaaataagagagaggaagacggagaggacaaaacacaacaaatacttccactcgccgtgggaagaggagcagcggtggagcccccagcggaggaaccatcgaagggggtcccttcaaagaaatactcccacgaggggggtggtggcccccaacgccgggggacccgtagggatctcccccgaggagggagaccagcaccaaacagcgggcgtggcgaaaagtcgcgcggagcacataagacccccgaagacgcgaagagtaagtagcaccaagagatgaggaggacacgaagaaaacaaggggaggtcatcaagccggggtagaacacacaacgaacaacaccatgaggagggaggacaccaaacaccaaagagacacaaacgacacaggaccactccccacaaacaactatttattcctcccgcaggcaagcgatgggagaataacttgtggacgacccatgtgtgtgatgctgtgagaaaagaaaaccacctgtatagtggatgaccacccacaacagccaacaaagggcacaccgcaccaaggattgtgattaatacattttggtgtcatcctgtgtatggtagccaccacccacaaaaacatctcccaaccaagaagtgagggaacctagatgagaaaatagggatgagaagcattttggagtatccccacactaacttctcgccttcatctcctcaccctaactacccaccatt

SEQ ID NO: 513244 - DNA, 241 bp, Homo sapiens
agatctgaagatacggtgagactgatgagggagtgataactgcattcactaaaggatccgatcgtcactcagactggccgtcatatatcaagtcaacagccactattggactgtaaccctgaaatagctggcccatcagctccaagaaagcacatcattcacagtcgaaactactggcaaacacaacagctactgaacacgaattcttctttcgcctatgctggatgtatacatcaacact

SEQ ID NO: 513245 - DNA, 151 bp, Homo sapiens
taaagatttaaaacacacttttatatttttcaatgtgtgctactattttaatagagcagtagaagtgcttaccatgacaaagttggtgtttttaaacaaattctgtcattacagacaactgtgatggttactgatgattacactcttttgg

SEQ ID NO: 513246 - DNA, 1062 bp, Homo sapiens
taaccaaaaacgcgggggattatttgggggttggggtgaaaaaaaatttggggggggggggaaggccgacgaaagggggtacgaggaagcgtggtggacaaaagccccgagcgttcccgggggaagagagggtgacagcagcggggggccacgcagcccacggtgggcccccgagggtgacactgtgaagaggcgggagggctccgagggcgaaacgggggatatcaccaaatattaacgaggccaggcaggggaagtgtcccccacgccgcccgtgtgcaggggggcggggggcggagcactttggggagagggcggggggccaaacacgggatactcgaggcgagacgccggtgtgtgtcaaaaactgtggggccacaaggggttcctgcgccaaggagaattactcgagaagagcgggccaatagaccccggaggctccagatgtagcggcccagagcggccacaaggggcaatgtggcccaacataggggacaactacaggggtggggggggggccacgccctctttcggggagggcgccccgggggcagcaagcctctaccgggggaaagatgggggggctcaccatgcgcgaggggaccacgcggcaaattgcttgcgccactggaggctcatggggacccggacgccagggtggttcccaacgcgcctttggctatagaaaactggcggggacaaagaatacccctttattctaagggagaattggggggagaacgctcagtaggggatgccgcccaaccacaagggtgttatatccaacgagaacctgggagcaaaccaggcgtgtggcggcccctcagagaacacctggaagacccactacaggaggagtggacggaacttggggaacaccccgcgtccgcggggagggatgaggtgcccaagccacgaagagaggcgctatgtgggacacctgcacactatagacccccgaacatcacccagggggcgcgggagcccccacacagcggggatgggggagcaccagaaacagagaggacaggaggatactccactacaagaaggttcccgaaa

SEQ ID NO: 513247 - DNA, 747 bp, Homo sapiens
  misc_feature (51)..(51): n is a, c, g, or t
  misc_feature (188)..(188): n is a, c, g, or t
  misc_feature (194)..(194): n is a, c, g, or t
  misc_feature (230)..(230): n is a, c, g, or t
  misc_feature (294)..(294): n is a, c, g, or t
  misc_feature (306)..(306): n is a, c, g, or t
  misc_feature (350)..(350): n is a, c, g, or t
  misc_feature (365)..(365): n is a, c, g, or t
  misc_feature (391)..(391): n is a, c, g, or t
  misc_feature (421)..(421): n is a, c, g, or t
  misc_feature (426)..(426): n is a, c, g, or t
  misc_feature (436)..(436): n is a, c, g, or t
  misc_feature (441)..(441): n is a, c, g, or t
  misc_feature (462)..(462): n is a, c, g, or t
  misc_feature (466)..(466): n is a, c, g, or t
  misc_feature (468)..(468): n is a, c, g, or t
  misc_feature (540)..(540): n is a, c, g, or t
  misc_feature (588)..(588): n is a, c, g, or t
  misc_feature (732)..(732): n is a, c, g, or t
gtggcggggggcggggggcgtgaggaggaggaggggggggggggtgtgggngtgtgcgagggtgctttgagatctgaagaaatcatttcctcctttcttgcgatctgcataagagcacctgtggaagtgtgcgatgctcaactgatactcacacatacagatttgctcataggttgaacagtgaagtntaagtnaaacccattgcacagactgtccctttcatcacaganacaaagaaggtgagagtgagatgctatcaaggaactagccaattttggaccaagcgtacatgcncccttccttctnactccatggaagagactgccccatgggcctttactggacctgtngccacggggagattnaggaggccatccaaggagtgactaancattggccctcttccatggctacaggaatnttgtncctgcgggtnctatncagatttcagcgctagatgtnactnanaaaacctgaaactctgaggaaaggaatctaaggcttatagtgcttgagttctgatggggaacaactgcagcnaacagcaccagggaagctggaggatgctcagtaggtgaatcgcatctnttgtgagtcgcccagtttgttcaagttgggatggcagggcagccgcaccattgggggtggcccacaaagcagttccagcacatcatcccctggagcgggcaggtgttcccggatcatgttggcagttacaaagccctttctgtnggcccaatctttttg

SEQ ID NO: 513248 - DNA, 258 bp, Homo sapiens
gtccaggagaagtagagatttatagcctaggatatggatgtggctcaccgtatggaataattactaacgaagaaacatcaaggtgtaacagtgttctggcctaaaccaacttgtatagcgattattgctgaatggcaggccaaggctggtaaaaccacggaaggcagggcattaaatgaatttgactagcatatcaacaggtagtcatgatactcaagggtggggacggaggaatttgatcatgattttcgcacgtgt

SEQ ID NO: 513249 - DNA, 627 bp, Homo sapiens
gttaaaaattaaaacacaaacccacccgtttgccttggcctcccccggatcaggctctttaattttgggggttcaaccttaaaattttgtaccactagaagggcgtcggggagaataacatgcatggggctgttatttcctatgataacaaaatttttttttggaattccccctgaaggacctggctgagggtgtttaaaaggtaactttttttggttttagaagtagaaagaggggcccctaaaaaaatgatttattttttttttatcaaggtttagtgccctctataattggtggggctttacccttataggcccgggagcacaaatttgtgttccaccgctttcccaccaaaatgtgggcaacccattggctttccctggtttgaagggccctccctcgggaaaaggaattttcaccctccttaaaatttaaaggaattgcgggtttaatggttacacttggtaaccaccccaaaaagttttttaatggccttggaaattattttatttttttgggaaaaaaataaaaataaatgggcctttgaaagggataaaagggaaattttaaattaggggaaatggcttcggaaaaaaaaataaagggggggcctttttttaaactttt

SEQ ID NO: 513250 - DNA, 360 bp, Homo sapiens
  misc_feature (123)..(123): n is a, c, g, or t
  misc_feature (153)..(153): n is a, c, g, or t
  misc_feature (356)..(356): n is a, c, g, or t
tttgccagcttcctgagttttgcctaaagatggccccccagcattggttggggacaaagggcaaaattggtgccccccagtcatgcctaggacctggggcccaaaaaccgggcaacctttggntacaggggccattgggtgccctcccagttnaaaggggccgctgttttgccttgtccgtcagtgccagtgcctgtgccaaaggtggggaggtgagtcctccaaagctttttggccgggccctcctcctgcctgttttgggtcctttggttcccacgctaggtgtcccttttttgattttgggggatcctccctcccctaattaaagtttttttttgcccctttgggggtgcatnagga

SEQ ID NO: 513251 - DNA, 599 bp, Homo sapiens
  misc_feature (565)..(565): n is a, c, g, or t
tctaccaggatctccacactgggttcgagtacaaggttgaggagcagtctgtggacatcagctcttaatatttttcacgtttggagcagtggtttctaggtactgagtgaagtggaaccagaatctctaggggcatgtggtaaagataatcccataatatgtactgggtagagttaaagagaagaggggagagcatgaagataaaccagtacaatcagtcgttcacataccactaactacaatgatactcccatttgcttcctgtgaagtagttactaataatcactgatgtcgctttttaatttcatacatcctttaactgtcttcatataggtattgaaagagtcaacataaaagccacatccattttctaattttgaacaatagttagagaaacctaatatcttctcatattttggtcttgcttctgtctcatgagttcccaaaatagatatattatctgaatgaagagttcatgggcaaatgtcacacttttcttgggtagggtaattatatatctgcgattgcttagaataagattaattttcctattctgcgaataaancacgtgatggcgaaaatgcgtattctgagaaaag

SEQ ID NO: 513252 - DNA, 459 bp, Homo sapiens
atgaccaggaaacagctatcatcagtgacccagagagtcattagggcaacaggccgtgaagaagagcgggtccatcatgagggccttggaaggggaatcaaatccccaaaataggatcctttttctaaaaccaatcttaaaatcgccggctttgaaacataagtggctgtgaccggccagaggaaaaggtcctcaggggccaggggttcttcaggctaccttggtaacgtccatggctggcttctctgccctcaggagcagctgccgaggacagtcttcatgaagctcaagcatatgacaagggggcaagaacaaaaaaaaaaaacagcttattaggtataggtctttcatgataaatggctggtaatatagtttgtgaaactaagcacctatgggataggcataatcactattgcttatttagatttggtaaaatcaggggagctatgaaagtccccg

SEQ ID NO: 513253 - DNA, 1031 bp, Homo sapiens
  misc_feature (1031)..(1031): n is a, c, g, or t
gtggagacgctggattctacttttcaatggatataatgcatgacatgcggtgcagtcattgaatgttcggtcgaagtcatctgtcgcccgtgatagcacaagtacatcatggactctggttcgctggtgatactcggcgttctaagaggttcatggaccgtatgaacatggtattgtgaggtgtcgcgccaactatgtgtctagacgactttcccatccatatcagtatcactcagctatcttatcctcggagaggatacgtgacagctatgtttgcatcaagtcaccacatcatcgatcactaactacatcgacgagctgtcttgtcacggtccggccattgaaatgagagtaggctggtctatccatctgactcagcccaaggtcatgctcgcaaaaccctcaggagagcacgatattctccgttcacgtcctcgcaaaatggataattcagtggaggcataaattcatatgataacttgacgcaagaacatgaatcttcgtggtcagggcgggagagaccaccgtttatttcatcgttgatgtgctccgcctgtgtgggcctattattcgaggggagtactgttactgcttgaggggggtctaaagatgtcctttaatagaaaggtgggtggttattggtgaaacccttgggtcgaaatggagaggcatttaattttggggtggggtactaggactttccaattcaacggaatattgggatagggggtgagaattgtcggtgggatttgcggcgtattttgtgcaaatttgagataccggtgcctgagttaacgccggacgggggtgcaacccgagacggggtgccgagcccaagaaccgtgcgggaacagagaatcagcgacacacctagccgcgcgccgagagttaaaaaccgtcaaaagccctgcggtcaggcgacggatccgacctcttgtgcgacaaacaaaccggggcgcagcagaggggcgaacgcagataggtccctcgcgagcgacccccgagcgtgcaacgccatagcggagaggcan

SEQ ID NO: 513254 - DNA, 602 bp, Homo sapiens
gtggtgcacccgacgtgatcgccttgaagttatgcgtgaaaggaggagagctcatcaattttcagaaaatcccggtaagggacagtcctgactaccatcaggtggacaggacccacgcgaaaaataccaggggttcggttatcatgggtcaggaaatgaacaaagaataattttttttttttttggaaatggagtctcactctgtcgcccaggctggagttgcagtagcgtgatcccggttcacgggaacctccacctcccgtggttcaagctattctccgtgcctcaacctccgtgaatagcgtgggattacggggtgcacgtcaccccacaagagggacttaattaagccttgccttcagggttgtacaataatagagaaaagttacaattactggcctcgtgcgtgtgagacaaaacccagtggcacctccagacacacgagaacttcaaaaggcgctaagccggcacatgcgtaaaccgcaggggtcaagcattcctacgggaccttcctgtcatcaggatctggcttcaaggtgccagaaatttgggccatgggccaagaaatgcccacaggcggggattcctcctaagccgtgtcc

SEQ ID NO: 513255 - DNA, 378 bp, Homo sapiens
  misc_feature (151)..(151): n is a, c, g, or t
  misc_feature (159)..(159): n is a, c, g, or t
  misc_feature (217)..(217): n is a, c, g, or t
caactggtgaatgagcgacagcccaaggcccgggttgtggtgctgggcctgcttccgcgagggccaacatcccaacccacttcgggagaagaaccgacaggtgaacgagctggtacgggcggcactggctggcaccctcgggcccacttcntagatgcngacctgggctttgtgcactcagatggcaccatcagccatcatgacatgtatgattacntgcatctgagccgctggggctacacacctgtttgccggggctctgcactccctggtttttgcgtcggtgggccaaaaacaggggcaaaggggtcccctggtgggagccggccccttagcatcctggtgcctttccccaacatttaaatattcctttctcag

SEQ ID NO: 513256 - DNA, 807 bp, Homo sapiens
  misc_feature (294)..(294): n is a, c, g, or t
gtagacatggaatatctgtgcgtcacctagatattgtaccgcaagtggaagagatgtaactacattatacaccaatcataatatagcaaggactaacccctataccttctgcctaatgaattatctagaaataatttggccaggagaggctaagagcctaagacccaccgtaagaccatgcaacgcagactacgcgtagaggaagcaagctaacataggagcatcaacccggtcatatgtgatggcaaacaatcagtggtggacagatttataggtaagaggcgagaaacctanacggagtcctggggtagatagaactggataagttctcgtgatgagcatagtgcttaagtatcagactatgtgataacttatgcccatcgagtacagcgcatctaaatcctcctttgtaaaaattctagagcatggtgtagttgccagaaaaggagtgacagcgaggcctcctttgagagcatctgaggaaaaaactcttggtactagcagagtcagaaagatttaaacacccatagtcagggctacagaagcaggccagccaacgtagagataaagctgtcacaaaagctacaatacccatcgtacctaaaagaatcgcaaatatataactgaaactccttcaaaccaattggaccaggtctatcaccctatagaatgaactaatgtggagtataagtaacatgaaaacattctcctccgcataagcctgcgtcagattaaagacactgaactgacaattaacagccccaatatctacaaaaagatcacagaatgggaaaaccggctcagcgt

SEQ ID NO: 513257 - DNA, 307 bp, Homo sapiens
  misc_feature (108)..(108): n is a, c, g, or t
  misc_feature (155)..(155): n is a, c, g, or t
  misc_feature (204)..(204): n is a, c, g, or t
  misc_feature (207)..(207): n is a, c, g, or t
  misc_feature (215)..(215): n is a, c, g, or t
atgaactctgaaaacatgcttggtgagagaagccagacacaaaaggccacatactgtatgatttcacttatatgaaatgtccccaataggcaaacccatagaaacggnaagtacattagtagctgtttaggtctgggggagaggggaaatggggnacatggaatctccttctggggtaacggagatgctctgaaaccgattgtngcnacagttgnacgattctgtgaataacttaaaaccactgaattgtacactttaaatgggtgaattgaatggtacgtaaattatgtcaataaaacttattttt

SEQ ID NO: 513258 - DNA, 1719 bp, Homo sapiens
  misc_feature (938)..(938): n is a, c, g, or t
  misc_feature (1436)..(1436): n is a, c, g, or t
tcatcgatattcttcgttcttgtttgtttgtcgtatgtctttcttctctccgacacggtgtgttctatttaaaagtgctgtcctcttccaacaatttttgtcttctcttgaaggggtgacgttctctgctgggtgttctcctaaatctactatgggttgcctctacactgactactcgttgtgttagattctctttgtcactacctgattagtgttttttttttgggggcacccatttattgttggttagcatgggatatgtgaagatgtgttggatttctatgtccacccggtgtttcttctgcccccatattgtctcacctcccaaatgggtgtgggtgatacccttgtgtcgttataagaaatagttgtttcgtccccccgttgctacaaggagagctcacaaattgtcttcgttgccgttcggagtgttgtgatgaaaaaacccccggtgtattttgttgtcccctcacgcgcgcacatgaggtaaagtagattgccttccctcttgatagatgatgatgtggtggagttttgttcccatcacaacgctcgtgttgtggggtaataagtccacacttggtcgttaccccaccgccgactttctcttgatttgatgagaaagtgcgatccaccccagggtttgtaggtgtttcccccacggattctcccctggttaggtgaattttttctcgtggtgacgccctcctccctgtgtcttgtgggaaaaaagagggagaagggtttcctaaagtactggtaaagcgggtttaatttcctccaccacccacattgttgcgccaaggagtagaaaaatttggtgttagaaccatttatgaagaccgtgtgtaaatgtttcctcataggatgagtctctaaaataatggacatatcttctttgtggactgtatcccccacacctctctcgttgacttttntatatatttctcaagagagctctttctgaaagagggaaatgatatctcttaaatatattataatggttataatgactactcttggtataaataatggtgagacaactcccactcccccctcgtaagattggagcatctttattagagtcccccccacatatatattgtgttgatatatttccccacagatgatatatatagtctctcacaaatactgtatggttattctctcacacagtgtgtaaaagacaaataattttggtgagactctttaatggggtgacacacacagagtactcccactactatatttgatgagagagacactcttttgataagccgcccacacacacagcgagtataaagtgtgttattgttggagacacacattctgtgcgtctctcaagagtctctctctttgtgggagcaccccactctcagggtgacgacaacgacacaatgtttgtctcagagtctccagaggaatatctcccaggngaactttctctcataggatacaccgcgctctcacacaccacagactgtgtgtacaccacaaacttcacaaactctcacttgtaaagatccaagataggagaatcttgccagaagcaccattatctgtgaaaagagagcaccagtaacccaggaaatcttcccagggcacacagaactgggcgcaacatctccagatcttgaacatttctcacagacatttgtccagggatctttcaaaatagaacccccccggaggagcagctccgcccaccagataacttta

SEQ ID NO: 513259 - DNA, 132 bp, Homo sapiens
ggccggggaatggtaaattttaatgggggaagattttttattttttatacttagcctttaaaaaaaacccgccttccttgctttggttttttatgccaaggcttttttgtttattaaaaaaaggcccgaaga

SEQ ID NO: 513260 - DNA, 151 bp, Homo sapiens
acccaggctggagtgtagtggcgcaatctcagctggctggagcctttgacctccttgggctcaagctatcctcccacctcaagcctctcaagtagctgggactacaggcagcaaacgacctgcatctcgagtatgccatgggaagcacgta

SEQ ID NO: 513261 - DNA, 1189 bp, Homo sapiens
aagatgttaataggttttattggtacagactataatacaaaaactatagtgacagtaagatagtgatggtgtaatcgacctaagcatgtggtagggttcgtattgttgatggtatgtggctgcttttatgggagtgcgactttgtgtatgatgatggttgtctgtctgttggagtttttttcgtttcatgaagtggtgtcgtctaccaagaaataggggtggggtccctctcttagtagttgttgtctcccccgcgttggtttaacgcaggtgtttcccgcatagatgtagtatgatagcacggggttggtgaagcagtctcgcgctttttttctctgtgggcgcccatataaaaagttgttttgttggggacacccccgcgcttttcgcagttgttctccccgcgagtggcccgtagagttgtttgctggtgacgcgtaccgggtcgggtgtttctgtttgttttcgcgcgcctggttttcggcgcgtcgtttttctgccgcccgggtgggtttattggtctctctccgttgctctcgtggcgattttcttttgttgggccccccccgggttatgattaagaggggtgttctcggggaaacacccagttgttctctccccaataccagctgatgacacagaccgcgcaccatatttgtgggcccacgcggttcgcgcgcactcaatctggaagcgccccgatttgtgtggatatctcgccacgcgtggagaacttttttcttctgagagtctcccttccacacacgcaaagcatttcacccccgactcccgctcctgctagaagaataaagaaagtgacttctcccgggtgggtatacacgcggggtgggttccgccccaagatagtttcccccagtgtctccccgcccgtgggggctaaaaccctgtatacaaggtttctcccttgtcaaaatctaccctgtgtaaaggcgtctcccacctaggcgcaccgccgtttatcttctgtaaaactattaagtccaacctctttgggcgcgatttttgagaaagactcctgaacttgttcgtaaggtgacaaagggacccttgttcaacaaagaggtttggcgcttttgtgcctcgcggcggtaataagaatattaatgtcttcgccgcactattgcgcccgtttggcggtgagagacaatctacaacaatagtcagacaa

SEQ ID NO: 513262 - DNA, 183 bp, Homo sapiens
gtctcgcgtatcctttgccggcgtacgcctgatcttgttgcaaattcctcccccaagccctccccttgaacggggagggcttggtatgcggccacggattcgcgcggatcacgcggatcgcgatgcctctctcgcgacctgcgggcgaggggtcggggtgagggcaagcgccgcgcgcgtacg

SEQ ID NO: 513263 - DNA, 103 bp, Homo sapiens
  misc_feature (59)..(59): n is a, c, g, or t
taattttaatgaagtcaacgtgaagaatataatctggttgtaataccaatgcaatgtgntctaaaattatttttctattgagttaaatattcatctgtagatc

SEQ ID NO: 513264 - DNA, 141 bp, Homo sapiens
cgtatcattattgtgtataatcttcatatgcaataatcaataatcataacacaggatttctagttctcaaacgggcatggaatcattacaaaagtgttgttagttccctgcaagattgcttgggccctgaagatagcctgg

SEQ ID NO: 513265 - DNA, 459 bp, Homo sapiens
  misc_feature (89)..(89): n is a, c, g, or t
  misc_feature (188)..(188): n is a, c, g, or t
  misc_feature (196)..(196): n is a, c, g, or t
  misc_feature (218)..(218): n is a, c, g, or t
  misc_feature (288)..(288): n is a, c, g, or t
  misc_feature (296)..(296): n is a, c, g, or t
  misc_feature (298)..(298): n is a, c, g, or t
  misc_feature (305)..(305): n is a, c, g, or t
  misc_feature (326)..(326): n is a, c, g, or t
  misc_feature (374)..(374): n is a, c, g, or t
  misc_feature (393)..(393): n is a, c, g, or t
  misc_feature (412)..(412): n is a, c, g, or t
  misc_feature (431)..(431): n is a, c, g, or t
gctccagacccgcacgccgcggcacagagctctcagcgccgctcccagccacagctcccgcgcctcgtcaggtcaacatggcaaaaatntcagcctacagagactgagcggtgcatcgagtcctgattgctgtcttcagaagtatgctggaaaggatggttataactacactctctcaagacagagtnctaagctncatgaatcagaactagctgctncacaaagaacagaaggacctggtgtcttgaccgcatgatgaagaaactggacaccaacagtgatggtcanctagattngnagaattncttaatctgattggtggctanctatggcttgcatgactccttctcaaggctgtccttcccagaagcggnctgaggacccttggcctgncttcaaaccacccctttcnttcagctttctgtcatcanctcacagccaccatccctgagaactaac

SEQ ID NO: 513266 - DNA, 336 bp, Homo sapiens
ccagtctagtgatacttgcctcgtgctattatcacttggagtgggcagtgcatggccccatctcatttttatgtatttgccctgcatagtctataaggctcagaaattgtgggttaaaccagcttatgcatcacacctctttgcctaatgcaagttctcctctgattcaatattgcatacatctattgacatgttgcgaccatgccccctgtttctggattggccatcggtataacttcaagggtgaattctctttttccactgctcattctgcttctttggtgatcacaggtgtgttataacacctgtcaccgtctatcggtcatttctatttga

SEQ ID NO: 513267 - DNA, 359 bp, Homo sapiens
ataaggatcccttaggctcagaggccctggacgtcgggggacagtcctcgctttcatcaccttccttgagggtcaccgcagccagccctgtggccttctgcccctttcactccaagatctctgggctgaccttcatcagccccttccacccgcctcaggaggtagggacaaggctgggggcggcctttgcagaccctgagaatgaatattgtcctgcatacacagcccagtggccacgagaggccgacgaagatactgaaggtcacagagggccagaggcggggccagggcttgagccaccctctctccaggcccgtctataccattgggctgcccccttcagacctccgggcaggaaa

SEQ ID NO: 513268 - DNA, 849 bp, Homo sapiens
tcctaataccaccacctaacagagaacacaggtgaatgcagatgttcactttagcagacttaatgtttcctatgagatttcactgtacaaaacgtggttggattcaaggatatatttgtctactggccctcatgttgtatgtacttgaggagtaaaatgagtaaaatgatactgaatgaaatgttctgtggaaatattaaaaaaaaaaaaaacttaagccatccattcatccagaagaaaaatgggaatacacggatctactacggatgtcttctttcagcttggatctaaagatgttttttattaaaactataatttaaattgtcccattgaaaaattttgcggtaaaaattagtggttttctaagctagagtaggattggtcttacaattatgggggctaggtagtttggttttaaaaattccaatggggtggcggctttcttgacattttatttcaattctataagagggatagatgacatggttctagaaacacatatacatcattaagagtgaatctctaaaaccaggatataaattatgcttaattctctggaaaatcaaccaaatggaggtgttcacacctccccttctttaagcattatctaaattactttttactgctttagtcttaggaaaaaaaaacgaacctttagcggaaagggagaacaggtgctttaagggtttaccataatgatccgagggaaggagggtatttggaaaaaaagctgttatatggggagaaaagggtcatctgggaaccgagagtatgaaaaactcttttttccacaattggggtatcttagaggaaatagaaggaggagcaacatgtgggagggctaatgga

SEQ ID NO: 513269 - DNA, 683 bp, Homo sapiens
ccaggacgttacgtgaacacacatccatgaaacatcatcccgcgaggttgatgggtctgcaggaacaaatgcggcaggcagtgcagaatggggacatggagaccgtcccagggcatctgtcgcatcgctgtgggccagggcgagaaacaatcccgggacctagctggaccaagtagagcacatgtcagagttcctggacactcgtcaacatgattatgtatctgcacagggcgattccctgagtcactattcctgtcaaggagaccaccgagctccctaacccgtcaccttctggtacacactgcaggatgatattctatcctttgaggcagagaagcagggtgtataccagcaggtgtaccggccagtctacttccagctggtggatgtgctcctgcacaaggcccagttcccttctgatgaggaatatggattctggtcctcagacgagaaggagcagttccgaatttacagggtggacatctcagacacgctcatgtatgtctatgagatgttgggggccgagctgctcagcaacctctatggacaagctgggtcgtttgctcaccagctcagaggagccctactcctggcagcacacagaggccctcctctacggcttccaatccatcgcagagaccattgacgtcaactattctgatgtggtgctgggctcattggct

SEQ ID NO: 513270 - DNA, 120 bp, Homo sapiens
gttgggtgagcttttttgtgtccctgtggtggacgtggttggtgattggcaggatcctggtatcgcttaacaggtcaaatgcaagacttcgtcaaaaccgttaccggcaaggccataacc

SEQ ID NO: 513271 - DNA, 186 bp, Homo sapiens
ccccccctttttaaccccggggcttttgggggcttttccgggggttttaattttaccctttttttttttaactgtaaaagggaaattattttaccccccctcccaaattttaaagttggggaaggtttttaacataagggcctggcccaaagggggcccttttaataaaccaccccccccccttta

SEQ ID NO: 513272 - DNA, 417 bp, Homo sapiens
  misc_feature (330)..(330): n is a, c, g, or t
  misc_feature (396)..(396): n is a, c, g, or t
atttctgattccagaatctttgtatgtctctcctcaccctgtcctgcccctttggagctttgggagtttttctttactgttgtcttctgaaattttatttgttctttattccttcctgcatccctcaactaattctatatgagattattttccctttgcctgaagaactgcttgtaatatgtcctttagtgtggactctgctggtgacaaattcttttaatttttatctaaaaatgttttccaacttgcctttaacttaaaattctggatttggcaggttattttcttttcgccctttgagaaatattttctgggcttacattctttccntttttttttatttttattttttgatggaatctcgcttggttaccccagttggagtgcaagttgggnccgaattccaaccaaaacctt

SEQ ID NO: 513273 - DNA, 488 bp, Homo sapiens
  misc_feature (133)..(133): n is a, c, g, or t
gcatttattatatatcacatggtaaaagaatccctctaaataatacttctctcttggattatatgaatctttgtcatttaaatctcagcataagtaaaaaaaaaaaaatccaatgaagagattgcttcattcncaaataagtatcaaattttagtgcttaaaaattaacaaggtgggctgggcgtggtggctcacgcctgcggtcccagcactttggaaggccgaggtgggtggacccacgagatcaggagattgagaccatcctggctagcgcggtgaaacccgtctctactaaaaatacaaaattagctgggagtggtgccacatgtctgtgatcccagccactcgggaggctgaggcaggagagtcgctcgaacctgggaagcagaggttgcggtgagctgatattgccccattgcactccagcctgggcaacaagggagaaactgtctctaaataaataaataaataaataaataaataaataa

SEQ ID NO: 513274 - DNA, 1553 bp, Homo sapiens
  misc_feature (465)..(465): n is a, c, g, or t
tgtctaaaaagctatgtatcgcgtcctatggaagggaccagatccttagagaagtttggtgggtgataaaaagggaagtgggggacagattccgaagcccaggagtcgctgggcgatggtttcactccttgggttctctcaagccagcgggtttaacgcctggcgggcgccagcctacacggaggggccgggtggacacttcccgggggaatggtaactgggagacagatgggcacgccagtggaaagcaagaaagccaccagggggagtgggccattcgcggggttgggagaacagggagagcggtagtaccaggcggaggcgcactaaggaggtataaggtcatgtggaggggggccaaagtagaatgagaatggtataagagattatttcaattataccctggagtaactttacaacatctcgagagatacatgagcaggtgcgacatcttggtgcactctntattacctagggatgagatgaggtacacgagtccatcagggcgaacagaggcgagaccacgattctcacataaacagcgtaaaatgcgactcagaaccatctctatatcctgtatacttctcacccgggggggggataaaatcacgcactaaaacgaacacatctagacaaggcacgacaacagtagaaaatcgaggggacaaaagtgctaaacaatacgccaaaaaggacggcaaaatatttaataccccgggggagtaccctcaaggaaccccgggaaaccaccccaagagtgggcggaggaaccccacatatacccccaaggcgccccacatacaaaatcaccccacacgcgtattacccctgtatttacacactaaaccaggggggcccaccagggggggagacaacccgagggatggcactacacaacaaaaagcatgcaggtgtggtagagacaatacaccacaacaagcgccaccccggggggggaataccgcaggtaggaaacaatgagaagagcaagaccccaacacagacagagaaaaacggtgccagcaatgaatgagcaaacaagcgaggaaaacgcgaagaagagagaagtgaattagcacaagggcggacccccatcactagacaattgaataccaccagagaaggagcacgtcatacgagtggcaccacaacaacagagcgcggtgcgccacgggtgagcaaacaataagtgtgaacgggcagaaaaacctaaaaacacagaaggaggaagtaaaaaacaaccatgcacgggcaagaccagacttatactacacaccactaggcaggtgcgtgagaaaaggacaacacgcacaaccacccacgctggggggggagaaacatcaaaccacaacgaacagaaatgactgtgaggaacgccaacaatcttcacggcgcgcacggacgaccaagaaacaaggatggtgctatagccacatacgacaaaagagaactgagggcgagaggcgtctcgcccaactcaccagttagtattagcacaaacgacacgaactaactaaacacaacaaccagcaggacatagttgcgacgcacgc

SEQ ID NO: 513275 - DNA, 656 bp, Homo sapiens
aggatcagatttatagggcactattacaccaagaaatattcatattatgggtgttccagaggcagaagacatgggaaaaggtgagaaaaacacatttaataaaagaatagcagaaaacttcgcaagttttgagagaaaggtggacatccaggtctaggaagctcaaagaattccaaatagattcaacccaaacaggtcctctccaaggtacataacagtccaattgtcaacagtcaaagacaaagaattctaaaatcagcaagtgaaaagtgtcaagtcaaacttaagggaatccccattagactaagagcagatttctctacacaaacattacaggccacgagagaatggggcaagatattgaaagtactgggaaaaaacccctgtcaactaggaatattatactcagcaaagctatctccttcagaaatacaaggagaaataaagtcccagacaagcaaaacataagggaattcactatcactaacctgattttatacagaaatgctcacagggagccttgcatctgaaagtgacaacagataataatgtgaacccaaaatatctgagacaggtcgcagtccatttagaaagtctatttgccaaggttcaggatgcgcccatgacacagcctcaggtggtcctgaggcttggaa

SEQ ID NO: 513276 - DNA, 332 bp, Homo sapiens
ggcacgagatctccgaggaattctacggtgtaaaaagggttgatctcagttttttctgttgccactttaagattcagttttctgagatacattgagtcatttattacttcaccaatttcttttcggcttctaagttttgtgcagtctcctttcctagttccattgtctgtgggtttatgaattaaaaaaaaaaaactactttctgtgggattttaggagggagggaaaatacgtgcatgtattcagacttcttacctgaagtttgttgatgggcttctggattttaaaggataagtcaattctgggtgttatagggtctaggttttcattcc

SEQ ID NO: 513277 - DNA, 950 bp, Homo sapiens
aagcagctgtaacgctcgaattcgggataaaagagcacttcctctgggcagaggcaagcagagcctgtgcccatcactctctgcctgcttgagtcttggaatggacctccctgcctggaagctgcattgcccttggtctgggctgcctgcccctggggaacacaggcagtagcacattggcagtgaggccgtggcaggtcggcagcagagtgatgccccagtgcctttagcgtgcagattggcagctgggcctgggtggtgctgctggcaccatgtgacccagtgctcaccctgggttccccacgtgtatcggatcttcttcactgaactgcaatgggagttccaggccagcaacagcgagaactcttggttcccctccatcctcacggctgtgcttccagatggcagggcccctgtgcagcatcctgtgggacgcttcgggtgccgagtgaccgtgatgctggggggcgtctggcagcctgggcattgtgacagtccttcttacccacaacctcagcagatctacttcacagcaggatttcatcacatgcttggggcatgtgcttcagttccagtcaggcgtcagcgggtgctgggcttctaactttgtcccgcgggcgggtgtgtccaaggcgctgcctcgatgggcgtctccctgggaattcagcctctggccgtgttcctccgatagcttctgggataaacctcggcgtgaagggtacctccctggtcctacggcgggatctactcactgctggatctgcgggccatacaaatggcctgtggcaccaatttgcccgtacaaccacacaattggaccccggaccattcgaatacactgcattggtgctggctgatgagtgcggacatccagggcaactggactctagatctggggcaaacaccgtactgcgtgtcgatctcggagtcatcagcccgtagggaccact

SEQ ID NO: 513278 - DNA, 287 bp, Homo sapiens
  misc_feature (106)..(106): n is a, c, g, or t
  misc_feature (241)..(241): n is a, c, g, or t
  misc_feature (268)..(268): n is a, c, g, or t
  misc_feature (271)..(271): n is a, c, g, or t
cctttctgcggcggcactggtttggcaccgatgaagtgggacgcgatctgtttagccgcgtactggtcggcagtcagcaatcaattctcgccggattagtcgtggntgccattgcgggtatgattggttcgctactcggatgtctatccggtgtgcttggtggacgcgcagacgccatcatcatgcgcatcatggacattatgctgtcgattccttcgttggtactgacaatggcaactgntgccgctctcgggccgagtttgtttanacnatgctggctattgcta

SEQ ID NO: 513279 - DNA, 657 bp, Homo sapiens
  misc_feature (21)..(21): n is a, c, g, or t
tggtactggcccgagttcttngatggggtcatgacggctgctgattctggggctggtcaggaaaccaaggagacccccccccccaagcatggacccaccgtcaccgaagcctgtgaccgtccacaaacccagcccacagccacctctccgctgacttcctaccggtggcacacatggcggcggtggggagaaggctggctggtagggttccagcttgggtgccgctttgctggctggggcatgggcccttgagccactcatgtgagcccatggttcagcacccagccatgcccctcgctcgatattccgtcgggtcctatctgcgcctcccaaggagtcacggaccagtcgccttcgactctccaaggccctctgggggaggcataatgaacccaccgccggagccagacccggagccggagcaggaggcccagagctggagccggatgccagagcttggagccccctagcccaacagattccatacggccccccatacccaacgttgccttgtcttgggaccattcggagggctaccacgccgtgctagatgcgagaacgctaggtagcatcgcattggcaggaacgaggacagagaggtcctcgaataggcacccgaggttggaaaagtgatacgctccgacgaggcgcatccac

SEQ ID NO: 513280 - DNA, 752 bp, Homo sapiens
  misc_feature (371)..(371): n is a, c, g, or t
atatgaaggggacaaatttcagagtatctagtttaaatttatgtagtcgagtatccttttgacgttctcctcaggtcagtgtatactaggtgagaatattcctgttcgtcctcatgtgtataggcaagggtcatatctgtttatccattctaacagaagactggtcgcccagcgctactcagctcgcaacctcgatgttgtgcgttgaagctatatattagcattgcgttgtcacagtcgtgcaaacggaaaagtagactgaacatccgtgatacattactcatgttagtgtagcgacacctatgtaatcaaagaattccataagaacaaatacaacaaacatgagtggtagttcatgactgatatgctgntgttgacgtgctcatcttggtcatatctatcccatcccataaggcacggacacgtaatatgtgtcccatacacatggagggtaagactaggactgaatgggcacacctaattagaactcaactttgcaatgtcttaccttctctgcaacaccattatctaagaacgcctaatttgaaccgtgggaacacgatggatctcctaataaggcgacatcgatatgacctaacttccgtgtaatactgtgatctttcagctcgatgtgcgattctgggcgcatgttcgaacggcgtgttcagacccaggtcaaccgggacaatgctattattagctcatacagtattaatgccggtgtcacggtaaatgtcaagttataattcctc

SEQ ID NO: 513281 - DNA, 159 bp, Homo sapiens
cgacgcgatggaggtggtggtggtagctgctgtgggaggaagtgatggaggaggtggtggtagctgctgtgggaggaagtgatggaggaggtggtggtagcggctgtgcgaggaagtgatggaggaggtggtggtagcggctgcgggaggggtcgacgc

SEQ ID NO: 513282 - DNA, 323 bp, Homo sapiens
  misc_feature (205)..(205): n is a, c, g, or t
ttcctctcgacatctcctggggaacatagcagcagtggtgggagtggtgtccccttttctactctagcccctcctccacccctgttgaccactctggagttgtacccttcccatgcccacactggcaggcacggagtagcaggggctgtgcgagtatttcccaatgaccatagttccctccttcaagggaccctggctgagcatnttgtggtactcccaggacccagggaccacggggcccaacccaactggacctcaacggccttggcctaagcccgtgtacagagagagcctcacgcttaccctcccaattctcttggaac

SEQ ID NO: 513283 - DNA, 243 bp, Homo sapiens
gttttgccccccccccccagggttgttttccttaaattagggccccccccccctggggggcttcaaaggggggggggccccccccctgtttcccccctggttgggccatataaaaggggcccggttttccttccccttttaacaagattgggggttttctggggcccccccaaaagcaaaaaattttgggtttcctggcccctttttggggccgggggcccatttacccctttttttttttta

SEQ ID NO: 513284 - DNA, 182 bp, Homo sapiens
gctgcccagagtctaggtaagagtttgttcccgtggtgcggagggtcaaggcccacacccggaaacctagcgaggtaaagttgcgtttttggttgtagaaacgacaactttttccgctttcctgggcgatggcggcgtccggaagccgtatggcccaaaaaaccctgggaaactggccaaca

SEQ ID NO: 513285 - DNA, 972 bp, Homo sapiens
  misc_feature (1)..(1): n is a, c, g, or t
  misc_feature (206)..(206): n is a, c, g, or t
  misc_feature (211)..(211): n is a, c, g, or t
  misc_feature (246)..(246): n is a, c, g, or t
  misc_feature (250)..(250): n is a, c, g, or t
  misc_feature (260)..(260): n is a, c, g, or t
  misc_feature (264)..(265): n is a, c, g, or t
  misc_feature (276)..(277): n is a, c, g, or t
  misc_feature (282)..(282): n is a, c, g, or t
  misc_feature (286)..(286): n is a, c, g, or t
  misc_feature (288)..(288): n is a, c, g, or t
  misc_feature (294)..(294): n is a, c, g, or t
  misc_feature (321)..(322): n is a, c, g, or t
  misc_feature (324)..(325): n is a, c, g, or t
  misc_feature (330)..(330): n is a, c, g, or t
  misc_feature (332)..(333): n is a, c, g, or t
  misc_feature (338)..(339): n is a, c, g, or t
  misc_feature (343)..(343): n is a, c, g, or t
  misc_feature (345)..(346): n is a, c, g, or t
  misc_feature (358)..(360): n is a, c, g, or t
  misc_feature (362)..(366): n is a, c, g, or t
  misc_feature (374)..(377): n is a, c, g, or t
  misc_feature (380)..(383): n is a, c, g, or t
  misc_feature (387)..(388): n is a, c, g, or t
  misc_feature (390)..(390): n is a, c, g, or t
  misc_feature (397)..(397): n is a, c, g, or t
  misc_feature (414)..(414): n is a, c, g, or t
  misc_feature (418)..(419): n is a, c, g, or t
  misc_feature (422)..(423): n is a, c, g, or t
  misc_feature (427)..(428): n is a, c, g, or t
  misc_feature (431)..(431): n is a, c, g, or t
  misc_feature (441)..(441): n is a, c, g, or t
  misc_feature (444)..(444): n is a, c, g, or t
  misc_feature (446)..(446): n is a, c, g, or t
  misc_feature (451)..(451): n is a, c, g, or t
  misc_feature (461)..(461): n is a, c, g, or t
  misc_feature (477)..(477): n is a, c, g, or t
  misc_feature (488)..(488): n is a, c, g, or t
  misc_feature (496)..(497): n is a, c, g, or t
  misc_feature (500)..(500): n is a, c, g, or t
  misc_feature (512)..(512): n is a, c, g, or t
  misc_feature (537)..(538): n is a, c, g, or t
  misc_feature (553)..(553): n is a, c, g, or t
  misc_feature (569)..(569): n is a, c, g, or t
  misc_feature (579)..(579): n is a, c, g, or t
  misc_feature (581)..(581): n is a, c, g, or t
  misc_feature (590)..(590): n is a, c, g, or t
  misc_feature (596)..(596): n is a, c, g, or t
  misc_feature (601)..(601): n is a, c, g, or t
  misc_feature (606)..(606): n is a, c, g, or t
  misc_feature (609)..(610): n is a, c, g, or t
  misc_feature (612)..(612): n is a, c, g, or t
  misc_feature (615)..(615): n is a, c, g, or t
  misc_feature (618)..(618): n is a, c, g, or t
  misc_feature (627)..(627): n is a, c, g, or t
  misc_feature (631)..(631): n is a, c, g, or t
  misc_feature (643)..(643): n is a, c, g, or t
  misc_feature (652)..(653): n is a, c, g, or t
  misc_feature (659)..(659): n is a, c, g, or t
  misc_feature (662)..(662): n is a, c, g, or t
  misc_feature (684)..(684): n is a, c, g, or t
  misc_feature (696)..(696): n is a, c, g, or t
  misc_feature (723)..(723): n is a, c, g, or t
  misc_feature (736)..(736): n is a, c, g, or t
  misc_feature (757)..(757): n is a, c, g, or t
  misc_feature (759)..(759): n is a, c, g, or t
  misc_feature (761)..(761): n is a, c, g, or t
  misc_feature (764)..(764): n is a, c, g, or t
  misc_feature (771)..(771): n is a, c, g, or t
  misc_feature (773)..(773): n is a, c, g, or t
  misc_feature (778)..(778): n is a, c, g, or t
  misc_feature (789)..(789): n is a, c, g, or t
  misc_feature (796)..(796): n is a, c, g, or t
  misc_feature (800)..(800): n is a, c, g, or t
  misc_feature (802)..(802): n is a, c, g, or t
  misc_feature (805)..(805): n is a, c, g, or t
  misc_feature (808)..(808): n is a, c, g, or t
  misc_feature (815)..(815): n is a, c, g, or t
  misc_feature (823)..(823): n is a, c, g, or t
  misc_feature (834)..(834): n is a, c, g, or t
  misc_feature (836)..(836): n is a, c, g, or t
  misc_feature (847)..(847): n is a, c, g, or t
  misc_feature (853)..(854): n is a, c, g, or t
  misc_feature (863)..(863): n is a, c, g, or t
  misc_feature (868)..(869): n is a, c, g, or t
  misc_feature (894)..(894): n is a, c, g, or t
  misc_feature (898)..(898): n is a, c, g, or t
  misc_feature (905)..(905): n is a, c, g, or t
  misc_feature (909)..(909): n is a, c, g, or t
  misc_feature (945)..(945): n is a, c, g, or t
ntggaagctgttaataagccacatggcagccaagagccaggtgtgacctagatcagctggatgcaagtgcctgtcccttcatccacacaacctgctgctcggggaccctgctaggatgcgcttgctggcaaactggctaaaacccaacagggagaaatgatgctactgctcatcatttccacctccccacatcccatgtccaaganaatanaggaaaatgccacaagtacccctccaaaataaacncgcntgcgtctgtntgtnntactgaggagnnaggantgtncnaaggcnctgcagctaaccagcagcacccagcannanngaggnannagtannttgntnnctgttccagtgnnntnnnnngcagagtnnnnagnnnntaanntngaagaangaacataaaattgcatncttnncgnncttnnaanaagattcctncananctcgngagctggccncagcgtcggccgaaanccccaagccanctcaaaannatnagcgtctaagangattagaggagccttctataccgcnnccagggcccaatccngcgagcgagaagacgncaaggatatnanggcagcaancagagngccanaagcnganngnaangtngtccataancatngccaaaaacaangctcgccanngccgcnagngcgtaaataaaacgcacagccnagtatgcacttnaagggcctccagtggcttccaacttcnctgagattccganccagaatgtaacacggccttnancntcngccaccncncgtantagaattccancagtgcnatgnanagncanatccatnattggaanaaagccgaaantnctagtcgagtntcaganntaagaggangatcnnccagccccgtgcccacagagaaagnaaantagaaanccangaaatctacccagcccatgaaaagaaacctaagatngcttctatttccgtcagttgtttctta

SEQ ID NO: 513286 - DNA, 935 bp, Homo sapiens
gacacggctccacctcatgagttaagagaatacgtcccaacgcacttcatgaaatatgggttattgaagatcctatacgagtagagcgagtcaacattcgtcgtttgagacagaagacatggattactagcttctgatggcagccacgagctagtcatgtgtgacgagtaatcgctgtctaaccagtgtgtgcaacttgtactggtcgactctgggcatctagaagtgctcgcgtgacaggcgtaagagaggtagcttgcaaggtaggaattcccaccactgttcatcactggtgcctgatgcacaggagggatacagcaagaagatgctcatgcacaacaattactggtagcagccaagaagaaggtaatcgtctcctaactgtaaaagcactacaaggtggacacacatacctcttcctccgaaacccattgttcatgctcaggatccagcgatgtgaaggctgctagtgccaacagcatctccgttctagtaattgaacacaaacgagacatgtcaggaaaggcgaggtactggggattcgagagagtagatcctgccaagtgagcaacgagaggacaggcatctatcgaggcaggggttcacccacgtcatcccactgatgattggatcgacgttctgtaggaaagatgacccttggacttgcatggttgaatccctatgaaggaatcatgcccagctcctgatggaggagtcaagacgcagtactggatgctcagcagcttcgttggagtcagtaatcgtcgtaatcccttgtggaaagtaggcctggagatttggactggggaaagctgcttgtgaacttggggcgggatcgtgtatttctcaagggaaaagcatttttgtgaggcccacctagaaagggttgggcaccctgttgttggcagtgggaagaaactcccggcccatgttgg

SEQ ID NO: 513287 - DNA, 624 bp, Homo sapiens
aacaatgaaacggtcatcctggatctatccccatattagtctgtctggaactaccaatgtatcagtcttcatatatgtctcgagaagctacatatacaacaataaataatacaatttttttttttataaatcaatgtagcatgcatacagtttgacaccatgcttttctcaaataaacattattatgccttagagatcttttcatctcagtacctaaagcacttcttcattcctttttcccattgggcaaattagtttcaccaatcctctgtaatttattatctaaagtgagacattgagaatgaaagcactattaataattatccaagaacagcaggtataaactggtagtgttcaaaaagccaaagcatatggttatcctacctatggcagatatttaggttgcttccaattctttgacattaccaagttgcaaagaatatacttgtaaatacatacttttgcacatctatgcgctttgtttggtaggataaatttctagaagtggaattgcagggcaaaaggttatgtatatgaatttaaaaagttcacggactgccaattgctgtacataaagagtataacaagtcacacttccctagcaggatagagaatgctggccta

SEQ ID NO: 513288 - DNA, 223 bp, Homo sapiens
  misc_feature (5)..(5): n is a, c, g, or t
  misc_feature (12)..(12): n is a, c, g, or t
  misc_feature (111)..(111): n is a, c, g, or t
ctccnttccccntttcccaggatgcagcaagccaaaacagtaccactgcacgtcagcctgggtgacagagtgagaccctatcttaaaaaaaaaaaaaattggctggacatngatgtcacgcctgtaatcccagcacttagggaagccaaagtgggcggatcatttgaggtcaggagttcaagaccagcctggccaacagaggagactgtgtctcctaaaaaaa

SEQ ID NO: 513289 - DNA, 937 bp, Homo sapiens
ggtaggggtgggagggaatgcagatgggagtgggggaggggaggatacagctttcaggatatcccaggcgctggggatcagggccatggggcaggcattggctcgccacttgtatccagaagttcccaggggtgaatgtgatgcgtggtgtgggactggaggtgtgataaggtgttcttggaaggaaggggcaggaggtggaactgtagtcgggtccctactgggccccacactgaggggtcgtgaacaccgcgtcccgcgccaaccatttgcaatggttttcgtctacccagggcagtgtggggcttgttcttagaaagtcatgtaccagggcaaggagcaacttctttctgatcagatgtaaccaagtgagaaagtgcaataaaaaggagaaataacagaaaaggagaagagaggggggggcgcacgggttgtacggagtgatcttcgcgccccaagggtgggcacgcaggctatgaaaggggaagtaccccgagttctctcttgtgtgcaatcaccatcggtggcccagaggaaaggggcgcggtcggggacattataatagccaccggagagaggcaaccaggggcgtggcgggaaagaaaactcggaggtacgtgggaccggggcacaaactgaggcgacacctggggcacatcgctcccgcgttcccggagacccgtcttactaactggagtgggagcgagggcgcatctgtagtggagaccaagtaggcaccgctcagcacgagagaactctacacagccacgccctaggggcataagttcatacagaaagttgtgcaccgggtggccaacccgcgcgtggcaaaccataggcccagtacaaggcatggataggacgcaccgagatgcccgccaacgagaggaatgtagatcaacgaaagcacttttattgccctgcggggacgcggaaa

SEQ ID NO: 513290 - DNA, 297 bp, Homo sapiens
tacgaggtaggaccggcgggagacggctctggccagttccaacaccaagaggggggcaacttttcaaaggaaatacagtcacggcgggggtggggcaaaaaggcttcccactttctctcgtctccaccggatcagccagaccttccgctagcttagcctcttggtcccggtcactcaaagttggtctgcagctctcccggtctcttggtacctctctcagggtgggtcctccccggcctcttcccttcagggtctctctgggtcacttctcatgtgtcggcgtcccggtcggtcact

SEQ ID NO: 513291 - DNA, 717 bp, Homo sapiens
ctacttgggtgtcttcccatctctgtgactcctggcatattgacgagtctgagggtcctcaaacttttccactccccctcccagcccaaactgcaggcaccgccgtgacttcctgccccaccacattcccccggtcaaaccacacgccccgcgaccacactccacacccttcatgcctcacatcactgtcctccagtcacccactctccacacaagacccacgcgtacctcgtgtcgagttatataggaaagaatgtgaaacacagtggaaagagtatggatttaggagtcaagcctggggtgaaattccagctctgacatctaccagtcctgtgatcccagctactgtggagaggctaaggcaggcgagatcacttgaatccggcaggtggaggtgcagtgagctgagatcacgccactgtgctccagcctgggcaacagagtgagactccgtgtcaaaaaaaagagattgggaacacagaccgctgggcagacagcgggcggagggggctctccactggacacttttgccccacttcgcctatggagggagaaccagagggaggacgaggctccttatcccaccgcggggaatctgcacccttgggggcgacatgccagaggttttagttgaccgccgagttttggaacctggcgggccactaacggggtgcgcgtcctcaccatatcaccaaataccgagctgcacgaaaccgg

SEQ ID NO: 513292 - DNA, 274 bp, Homo sapiens
  misc_feature (126)..(126): n is a, c, g, or t
  misc_feature (231)..(231): n is a, c, g, or t
gcactttgtgaggccgagatgggaggatggctggagcccagttcatgaccagcccaggtgacatagcaagaccctgtccccacaaaaaaatacaaatataagccttgtgtggtggtggcacctgtnatcccagctgctccggagtctgaggcgggaggatcacttgagcccaggaggtcgaggctgcggtgagctgtgattgtaccaccgcactcagcctgggcgacaganaccctcttgctaaatctggcgaccttcagctaagcaagagcgg

SEQ ID NO: 513293 - DNA, 1265 bp, Homo sapiens
ggagaggctctggctcttgcttcttaggcggtccgaggacgccatggcctagtgcccgatgactcggggaaagcagtcatccagactcacctcggaccagcacttgtgtgtccttggtgagatgcgttcgttgtatttgtgacgagatcgcagcatcgccttggcttgcccgttaacccattcgacgcatgcgggacttggttgactgttgccgggtgctcattgcgtcgctggagagcacgtcgtccgtggggagggcctattgacctctctcgatgcggcatatggtggcgccatagtccatggcgttgctcgtatcattgctggacatgcttcataagctcgctgactggagcgagtagccgcatccgtcagtacctccaaggtttcttggacttgcttagttgtacctactatcatacgattcgcaccgtggcgtgggatggactattgcgttcttcagacgcttgcttgccagaagtgacgttgatgtcttctgagctgagcaccgttgatcgtccgttttcatccccgatgggtcctgatgccttcggccatcgccttacatagtaggcgcgagtgtatcgtcgtgttcttgtgtcacccttcgggctttacttacttgaccgtagatggtcgtttcctactcgaactcgagcgtcgttgtgagtgcttcttggagcatggcataatgggacctacgtaaccacgcagggggatcgaggcattcctaagccaccacgcgtgcgctcgaaagtgtaccgcctgacacgttgttaggccccaagctctggcgtcggccctttaagaaactttacccaagcgttcacctttgcgcaacccgcgcacggcactatccctaggtttaagggggcacgcagcatccggttttttttcccccagtagctttgccctccccggtatattaacgcgttggttgccccttctgggcctttttcctccttcgacggcgtgggacacttgactagcggtacgtatgcccacgtccctgcctttcacgttggtgtcactctttatgtggttccccctttccatcggaggggaccttcacggatcaattttacgcagttgttgtggcaaataaccccccagggatccaggatctacccggttggaacctatagggttgatgaaaaacaccaggccccggatttcccacccttgaagaccaagcggaaccgtctgtgataagcccctggggactcaaagtgggcactcgcgcagcaatggatgcattaaagctc

SEQ ID NO: 513294 - DNA, 290 bp, Homo sapiens
ccagaggcaccaaggagcggctgcctttattccaggctctgaaggagctgcctattcaatcctcagacctccacagcacacagagcggccatactcatctctgtattcttctctgtgcacctgttggggacaccaggccttcgtctctgttgggacctccacctgcagaggcttcttgcctttgttgtcaaaagtctactcatccttccccagagccccctcacaataacctgcactaaggcccctgggtttcccagctgcaaaccaccctccttggtgctctgggggta

SEQ ID NO: 513295 - DNA, 1522 bp, Homo sapiens
taaaaacgggaaatctatttaatcccatctaaaaatacaaatcaggaaagggggggaaccataggaaaattcttccacctctcttaacagagcgaagtttacgtggcttttcgtgcttggccccaagaaatctcccaagggctggagtgtttgtggaagggaatttactctgtggttctttcaactatactctcccgagaattacctcagaacatataaggttatacaccaccactctctgtggagagacagcgggctctctgttgccctgtgtctgtgagaggctataagatgtggagagcgctctcaagtgtgcgatgtggagagagacatacgggaggcatctcaatctctataagaacaaaaaatgtgatctcacacagagaaacacaggtctgtgagcgtgtgagacaggtgtgtgtgcggcgcacactatccacagggacacaggtgtggggctctctctgtggggtgcgctctgtggtgtgtgtctcgccagagaaacccccactataaccagcgctgtggggactgtggggccctctgagagaagagaccccacacccagagaccagaagcctgtgtgttgttttccgaagactaataacagagacatcatccgtggggcgtctcttataaattctcacccactactcgcactccgaggccaccaagagccccctgtgtgtggagagtcccaaagagcccctttagacagagccactctctctttattcaaaagagccccccccgttgggcgtggggggtgaggaggggtatacaccaccatcaacataatatatcctctcggcccctctctatctcacaacaatctctgttgcacatgtgtctaacaggcgcccttcgtgaacacgaggggtggtagaacatacaacatgcgtggggggacagaagcgacagtgtctcaaggactcacaccctgtgggaaaggggctccctgggttaaattctacaaaataacaacaattttgggccccagtgggtccccccaagatgttacatgaaaatgcccagcgggtgtgacactcccgggtactaggggaaccgccccccttcggaaagggggctcttgtcgcacccggatccatgtaccaccacaaactgtgtttgggggcaactctggaagcgggtccacataaggcgggagggacaacactaccctaggggctgacccaccccgcggcgttagtaaagccccttctccttgtcacaggaccccaagatgttctatatccatccctcacaagaaaattgccacaacaacttgtgccgctcacaacctccggcgacacaactcggcaccaacaaagacatggtgggcactccctctctctaaaaagcaacaaagagacaagcgtgtgcggtcacctctcaaggagggagaacttcctccgtgtggaatgcacacccacaggcgattcctgacacaacgttgcgccgcaggaccacacagttggttacaagactgtgaaaagacggctcttaacgaaagaaagtgtcc

SEQ ID NO: 513296 - DNA, 113 bp, Homo sapiens
catcttctcccatcagtaacgatgaggatgtgtacaacaaagtagagaggattggggtgatagtacaggtcaggaagaagtactctcatgtggacctgatgggagcatagatg

SEQ ID NO: 513297 - DNA, 475 bp, Homo sapiens
accagggaactggtgtctctcttaggagaaaatctctttttgtagtcccctaagcccagtgaagtagaaaattaagtttttgcccactaagtctctgaaataggtcagaacagacatccaccattaaaacacatttaatactagattacgttctctccctattctactttgactctccatttatgcccagctacatgattcaaaagagaggggtatagagtgagcaccacatgttagtcagactctttctgttataagtaacagaacaccatcccaaactaggtttatgcaaagaaaggaatttattgtttcacataaattaaaaaatccagatgtggcagcagcttcagacatctgcttcaaagtatgatatcaggagttggttgtgttccatctcttcgttctgctaccctttgtgttggcttaattctcaggcaggctttcccatgccattaaaaaaaaaatcctcgttaaa

SEQ ID NO: 513298 - DNA, 102 bp, Homo sapiens
ctgctccgcccctctctggagaccaccacctttactttattccatctttcaggattatccagccattggtgggcacaatggctcacacctgtaatcccacca

SEQ ID NO: 513299 - DNA, 116 bp, Homo sapiens
tgctcctcacaaagaacagagtgtgttggacatctacctctaaatacaggtttagtacggtactattctgtagctctgatggtactaataattaaacccagataattttgtggcga

SEQ ID NO: 513300 - DNA, 993 bp, Homo sapiens
  misc_feature (420)..(420): n is a, c, g, or t
aaacatgtgcctgaattcctcacaaccaagttaggaccattctatcagcctaatagaagaactactgttatgtatgatgagcatgacgacgtaagctcctgcgtcactcagtcctgtcgttctcgcatttctaaagcttgagcttgactaatctattccagaccccagtatctaacctattctgccaacagagttccattgtatgttaacacctcacatgggtcaaccccaaacacagggcatgcttcacttaggactggggtatcagagaagattacatagtgatgctcgagagacagtcctaccaccgtcctgtttgacacaggaacacctgtcaaccgtcatgaagctattcacttcaagttatcgaggagagctaaacgcctgcgagcatagtgaaaccatgatgattttcacatngagtcagaggctatcgccttacaccgatgacaaagagagatcagacataaatctagctctggttcctctgatgttaacggaagcatgattcatccaaatgggcatcccaaacataggagctttacaaggacatgcctatcatcgggtacctactattaaaccgagatgaaaaagaagaaccgtgtggcactgcagaatggcccgggcagaggcatttgaacggtcagatcgggagccgatcggaagtaggcggatccactcttatggcgatgcctttgaaagttttactttcaatggtagaaatccatgtctacctcaaatggtagtaccccctagcaaggggttctcgtaataaatctacacgctaggagcactgcatattgtatacaagattggtactggttcgtggggggccgaagcgtgcaggagacaattgaagcccagatccatactcgataagcaagatgctatgggttaatgaatcttgcgggcagctagatagccggaacataagtagatactctaagtggggatcccacttaagttggaccaagggggtaacaaagtgaatcc

SEQ ID NO: 513301 - DNA, 179 bp, Homo sapiens
caatcgccgatctactttccgtctcgtatgaattcagagaacactactctaggtccgttatatacgtggaatcatacagtgctttccttttgtgactggcttattttgctatcgcataatatccccaagggtcatccatgtcatagcatgtgccagaatttcctttttttttttttttt

SEQ ID NO: 513302 - DNA, 1088 bp, Homo sapiens
  misc_feature (388)..(388): n is a, c, g, or t
cgtgacgcgtgggcaccagcaacacagggtgtcgtgaatattgacccctaatagctcaaaatgggaactgaaaagactacatatcacatcattgtcagtcattggagcacagtacgatcttcgggtcaaggtccagccacatacgtgcgaccgaatcatgagtctactcaatgcagagtgtgcattcgatcaatatagaaccattgaagataatttgtagaaggaggctgtctgtacatcgggcacaagggctccttcaagatatgccatgggtcgttgacgattaaactgacaacgctgagcgtgaacagtaggataatcaccagttgatatctcctttgatgcgaacatttgacgacccagcgaagatagctatgtgaactaatcnattgaatggccccagtggactacagagagatactttgatccatgaatacatgaattcacagaggatcgatctcagggctgaactgatgtctgtgccttgactagttgcatggctggattgttggtcgagattcttgaaacgtcctgtgtgattcgtcccaagcacattggggacatgaatcacgcgtacgaagcaatggccgctcttcgtagggcttaacaaccatcgtgcgggtggttgcacaatcattgctatagtttgctcgagctgtatcaaccatatagatcgtgtacgtactcactggaggctcaacaccctatcgagtcccacgcatagcagcacttgttcgaggacacggtgggttccaaggggaaatgtccagcaacctttaccagtgtaacgaaagcattggcgcttacaaatccccgagcacaggaaagccatttggtgccctagttttcttgggctttatgaactgggtagcacctaaccattggcgttgcgaagcccaaaggtgggcgtaaaccattggccactttggagctctcaaggtgcaattcgcaaaatgttcaaccccggttacagggcattgtgcaaatgggccaagtgtgaacgcagacctcagagcctggagaggattctctgggcacttagattccttagcacgagcattatgttttgcccacactgggacagcgtc

SEQ ID NO: 513303 - DNA, 423 bp, Homo sapiens
ctttattctaatatcaccaatctaaagatattggaaatatgccatttaagagcacctaagttctacagttgattataaaccaccttttgaagaggatcaaaacaagactacgattgtctgtgaatcacaagatgtctttagacagtcacagtcaaaaacacaattgacaaagaaatttcgttatttctgtggtttacaataacttaacataataaccctaattataattgatatcatatactcagatattagaattttagaaatcttatacaattttggaacatatattaatatatatattaatgttattcactaaaatgtaacctgaataagattaaacattattcttattttggcaatcccatgtaattaaacatgtcaaataatccaggggccctctatggcatccaagaacagggttta

SEQ ID NO: 513304 - DNA, 615 bp, Homo sapiens
  misc_feature (18)..(18): n is a, c, g, or t
  misc_feature (100)..(100): n is a, c, g, or t
  misc_feature (128)..(128): n is a, c, g, or t
  misc_feature (133)..(133): n is a, c, g, or t
  misc_feature (143)..(143): n is a, c, g, or t
  misc_feature (163)..(163): n is a, c, g, or t
  misc_feature (303)..(303): n is a, c, g, or t
  misc_feature (315)..(315): n is a, c, g, or t
  misc_feature (337)..(340): n is a, c, g, or t
  misc_feature (390)..(390): n is a, c, g, or t
  misc_feature (410)..(410): n is a, c, g, or t
  misc_feature (425)..(425): n is a, c, g, or t
  misc_feature (427)..(427): n is a, c, g, or t
  misc_feature (463)..(463): n is a, c, g, or t
  misc_feature (486)..(486): n is a, c, g, or t
  misc_feature (489)..(489): n is a, c, g, or t
  misc_feature (493)..(493): n is a, c, g, or t
  misc_feature (523)..(523): n is a, c, g, or t
  misc_feature (531)..(531): n is a, c, g, or t
  misc_feature (542)..(542): n is a, c, g, or t
  misc_feature (549)..(549): n is a, c, g, or t
  misc_feature (555)..(555): n is a, c, g, or t
  misc_feature (592)..(592): n is a, c, g, or t
cccccccatccctccctncctccacatcaccctccacacccccctcctcattcacaccctcctcaccctccctcctcacctgcactcctccacctccaanatcttctccacccaccaccatccccccnctccnattcccaacnctcccattcccctctatccntccaacccccaaacccaccaccactacctctcctccattcaccacaccctctacttcaaccacccccccctcaacatcattctccaccaccccccccacctcaccaacctcatccacaccaactacccccaccttctgcnacccatcccacncatctctgaccagaaaccactnnnntccacaacctctacaacatgatgcccaatcccatcctcaacctccctccnatcaatctcaatcactcccncaccaacaccaactntnacaacctctatccctccccccactccctcatacatnccatcaacccccccacacatctnatnattncccccaacctacccctcctaccaccctatnctcatctncccaacccctntgcccancccctnccccctttcccaccccccctcatcatcacccacattnaccccatcaacccactccaccct

SEQ ID NO: 513305 - DNA, 92 bp, Homo sapiens
acggccgtgtattactgtgcgagagatcgaacccattatggttcggggaaaaactggttcgacccctggggccagggaaccctggtcaccgt

SEQ ID NO: 513306 - DNA, 286 bp, Homo sapiens
ttttatccatttaaattttgaatttttaacctttttggtcaaaaccccagccaacccccctaccctgggcctatgcgggggcgggatcaaaacccccccagcaggggccaggaatttttccccccccttataattgggggggccccccccaaaaatatattggcccttgccccaacccggggtccccgcctaaataattggggcccaaacggccccggggccccaatttaaatttccctgcctaaattgggaaattcttttccaaaaaaagtttttttgggggata

SEQ ID NO: 513307 - DNA, 154 bp, Homo sapiens
tcgcgtttagttcaacatgcgtctcagagattaatcccggaagttaacagcagcccctgggtctcagccccaaaacctcaggattgaatttgggaaaatggggtcttctgccgaccagcctacagacctacatggaaggaagcgaggcctgtgt

SEQ ID NO: 513308 - DNA, 344 bp, Homo sapiens
aattgtcaggtctaccaaaaattcatatttcagattatcacaatacatcccttacctagtgaaatcggctgtcataatctttcacaggggcacaggatggttcccttatgaagaagttgatatgccttttcccaactccagaaagtgacaagctcacagacctttgaactaaagtttagctggaacagtatgttagtgcaatatagtcacaggacagcccttctttccacagaagctccaggtagagggtgtgtaagttgcatcggccatgggatctgttgggtagacacacattaagtccaagcatttagatgtataggtagatggcggtaaaagcttgagta

SEQ ID NO: 513309 - DNA, 117 bp, Homo sapiens
agtttccaaagcagctcaccccctctgctattaccaaatccacccgtgattcccaaagccaccgggattaccaccaaatcttccacttctttctaactgtctgtgcagtgtgcttcg

SEQ ID NO: 513310 - DNA, 789 bp, Homo sapiens
cgccgagggttttttgcgggatgtccgctgttgtgttggattgtcttgaattgtggtttatgacttttgggtcgtttcactttcaaagcctcttgaatacctgtgaatgtacccccttgttatgaactgaatagttttagatcccagaatgtgttttaccaggagggatcaccatcgtcatgcttctatcagtttatttggaggttttgacaaaatctgttttttctttagcaacacttgcgtgaaacttccattattttcctcaaaccagataattctttctggtgtgacaaaccgttcttcctgtcttctttaaacgtgtaagggtgttagagaattcctttgtcccaaatcatgctgatttgtgctctcttgcgtattattccgattgtctgagacacatttcgcttctggccgtagacatattggcaattgcgtggtaagtgtttctagattgctgtcctgttgagcacaaagtgaggatgctcgccactgaagcagccctgtccaggggtgctgtttcaggctgggcatccgctcaggagcggccttccctgctaaacacaagggacttggggtgcaaaggggcatgatccagggtcccccagggtgggctcagctcacagggagaggccacccacgtggcagccccacctcttgtagagcccccagtgcgcggagcagataagagacctggacccagaggcagatctgccggggtggtagaaaaggtagattaggctgtggcaatgggattcaacacgatttaatacgttaagaattgcgtta

SEQ ID NO: 513311 - DNA, 135 bp, Homo sapiens
aacccataggaaacccctaaaggggactttaacccccgattttgccactgggggtttttagcagcttgctttagcctgctccccctctgtggaaaaaacttttgcttcaataaatctgtgctttttttgcttcca

SEQ ID NO: 513312 - DNA, 463 bp, Homo sapiens
gcaatgtggtgaagctgggggggtgggtttttttagaaaaaggagttgggggttttggggggggcaattttttggagggggaattttccgagtagggggggggtgggaaaaaattccagtttttttggtttgcccagaaaaatttttgggggccctaaatggtttttctttcccgggttgttggttgggccaataaaagaggttggggtggttttgtggggggggtttggtaacggaagccggggggtgtgggaggaaaaggtccccccccgggtgtttttaaatttgcgtggggggggaggggggagaaatattgccgtggttcctccgtggttttttgggggaaaaaggcggggagagaggaggggttggttttccccttgtcggggttcattgcatctgtgtgaagtaaggaagaggttttgaaaaaaaagattataggtagtaactcataatatccctt

SEQ ID NO: 513313 - DNA, 150 bp, Homo sapiens
ccttgaccgcgccggtgtccttgatcagcttgagcaaaggcttcacgtagatacgggtcggtgccatcagcaggtcggtcaaaggcttgccgtcgagctggatggtttcgatgtcagcaccggacacttcgatgatcttgcggatcagcg

SEQ ID NO: 513314 - DNA, 332 bp, Homo sapiens
gcgtttagctagaaggtgtacattctgatgagaaggtgactgtctctgggcaaggattggcaccggccctgcctgctgctgctgagcgctgcgggaagacactgacccgccgtgcgggcacgcggagcacgatgggcagcctctactgccacaagccctgctaatggaatcctcttcggacccaagggagtgaacacctgttgcggtgtgcagctacatctatgaccgggaccccgaaggcaagtgtccagcccctaggctacaggggctctcatgatgtgggctcacctgcgccccagaccctggaggggcccccctgtttgggtctgctg

SEQ ID NO: 513315 - DNA, 514 bp, Homo sapiens
tatgtctcgatcgttagagaaatgaatcagaaccataaggaggcaccaggcacagtgctcacatctgtaaccccagcacttggggaggccaaagcaggaggatcacttgagatcaggagttgaaaccagccggtccaacatgaagaaaccccatctctactaaaaaatacaaaattagcaagcaggctggcacagtggctcgtgcctgtaatcccagcacttggggaggctgaggtgggcagatcagttgaggtcaggagttggataccagcctggccaacgtggcggaactctgtctctatggaaaatacaaaaattagctgggcgtgatgttgcatacctgtaatcccagctactggggaggctgaggtgcgagaatggcttgaatctgggaggtggaggttgcagtgagctgagatggtgccactgcactctagccggggcaacagaatgagactctgtctcaaagaaaaaaaacaaaattttatagcaaatatcaggtttaggggagaaa

SEQ ID NO: 513316 - DNA, 803 bp, Homo sapiens
gcacagcccttcctgccgggccgggcccttcctggctgagctcgagaagtccaccagacatctgtggcacagggtgctcctcccacaggcggcacttcggggagctcagcggaccctgaagcctggtcgccctacggccccagtgccacgggcccccgacctgctacatctatgatgagttcctgcagcagcgccggaggctggtcagcaagctggacctggaggagcgcaggcggcgggaggcccaggagaaagggtactactacgacctcgatgactcttacgacgagagcgatgaggaggaggtcaggggcccacctccgttgcgtggccgagcagccgccctcaaaactggacacgtcctctgagaagctagacgtttttgcaacttttttggcttgaccacccaacagcagaaaggaggaatttggttgggcccagaagcggaggaagcggcggaggattgctggcgagagagaagcccgtcgcccccaacaattcaagagcaagcggcaggaccgccttcaccgaggactggcgctgtctaacccgctaacagcctgatgagatgaacaacagtcccaaactttcgaagaaaagaagaagttcctggagcatcttcaaacctgaccacatcagcgctgggaacgaggcaagaccacagcagagacttgttgacattggtccgtgcctggagcaggaagggcatgtcagcaggcaggggcgatccttgacaaatctccaagggagaggcttggcgcttccctgattgaaacagccacgcggagctctctgggtgtggg

SEQ ID NO: 513317 - DNA, 628 bp, Homo sapiens
aaaccactctagagaagtgctgtgccgctgcagagtcctcgatgaagtgcgtatgccaaagtgttcgatgaatttaaagcctcttgtggaagagcctcagaagactgtgtaatcaaaacaaaagttgtgaggcatatgttctgacgtcgagcgttggaagagatacaacacttccaggaatgcgctattaggttcgttacaccaaggaaagtatcccccaaagtggtcaagcgtccagaactcgttgtagagagtctcaagaaaagcctagggaaaagtgggcagactaatagtgatggtagaaactactccctggaatgcatgaaagagaatgctcctgtgcagaagactgatcgtatccgtggtccgtgaaccagtgtatgtgtgttgcactgagaaaacgccagtaaggtgacgagagtctacctcaaagtgctgtcacagaatcgcttggtgaacaggggagcatgcttgttcagctctggaagtcgatgaaactatacgttcccaaagagtttagtgctgaaactattcaaccttccatgcagatatatgcaccacttgctgagaaggagagacaaatcaagaaacaaactggacttgttgagcttgtgaaatgaaagccaag

SEQ ID NO: 513318 - DNA, 158 bp, Homo sapiens
ggctacagtgagctgtgaggatcacaccactgcacttcagcctgggcaaaagagtgaaaaaaaaaagatggtgccaccgcatctggccaaaacaggatctggtcccctcaacggcagggcactggaagaacctctatgttagtcatatccgtcatatc

SEQ ID NO: 513319 - DNA, 97 bp, Homo sapiens
ttttcccccgggggtttccccccggccccttttttggggggggccttgggggtttttccctttttaaaattttggggggtttttcccccccccccca

SEQ ID NO: 513320 - DNA, 1349 bp, Homo sapiens
agtgtcttttttccgatgttggtgtctccccctgttcgactcgcaatctgtgggggtttatccgcccgtgtaatctccgtggggcggctgtgtgcccgcggttgtcctggggatgcccctcaaggagcatctctcttgggacggggtccgcggcgcttgccgggtgacccccgtgttttgcctattcctgcaatgctgacaccacttgtgggtgcttctcgcgcggcttggtcctcttgcccatgcggcgggggcgtgggagttcccacccccgcggtgcccagtttttgcgccgcattccccatgggacacagaagggccccgttcctaaccccatccacacatataagcctgccttgggtgtttgcttcacaggtgggccccaaagaggttttcttagatccgccaggcccccgtgatttcccaataagttcccgcgttgggttttttctcgcgatagtggaccccccggagtgggaaacaccacatctgggggcatgattttggtggttccccccccgcccccccgtttattttagggagatccggtttggaactggggaacccctttcccacggagtgcctcgggtgaagattgcttgggaaaaaattgagtccttgcccccccggcgcttctgtgaaagaaaacgctgtgtacacacacccgtggcacaacacgcttgggaggtcacacccccacggccttcccacgagatcccccacttccctttctctgggagtgttggccgcgggcctccacgcttctgaaatttctggtgccccacgaggcccaagagatgtctcgagagttggccactctgtgaaggtcttttcctttcctcggggctctgattctttcctcgcggtctgggccctctaatgtattgccacttcccacggaggtacagagaaaggggctccctcgcacctgagactccctcgaggacactatttttataactggggagattgtgttaatcaaccttttttctgtgaaacgcctggcttgtcccctcgcccacgagagtttgcccacgctgcctcgggtccacagcctggtgcccccctcgagagattcacgaggttcctacacacggtggctgtgcacacgcacgccacccacggtgcatctcctttcatccccaccctcgaggctgatggctgtgagaccctgcttcctgcacacttacccacgaagcctctgcctgtgcaccggccacagctgcgtttactgagggccccaaggggtttctgtttctattctctcctcagactgctcaagagaagcaccatgagaaacccttacctgactttagagcttttttacaaaaattaaacctggtcctgag

SEQ ID NO: 513321 - DNA, 391 bp, Homo sapiens
  misc_feature (2)..(2): n is a, c, g, or t
tnacactggagctaaaagcaaatctgacattttaaactctgatgtggaggaggctttgtctgcaggaataagcctgacaaaggtagtggttattggataggtagaaacaggagctgtcgcatatgtgactagaagcaaatagataaggacagggtatagttgaccttaatcaaaaggcaaaggtgaagtatacctcctaaaggctaggcaagtctccgagtggctgacttctatctgacctacgttttaaagaatggagtagaggaatatgatatgggtaagacaaagcattgcagacacagcagactccaaagatgaagggaatttcttagtgaaatgagttccgcagggcacaatggaatggttttgagggaaggaagcagaaggaaaa

SEQ ID NO: 513322 - DNA, 345 bp, Homo sapiens
tgcctgagctgggtccagtggatcacgccttgtaattccagcactttgggaggccgaggcaggcggattacaaggttaggagttcgagaccagcctggccaacatagtgaaaccccatctctgctaattttttgtatttttagtagagacggggtttcaccgtgttagccaggatggtctcgatttcctgacttcctgatccgcacgcctaagcctccgacagtgctgggattacaggcgtgagccaccgcgcccggcctgttttgttggttttttttttgacactcgctctgtcgccgagaccacgccactgcactccagcttgggtgacagtgagactctctg

SEQ ID NO: 513323 - DNA, 916 bp, Homo sapiens
caacatgcctgtactatgaagaagtctaatcagtgtgctcttcatggaaaattaacagacaaaccatatgtattcactacttcagtattctcagataacatttattttattggctgggtgttatggctcatgcctgtagtcccagaactttgggaagccggggcaggaggaaacctgagcccaggagtttgagaccggcctgggcaatatggcaagagcccatttctatgaacaaatttcaaaaattagctgggcatgatggcgtggagcctgtggtacccaggctacttgggaggctgaggcgggaagattgctatgggtccgggaggtcgaggctgcagatgagctgtgttatgtggccactgcactccaggacgcggtgagagagcagacgacctgtctgaaaaaaacatattataatatcagattagagaccgggctcgggactctgtacaactgggactggaggtgccgcaatggcactgcactaccatagactccactgctaacgcaccaaaaaacaatgaagcctcaagattaatcccaacccagaactacaaaataacccgagaagcaggcatgcgacaatacacgggagaagaagacaaaacgaggacacgaggcacacaagaacacagcaaaaagtaacgcccacagaatgcacacaacaacgggaaaaaaccacagagcaaaaagagaaccacaaaagaaaacgagggaaaacacagggaagagaacacaccgaacacaggcaaaaaaaaccaatacatgcagacaagacaaaccgcactagaagaacaaaaaaagcaagcaaccgcaaacaacaaaacaggcaaaaagaaaaacaacacaacaacaagaacgcaaagacaacaaacagcacgacacaaaacaacaaaaaaacaaaacaaagcag

SEQ ID NO: 513324 - DNA, 469 bp, Homo sapiens
cagaaggatgaaaggagaatggtggattatagaagaatgggaggatgatggtctatggaaggatgatggaatggatgatggtcttggaggatgatggaatggatgatggtctatgggaagatgatggaatggatgatggtctgtgggaggatgatgaaatggatgatggaaggatggcagaatggatgctggtctatggaaggatgatggaatggatgatggtctatgggaagatgatggaatggatgatggtctatggaaggatgatggaatggatgatggaaggatggcagaatggatgctggtctatggaaggatgatggaatggatgctggtctatgaaaggatgatggaatggatgatggtctatggaaggatgatggaatggatgatggtctgtgggaggatgatggaatggatgatggtctgtgcctaaagcacagatgttcttgtgatgcaggtcgacacg

SEQ ID NO: 513325 - DNA, 649 bp, Homo sapiens
  misc_feature (273)..(273): n is a, c, g, or t
tgaagaggaagaagtcaagccgatcttgcagaaattgcaggaactcgtggatcagctctactcatttcgagactgctatttcgagacacatagtgttgaggatgctgggaggaagcaacaggatgtgcggaaggagatggagaaaaccctacagcagatggaagaagtagtgggttctgtccagggcaaggcacaagttctaatgctaactgggaaagcactaaatgtgactcctgactatagcccctaagggctggaggagccttctgttcnaaaggcttgtgaagctgggagcccgagctgggggaagcctgggaaccagctgggtgaggtgtactggaaaaaaggggatgttgcagcttgccacaactgcttctcaggagccctcaaccattggcaggaaccaagtctcctttgccaaaacttggccaatggtggctccggccggtgggggccggccctcggagaatgaccttctccccacctaggtctagtggcacggtgtcgcgacaggctaagtgggcgtgtccagatggatgtccatgatggccgctcctggtatattcttggggaatttcatatctttccctttacttctctactggccagaaccctaagatctcccagcaagccctcagtgctatgccca

SEQ ID NO: 513326 - DNA, 1114 bp, Homo sapiens
tacatgttgttagaagcacgcggtcagctacgcgactgcatggcagctaaaggatgtggcgagagatcattcatgctggagcgcgcatgagttgtgatgtgagatcccggtagggtcgaacacctaggggacaaattccacagccatcgtacgattaggtgggcttaagtcccttttgctctccatcctcagggttgtcattgtgaaaattgcccatatggcgatgtcgtgaccggggttgttcattgacgaccatccggactgctcttagtagaacacacgctgccagtcacaacaccgcagatgcatatttctcttggtagtgggggaatccatggattggaggcgacaaataccatgcacggagtctagggggtataactgcagactggaatgagttctctatgctgacgaatcctgcaaatggagtccagtacgtaggaccttctcaaaaactcctgttgtaaggtgtctagatgtgatctgtcagcattggatacaaggctctatgtgtgggagcttggggcacaaagctatgtcccgagcccgataagttatgtttcatgtgaacctgggtgtacaatctgattcactccagttcgatatacgctcccggtaccagactggataacgacatcattacccttcttttatactgtgatcaccgcagtggtaagggtatcactttcctgcgacctatttgaagatcatcagtgaaaatgagctaatatgtgcgtattgtcccacctgtattggcagccgtcagggtaactgcatgggctgaagctggagcaagctgaaaagtattctgacaatgcatggggccaaggttacgggctaatgtggattgccctcaggccttccatggagaaggggtaacatgcgaatagagttgtagacattttgagcctgccgggagcgaggggttattggaaaccggggaacatacaccctttcctgcggccaagtttcaggtgggccccatgtgggcctatgttgacacgttgttctttcgatatgtgccccacacggcgatataacacagaaaaccgggaaggcggtcgcaaaagggcaaatgattacctgcgggaaaagcccgcagctttcctctcag

SEQ ID NO: 513327 - DNA, 352 bp, Homo sapiens
gaggaccccttgggccttacctgttgctctgttagctatcgaggatctcgtcttcaatttctcctactcctgggccatgcgtgtatggctctgaagagagggattgacatcactgctgtgggaagcttcgagtaagtgagccacaaacccaagtttcagttctcccttgtgtgttctcctttctccttgccctctcccactttacatacatcttttccttcctaatacttttcccaaatgactataggtcccacactagatacaggaagcagcagcttcccagaaattgtctgtgaatccccctttgaataagccctatgttcgtatccatttcctaaagttctcctttatt

SEQ ID NO: 513328 - DNA, 1195 bp, Homo sapiens
  misc_feature (669)..(669): n is a, c, g, or t
aagtttcactcaacatttcaatactattggactccttgctttgtaaatcgaagtaaggagaaacgtgttcgcagattggactcagtattacatacaattgtaccaatgccaacacactcaggcagccgctatgcggtccttaacttcacactaagacagactagacccgcatcgaaacattcgaaactatttaggacaggaatagcgggaacggaggactatgcaagagaggccgcacataatccccgctaaaggcattgcggcagcatgacttatttttcacaagtattgcgtcaatccaaattataacgtatcagttcgtttcattttgctgttctagatataagagcaatggttttgcagattggctaagatatcctggtgctagtggctaagtaaagaataccccgttatatttatgtcacatatggctgtatgcaaggaaatcatgtatctacaagtggaccgcgggtattcatgaaggagaatctggggcacttttaatcagcttggccaagcggttaattacaatccttcattggcagatttggaaaggcccccataacatgtgttcggcacacagtggtgttagcctcgaaggaatgaatttggacgtgtccccgattacaccattgggggatacagttgccaagtgctcccacaagtgtnaacaatacgataaccctggtgcgtaaccccctttttgaccaatatcagttctaagggcccaacaacacttccactcccaaggtctctgtgaacgccactttgcgatcgaccggcagcggaaaacacaaggtgggcacagcttatcacgttgtacgacaacggggctatgtacatatcgttgtacaaacattcgactgttggcgctttgtctcagtcccacatcccaaggtggtaacccacgaggaagaaagcaagtgaactgcacccgttatgtgaagtgtttgtgtgctagtaccacaaagaaagtcgataaagcgcataagttgagtgtcgcgcatggcacattttggacatcatggggggaaacgcatagcgtcccttaccaacgtgtggaaaacctctacaggcacatattatggcgaactatacgcgtactggtggagtcccactttatcccacgatgcgatgatgtgtgtatttatcacccaacaatgaaagttctgaacaccatatgggatcagtcatc

SEQ ID NO: 513329 - DNA, 128 bp, Homo sapiens
tagggccgcgcccgcccgagcccgggccccgcccgcgccgcgggccccggccgcgccgcgcgccgaggccggccccgcccgcgccggcgaccgcgacgccgccggcggacgccccacggcggcagccg

SEQ ID NO: 513330 - DNA, 242 bp, Homo sapiens
agaagtcaatagcacctcttgattcataaatctcactctggccaggcacagtggctcatgcctgtaatcgcagcactttgggaggctgaatgtaccctaagatgaaagacaggaaaagcatcgatttaaaatgacggctatgttgcccaagccgatctccaactcctgttctcaagtgatcctcccacctcagcctcctgaatagctgggactatataattcgatttacttctttacctatc

SEQ ID NO: 513331 - DNA, 910 bp, Homo sapiens
  misc_feature (51)..(51): n is a, c, g, or t
  misc_feature (73)..(73): n is a, c, g, or t
  misc_feature (84)..(84): n is a, c, g, or t
  misc_feature (87)..(88): n is a, c, g, or t
  misc_feature (98)..(98): n is a, c, g, or t
  misc_feature (126)..(126): n is a, c, g, or t
  misc_feature (128)..(129): n is a, c, g, or t
  misc_feature (134)..(134): n is a, c, g, or t
  misc_feature (157)..(157): n is a, c, g, or t
  misc_feature (161)..(162): n is a, c, g, or t
  misc_feature (164)..(164): n is a, c, g, or t
  misc_feature (167)..(167): n is a, c, g, or t
  misc_feature (177)..(178): n is a, c, g, or t
  misc_feature (182)..(182): n is a, c, g, or t
  misc_feature (187)..(188): n is a, c, g, or t
  misc_feature (196)..(198): n is a, c, g, or t
  misc_feature (200)..(200): n is a, c, g, or t
  misc_feature (202)..(202): n is a, c, g, or t
  misc_feature (210)..(211): n is a, c, g, or t
  misc_feature (235)..(235): n is a, c, g, or t
  misc_feature (239)..(239): n is a, c, g, or t
  misc_feature (258)..(258): n is a, c, g, or t
  misc_feature (260)..(260): n is a, c, g, or t
  misc_feature (271)..(271): n is a, c, g, or t
  misc_feature (281)..(281): n is a, c, g, or t
  misc_feature (284)..(284): n is a, c, g, or t
  misc_feature (288)..(288): n is a, c, g, or t
  misc_feature (293)..(293): n is a, c, g, or t
  misc_feature (301)..(301): n is a, c, g, or t
  misc_feature (311)..(311): n is a, c, g, or t
  misc_feature (313)..(314): n is a, c, g, or t
  misc_feature (320)..(322): n is a, c, g, or t
  misc_feature (326)..(326): n is a, c, g, or t
  misc_feature (330)..(331): n is a, c, g, or t
  misc_feature (335)..(335): n is a, c, g, or t
  misc_feature (337)..(337): n is a, c, g, or t
  misc_feature (348)..(348): n is a, c, g, or t
  misc_feature (355)..(355): n is a, c, g, or t
  misc_feature (376)..(376): n is a, c, g, or t
  misc_feature (380)..(380): n is a, c, g, or t
  misc_feature (401)..(401): n is a, c, g, or t
  misc_feature (411)..(411): n is a, c, g, or t
  misc_feature (413)..(413): n is a, c, g, or t
  misc_feature (415)..(415): n is a, c, g, or t
  misc_feature (422)..(423): n is a, c, g, or t
  misc_feature (425)..(425): n is a, c, g, or t
  misc_feature (436)..(436): n is a, c, g, or t
  misc_feature (446)..(446): n is a, c, g, or t
  misc_feature (476)..(476): n is a, c, g, or t
  misc_feature (485)..(485): n is a, c, g, or t
  misc_feature (500)..(500): n is a, c, g, or t
  misc_feature (502)..(502): n is a, c, g, or t
  misc_feature (507)..(507): n is a, c, g, or t
  misc_feature (513)..(514): n is a, c, g, or t
  misc_feature (522)..(522): n is a, c, g, or t
  misc_feature (524)..(524): n is a, c, g, or t
  misc_feature (527)..(527): n is a, c, g, or t
  misc_feature (532)..(535): n is a, c, g, or t
  misc_feature (547)..(547): n is a, c, g, or t
  misc_feature (582)..(582): n is a, c, g, or t
  misc_feature (604)..(605): n is a, c, g, or t
  misc_feature (613)..(613): n is a, c, g, or t
  misc_feature (618)..(618): n is a, c, g, or t
  misc_feature (650)..(652): n is a, c, g, or t
  misc_feature (784)..(784): n is a, c, g, or t
  misc_feature (871)..(871): n is a, c, g, or t
gagtatgcaattatttagtatacactacaaaatcctcaattttagaaagtntccaactgtctaaatatcagangaatgcaatanttnngcacaaagangaaccatttcctatattatagcaaaatngnnatctncccgtattctaatattggggggngggnnanagnggaatattanngggnctacnngggggggnnngngngacctcannggctttactattttcatattttangacncatgatttatcctattttngnagcctggttcntacgttaaanganggtnagtgnggacggcngggggggttngnngggggnnnatcnaggnncaancnagaactatctnggtcacngacatttctattccttttgcnggtnggcacacagtgaatgcccggntggataaatngntngcattannangggtgtcttcntgtgtaaatngggggtaataccacctaccacacagaatgnggggggggngggaacaagtaggtncnggggngctttnnacgggtcngngtnatttnnnnaatctgtgttantaggtttgttattttacacaaaatatcaaatttcnaatgacctccagggcgggggtnngggggggnagttnattgggggggatgttttccttttaacaaagtnnncattaacacatttgttcagtgttcatttgggagggtgggaatgttgtcttatagctcattcaataaaacaccataattcaggtcaaatgccaatgtccttgtacctcctttgctaagtcaatataaggaggnatctgttttgtttcaagacaaaagcatttgattataaaaaggtctacagtttatagttcttactgtattccaattcaacagcatttnaccaaaggactttacagctatttcttttgtagcatatat

SEQ ID NO: 513332 - DNA, 408 bp, Homo sapiens
agacagacacgagtggtaagtgtgagggacagatcatgcatcgggagtacttacaaagtaacacaccccacccccaccctcaataaaaacagaagaaaaagccccatcactaaacaccaaacagcaacattatcaatacaacactatctttgctgcccaccagtgccttatcagaaagaggaggcctgtgagaagtggaaagagccagggtgagagggaagatttgcacttcagtctagtttccaatttccatttctcttacaggaagtcttcagtcatctgatgcctgacatcgagctctgagcagaaaccgagtatgtggtggccacgactggggtgccattgttggctgagtagccttgcctcaatgtttcaaaatatgatgcctgcacgggttagtgatactgc

SEQ ID NO: 513333 - DNA, 339 bp, Homo sapiens
cgccgcctcgaagcgctccggggcgccccccgacagggaaaaccgcctcggccccccacccgggcgctcggcaggtcagggcggcccgtcccgggccccggagccgcctccaattcgggcttagccctacaccggctggatcaccagcgctccgcagagatcctcaggggcaaggcgtgcccatgaagaaggctacacgttggagagcatgagagatccgccggcagccacggaggcatgggtaactggccatgagcaaggaggtgcagacctcatcgaaagcccagggcaaatgaccgactgagctgctggtgctgtacagtggagaggatgatgagc

SEQ ID NO: 513334 - DNA, 409 bp, Homo sapiens
ttttgagatgggaggcttgctcctttgcccaggctggagggcactggcgcagtctcggctcactgcattccagtctggtgacagagctagaatccatctcgaaaataaagaacgctttataggccaggcacagtggctcatgcctataatcccagaactttgggaggctgaggaatgaagattgcttgaggtcaggaatttgggaccagcctggccaacatggcaaaaccccatctctactaaaaatacaaaaattagccgggcaacgtggcgggcacctgtaatcccagctacttggaaggctgaggcaagagaatcgcttgaacccgcgaggcagaaattgcagtgagctgagattgtgccgctgcactccagcctgggccacagagcaagactccgtctcaaaaaa

SEQ ID NO: 513335 - DNA, 216 bp, Homo sapiens
  misc_feature (81)..(81): n is a, c, g, or t
tgtttcccagaataatggtatggaagtttctgttgtcttgtaataaaggcttttaatttcgattttattttaggaattagnatccgatagcaatcagcatgtcaaagcagctgagccttctgtaatcccagcgctttgagaggccaaggtaagaggattgcatgaacccaggagttcaagaccagccctggcaatgtagtaagaacctgtctctgc

SEQ ID NO: 513336 - DNA, 330 bp, Homo sapiens
cttttggggtctttgctcaggtatgtcaagggaacccaggaccagatgcataaagtgatttaacaatctaattgtatcacaaatgtataaaacaaccacagcgatggggtggatgaaattgttgtggacctaagtaattttggaaatagagtctataaaattaaaggcaaaagaaactgtatataagtactgcactctagttgaaaagttgtttcctgtgggatatgggttaacaattatgatactgctgtacaggtatgctgggactgaacaaataaatgcaaagatggtggatggtggaagccaggtttttttactcttagaggggag

SEQ ID NO: 513337 - DNA, 118 bp, Homo sapiens
  misc_feature (45)..(45): n is a, c, g, or t
  misc_feature (48)..(48): n is a, c, g, or t
  misc_feature (84)..(84): n is a, c, g, or t
tcatcaaggttgtggaggagctaactcggatccattagccaaggnagnggggccctttgctgaccctccccaaaggctttgccntgctgccctccccctcctctccaccatcgtcttc

SEQ ID NO: 513338 - DNA, 320 bp, Homo sapiens
taacacgagatgttgtatttaatcttatggccacgttcggtggcatcacgctctgtcatcccacgcactttgtggaggccgaggcaggttgatcacgatggtccggagatcgagaccatcctggctaacacggtgaaaccctgtctctactataaatacaaataacgatattagcctggtgatggtggagtgcgcctgtattcacatctatttcccgtgtttaagaaagagaatggcgtgaaccctggaggcggagcttgcggtgagctgagatcaggccactgcactctagcctgggcgacaaagggagactctgtctc

SEQ ID NO: 513339 - DNA, 850 bp, Homo sapiens
tggctgtggtgcctgagcggctggagcccaggtgccagcccgtggccgataagaaatggtggcggtggcggcggcggcgcagtctggacgggatcgtgggctggcggctcctcgccctgtaccctctgctcccccggccaggcccgggcgcgaatctggaggctgcggcgaagggaaggagtgagcatggctgatgaccccgccgaccgccaccgctggtgccgaaagttgcagcgaggagccggcgaggggcggggagtggcggccggaggagccgcgccgcgctcccgccgggggcacggacctgagagggctgaggcgtgggccgacgccgggcctcccccgccggggcagtcggaggcccgactcgcctggtggcctgccccttcttcctgctgtaccccggcgatggaggcgccggcttcggagtgcgcccggctgcctgcagcagcagcgctccttggaggaaccccggccgtcccccgggttcagcgggttgccccttcctggctgctgaggctacccgagcggcggcgggggcagcagcgggcagcgggaagcaccatcctaattatctccatggctaatgaacgcattgaagcctcatgaacatggccaagcttgagtatcaaggggctcgaattgactcaggttcttgaaaccttggaggagggaactcttggaacgtcgtgaccttatggcaacccttcttccagaggcaagatgcattatgaggtgggttgaactgggaagaagacttgatcctgaaaagcgatggggtttgaaaaagcttaagaaaaaagagttttaggggtcggggaagaagagagagttaagatcacttacctgg

SEQ ID NO: 513340 - DNA, 276 bp, Homo sapiens
gagaaggtcgctgtcaagatggagtttccaacccagtaaatccaagggccagaccgtgacctcataaaggcattttttttctttctgtccaagactgtggcaaaaggtattccaaggcggcatttcaaatttcttgccccttacttgttggaattcttttggcttgtagggggaagcattgagggggtccacgacccctttgtaaattcacatatttttaattctttcaagggctaaaagagaggggctgtacctcccggttttgaaaccctcttc

SEQ ID NO: 513341 - DNA, 127 bp, Homo sapiens
  misc_feature (17)..(17): n is a, c, g, or t
  misc_feature (39)..(39): n is a, c, g, or t
  misc_feature (48)..(48): n is a, c, g, or t
  misc_feature (83)..(83): n is a, c, g, or t
tggagtaaatacatttnttgatacccatttcatatatanttcatatgnccataatctataaatttaaaaagcatttttccttntggatgtcaccatggtccatgtaaatactcaagccagaattcat

SEQ ID NO: 513342 - DNA, 286 bp, Homo sapiens
  misc_feature (7)..(7): n is a, c, g, or t
  misc_feature (142)..(142): n is a, c, g, or t
tggtttngaactcatgacccccccctgccttggcctcccaaagttttgggattacaggggtgagcccccggttccggcccaaagcatgtctttattattggtttttccttccttgaaccaattccctgagccctaccttatnctgggttttggggaaataaaaatgaaacctttttcccctgttaaggggcccccaaaatttttttgttttttttttttgtttgtttttgagaaaaagtcccgctttgccccccagcctggggggcagagcaagacgcccttttta

SEQ ID NO: 513343 - DNA, 606 bp, Homo sapiens
accgcggcccttcccgatgcctccccggcatagccttcccccgggcccctaagcagccccccaatgggggccccaaattgctgcccccacatcacggggaaacaaaagccccggggaagaacccacctttggcccgaaaccccggagaaagacagggacacacacacaccgtgggcacaaataagcgactccgcaccccctcttggacaagaagcaatggacaggggaccatccaacattgtctcagaaggcagtgtattgatgaagccgcgccccacggaggcaggttgcaagggggcccccctcacacagaggcaagtcccaaccgcgactaatcagatgggaatttaatggagggaaaaacacaggacaagaaaaaacccggggggcccaaaaaccggggaaaacacaaggtgagagcgcacccaacagggggcttgacacggaaccccagggcaaaattggggcaaacaagggacagcgaggaaaaatgtcggtaagcagacctctgggcgcgacgaggacaagtgcccgcggcacggatacccgggtacaaaggggagcgtcattcgcgcaaaaaattctttcacccccgcaaacaataca

SEQ ID NO: 513344 - DNA, 316 bp, Homo sapiens
gcatccacaccatggaatattgctcagcaacaaacaggaatgaactatcaacacacagcaacttggatgactctccaaggaattatgctggttatttgttgttgttttgagacagggtctcactctgtggcccagactggcatgtagtggcgtgatcacagttcactgcagcctcacctctaacttccaatctcaagtgatcctcccacctcagctacttgggaggctgaggtaggaggatagcttgggcccaggaggttgaggctacagtgagctgtgatcatgccactgcactccagcctggatgaccctgtct

SEQ ID NO: 513345 - DNA, 256 bp, Homo sapiens
cacgggccatggtgactttctttgcataagttccaggatgttatgcactaccgaggagagatgatcctgctgtgggggattgccagatggtcgtgcagtgcctaaaacccagtcctccttttcctggaacagttatgtcccgtccaagaagaaagacagtgacatcggtttggtcttacacattttccaccatttaagcagggagactggcaaacagctgtatgacagcgagaccccgtccagccaggcgggcagt

SEQ ID NO: 513346 - DNA, 269 bp, Homo sapiens
cgtcgactatcagaagtttcacaggcttcatgtgtatccacaaacacccaccccattgagaaggcctagaaaacctggccctccccaaacctttattgaccgcttgtgaatgatcccagggtgtgtctgacccacagctcctcctggagggagagaaaagtctctcctaggtatttggttatcaacctcaaccacttgctgagccttcctcaagaccaggcaccttggcagagatttctgggttgtcaggcggaactcgagcgtcgacg

SEQ ID NO: 513347 - DNA, 138 bp, Homo sapiens
aagcgcggcccctgcttagggctacatcgggtctcatacctgccacgacactagtagtacctgccaagaactagtgtacctgcgcaagacactaagtagtcctgccaagcactaatagtacctgccaagcactaagta

SEQ ID NO: 513348 - DNA, 1144 bp, Homo sapiens
ggcgggccaccaggctggcggagctgcaggagcagctgaaggccgtgcacgagcagctggccgccctgtctcaggccccgagtaaacaaaccaacagcaagcaagcaaggcagcacagcacaggcagcacaggcagcacagcacagcacagcacaggcacacaggcagcacaggcagcaaggcagcaagctacgacaagtgcacaggccgcaggcaagcagcacagcacaggcccaaggtgtgctccgccatgaccaagcaggctcagcacgcaagacaggctctctgccacagaaggccaacagtcacgaccacaggaccggcagaccagctgaagcaaaggcggcacagcaggcatcatgccatcctacgacatcagaggcacgaggaggagggcctgccacatgagctacgatgaacagcgccagcttagcctggacatcaaccggctgccggggagcaagctgggccgggtagtgcacatcatccaatctcggagagccctcgctcagggactccaacccaggacgagatagcacacttgactttgcgactctgaaacccaccacttgcgggaactaggagagactatgtcaagtcatttgtttccagcacaagaaaagggcacaccggacatcacagcaagacgcgcaaggcacacacggcaccccgatcgccaagcagcgctcactcaggacaaccacccaggcagctgaacaaacacctgcggggagtccagcgccaagagcaccaccaccagcaccccgccggacagaaaaaagcgcaggacaccacaaccacaggaaggccagacccaggctcacgcacaagcaaaaccaccgaaattagagaaacgcacgacagaggaccaagacgaaacgcgaagacccgacagaccggcacggcacccaccaacagacagacacaaacgcaaactcagaacccccagaccacagaaaacagacccggagcccacagacacacgagcacgagaaccgccaagaaccgaagaccaacagtggcaacacaggcgcccccaacccccgacacccgcgcgacgcccgaacacccccgcaaccacacaccccacccacccgacaccacacacagcgcacaaggcggcacgacccacgaacggacaccc

SEQ ID NO: 513349 - DNA, 254 bp, Homo sapiens
  misc_feature (80)..(80): n is a, c, g, or t
  misc_feature (171)..(171): n is a, c, g, or t
ttctgcccctgcccttcctcacactgacactttgttcccacatggggtggggagcagagttcccgccccgtggagattanctgccagcgggggctgctacatccattgccaccatggggcatctggcggggcgggggtttgccggccttctgcaaggcccctggagcatcntccccaggctttttataccttacaatgtaacttttttattttattttactctatgattattcaggaatattatctctcagata

SEQ ID NO: 513350 - DNA, 357 bp, Homo sapiens
gatttagtctgagttactttcatatctacatcacattaagataaagggatccatccagtgagccgtctccactagaggctgaattccagagacttccttcatataggagctggaggacacagcacattggaaatcaagaagaaaataaaagtaaaaacaggaatttctaatgtcatcccatatgactattacagagtgccacttaaacatgagctggaaatgagtaaagagagtgagcatgattcagatgaatcctctgatgatgacagtgattcaaaggaaccaagcaaatacatcaatgcatcttttatgttgagctactggaaacctgaagtgatgattgctgctcagggacca

SEQ ID NO: 513351 - DNA, 194 bp, Homo sapiens
cagacatagactggctgaatgtataaacagcacgactcatttatctgtaccctataagaaacacacttcctattctaaagtaaacacatagctctaaacatagaatcaagatcttccatgcgtaatggaaaccaaaaaaagagcagtagtagctctactaatatcagacaaaatagacttcaagacacccactg

SEQ ID NO: 513352 - DNA, 758 bp, Homo sapiens
  misc_feature (28)..(28): n is a, c, g, or t
  misc_feature (70)..(70): n is a, c, g, or t
  misc_feature (73)..(73): n is a, c, g, or t
  misc_feature (75)..(75): n is a, c, g, or t
  misc_feature (87)..(87): n is a, c, g, or t
  misc_feature (104)..(105): n is a, c, g, or t
  misc_feature (114)..(114): n is a, c, g, or t
  misc_feature (131)..(131): n is a, c, g, or t
  misc_feature (166)..(166): n is a, c, g, or t
  misc_feature (170)..(170): n is a, c, g, or t
  misc_feature (318)..(320): n is a, c, g, or t
  misc_feature (333)..(333): n is a, c, g, or t
  misc_feature (344)..(344): n is a, c, g, or t
  misc_feature (348)..(348): n is a, c, g, or t
  misc_feature (388)..(388): n is a, c, g, or t
  misc_feature (390)..(390): n is a, c, g, or t
  misc_feature (520)..(520): n is a, c, g, or t
  misc_feature (527)..(527): n is a, c, g, or t
  misc_feature (556)..(560): n is a, c, g, or t
  misc_feature (566)..(566): n is a, c, g, or t
  misc_feature (646)..(646): n is a, c, g, or t
  misc_feature (683)..(683): n is a, c, g, or t
  misc_feature (713)..(713): n is a, c, g, or t
agggggcacagaacacaggccccctgcntggcaggacccgacttagttacaggcccctgggaggggcganctntnaggggtcgaggncaggggggaggggggcnngcacctgangcccctgggggcccgcngggtcatggaactgtgtgtgtggagggtggggggngggngcaccacgggccatttctccccaaggctaagggcgggggagcaagtaaagctgaggagagggcttcatgggacagggttcccatcccctgctgggagggtgttcctggataccccacaaggcactacagatgcagactgtaggcgagnnnccccatctttggnccccgattgcntggntctccccctgccccagctcccactgtggtttggcgggggngnagagaaggggctgggccccccactccctcagcagacaccagccaggaaccgacccggcgggccgaggctaggaaggaccctctcccgctgctctgggctcctggggtcctcttggctcggcctccccctnttttagngctggctgttgcgaataaataaataaatnnnnncgtggncgccccgcccctacagctgggtgtcctcctcctccagggagcggttgagtccggggatgacttgagcagcgcggcggaantgcggtacttggttttgcgcagccggggcgcataggnctgctcgcgagctcagtccagagcgcgccngcgccgcccgcctccgccccgccaggcccgcgcacgcacactggg

SEQ ID NO: 513353 - DNA, 276 bp, Homo sapiens
  misc_feature (68)..(69): n is a, c, g, or t
  misc_feature (74)..(74): n is a, c, g, or t
  misc_feature (191)..(191): n is a, c, g, or t
tcaggggcatccaatattcttcgatgcacattatgagtacggtcaaatactcataaattcccggggcnnccggngcgccggcggctcaggagcgcgaagggactgactgaccgaccgacggaccgcagcggcaggagcagaacagcctcagccgaagtaggcgggcggtggaggcgctgccgcggccccgntacgtcacaatgcggcccggccgcgggcgccgctccccgggccccccaacgggcgcgcgcgggcgggggcagcctgggcggccgc

SEQ ID NO: 513354 - DNA, 166 bp, Homo sapiens
ctaccggcttgccgctactactcccattgcccctgctcctgggctttccccttcagtcagcgtatgtcactccgtcagtattgattcatcacaggagtcaggagtcacagtctgtatgtccaccctgcgatgttggctagacatacgtttcaaaagttcctcagtc

SEQ ID NO: 513355 - DNA, 395 bp, Homo sapiens
  misc_feature (182)..(182): n is a, c, g, or t
  misc_feature (357)..(357): n is a, c, g, or t
  misc_feature (379)..(379): n is a, c, g, or t
tgagtcacctcgggtcccctttaatgattctcccctctgaaaacaattaaaatgcctagataaaatagccttgcccttgacctaaaaattcaaatagcctacacccagtatattcttcccccacatttctagactggaaggaaaactgcccagtgtgaacttggagctaagtagaaatgggnaaaaaaaaaaactactttgaaaatcttctcatgtaggtcgtgacctgaattcatatacctacatggtcaaaaaattctcaagccaagaatttaactaatattggtcccaagctagtaatatctccaggcacctgacaaaaacaaatgcaaattctttcaatccaggcttcaattnccacagataaatttattctagnaaatacaaacacaata

SEQ ID NO: 513356 - DNA, 989 bp, Homo sapiens
  misc_feature (987)..(987): n is a, c, g, or t
  misc_feature (989)..(989): n is a, c, g, or t
taaacccctattttgccaggaattcttagggaataggttccagcagttcaggctccttcccatgggttctcaaaaagggggtcttttcggggtggagcaggtgggcgctttatttgaccccaagggaacctattctactatagagttccttttactattatgtctggatcaatttctcctatccacacgtttcaggagaagctaatctccggctctaaagatgcggcttaactgctggctcaatacgcacattaatcctctggcgaaaagaatcttggccctaaaactggtgtggtgtcaaacaacatttggccaacagcggtggtgcggtaacattggccagcactcttccagtttggccattggtacccactggggggggcaatccccttttggaacaagaaccccatctcccttgagggtcgtacaaaaatacaccctttctaagagatcagcaataatattgtggccaagagaaacaccccatgtttccaaaagggctaaaaaccaatattatgggggacgcctcccctcattccccctgggatgttacgacaatgggagaacttacctgggacagatggcggaaaggctccgggctttggcccagatggtcaagcgaagggaaccaacactttgcagggatacaacagcgcgcggtcaaacacaatcacagcgtggaggaggcttgcccaacacactgtgtagcgtattgggcccatgtgcttgtaccacggtggttctcccccgtgtcggagtttctgtacacgctgcgcacattgggaaccaaagacagccggtgaaagtacgatgctccattgcagacgacatgggtgcacctgtggtatgggaatcggataacaaacttgacagctgatacaagcagtcgaaacgcagcagaactatggtgtgcaccagatgagctattcccgaagaagaaggcagcgatacgcaccaatgtctctctgtagattatacagatcatantn

SEQ ID NO: 513357 - DNA, 282 bp, Homo sapiens
  misc_feature (223)..(223): n is a, c, g, or t
ctcggaccgacgatatgctggtggcaggcatgaggacagcagtggtcgtatcaactatgagcgttgtagaggcatatcctgtcggggtgacgggcccatggggcggagctcgtccgcatggtgctgaatggctgaggaccttaccacagttctccccatgagtccgtgacctttaccctgatgtgaaattttagtatactacgcctaacagtttcacctaggnctttactttgtctcagacaactattccctatctcgttctctatctctggtggggtatcc

SEQ ID NO: 513358 - DNA, 501 bp, Homo sapiens
tgctaaaaacagaatcttacaaatgtgatagctatatatccaaatgaggtggtctagtacaagcatttctgaaaaaatttttgaatgacaaaattttatcctaagcgatatgttttccaagtgaatataattctagttaaacacaacattgcaagtcaggtgtgcacattttactaacaaacatatatcaatgtgatttcagggccttctccagaagcaaaaggagggtggaaagcagtctcctgcctttagctgaaaaaaaagaaaagagtttggggtcttcatttaaaaaggtagaaaaccaaacccctcacattgggtgggggtcttccaaataataaaaagggctcacttggctcaactgaatttctaaaatagcctagaattaacttaatttttttaaaagctcattaaaaacctggatacctaaggaagtaaaaaagccggcccttggcctattccaataaaacagaaacctctttttgaaaaaacttagtacta

SEQ ID NO: 513359 - DNA, 636 bp, Homo sapiens
aagagagacggtacgagcgaacgtatttgtgataattgctcaaaacacacccaaacagggggggaggggatgtgtttttaagagaacaacccccgcccacaccacatccaaatgggggatgagctttagaagcgatctgtaaattatatataccaaaagctcatatgatttcaacgtgcgacgtatatacgatgaccgcagatcgatgaagattagaaagggattctaataccataaatacgatgagaaggggggtaaagagataaatagctgcggtaaatgaaacagcaaatatggcatgacgggccatagggattatcctacgtgggatatatggtatgtgcgcgataagtaggtggttcattattacacatcagtgagtgaccgaagaatacaacaagatctattgcatctatataagtggcgagaggattggtagagaacaatatgcaaatttatagaactatgtggtgtgagtgagtattatatcgtgatgattttgttacgactatggtacgagtgcggaggatacaatgaattatggcgaaatggtttatatcggggtgttagtggtgaagtatgaagagctgccgagcgggaagtgtagatatggttgttgatgcgagcagagggcgg

SEQ ID NO: 513360 - DNA, 354 bp, Homo sapiens
  misc_feature (308)..(308): n is a, c, g, or t
  misc_feature (342)..(342): n is a, c, g, or t
ccccctgagggcccaatccattaattggcctctctctctcacacctcgcgcggtgatatataagagagagtgttctcacgcgcgaaataaactctctgggggttttttataagagggaagactcttgcccccaatttggggattctctttcccaagaaaattctggggataccacgaatgatggtggcctccttaattgggccaagggagttaaagggccggtttttaaacgcccattccccttatattctcggtcaccggtgggtgggttggacctgtttcctgaaaaaaaaaaaattatagtaaantaactcggcatatgtcgtcggagttatgcacccntcgatggtgcgt

SEQ ID NO: 513361 - DNA, 529 bp, Homo sapiens
taaggacccaggaaagtctaactgtagagtcctgctatgtcaagcactctgtaggactggagtgtggtagaaactgtgtcccagccctcatcatgattctcttcataactcaaacatctttcactccttaatatttcaattcacctcccactgtgaacacacagacaatgccctggcctcatggagttacattctagagggtgagggagttcaacacaaataagatgcttgaaattggcaagtgtgatgaagaacagaatagggcagtggggtagagtgtggttaggtagggtgtggtggacatcacataagtgtggtcagcaaaggcctctcaagagacagttgagacttgaatgacgaggatgagtcagatgaaagccaggggcagaggtgaggggagcatcttgggcagaggtgacagtgttaaagggagaggccacgttcagtacccagaacaaaaagctgcacacactgcttgctgagcaagagagcactgctcttgtagggcacggtctctcggataaagaaa

SEQ ID NO: 513362 - DNA, 114 bp, Homo sapiens
accaatcacaatttcaagaagaaaattacaacacactcatagagcacacatagaagtccagttcactttatggcaacaggtcagtatctgctgatcagtgacaggcagtgaact

SEQ ID NO: 513363 - DNA, 128 bp, Homo sapiens
cttgcggggtctattgatgatggtgacactccagtaagcagctgctctccgggagcttgaagaagaaactggctactaaggggacattgccgatatgttctccagcggtcgtgtattagacccgcgag

SEQ ID NO: 513364 - DNA, 352 bp, Homo sapiens
cctataatcccagcactttgggaggccgaggcaggcggatcacaaggtcaggaattcgagaccagcctgaccaacatggtgaaaccccatctctactaaaaatacaacaattagccaggcatggtggtgcatgcctgtaatcccagctactcagaggctgaggcaggagaattgcttgaacctgggaggcagagggtgcagtgagccgagatcgtgccattgcactccagcctgggcgacattctgtctcaaaaaaaaaaaagaagcttgtctaattgacttgcctaaaaaatgcagtgactccaaacaacatttgacctgtcttcctcaataaaagtcagtgttctcctga

SEQ ID NO: 513365 - DNA, 304 bp, Homo sapiens
gctcgaccccaggggcggcgctgtgcaatcagggcctgcgctacgggttcgaccagaaaggcgaccgcacattcgcctggcacaatgccgtcagcgtcctggccgaacgcctgcatccgggcccgggaggaaaaggcggtcaactgcgagaaccccaggaacagcgccggtggagcacggtgttcaatgccatgacaatcgcgttatccgcctgtccactgttgatcagggcttgagcatatcgattgcataggggaacgaactgcaggcggtatcgaccgatagcgccgggccgccgtcgacg

SEQ ID NO: 513366 - DNA, 910 bp, Homo sapiens
  misc_feature (2)..(2): n is a, c, g, or t
  misc_feature (108)..(108): n is a, c, g, or t
  misc_feature (110)..(110): n is a, c, g, or t
  misc_feature (117)..(117): n is a, c, g, or t
  misc_feature (120)..(120): n is a, c, g, or t
  misc_feature (151)..(151): n is a, c, g, or t
  misc_feature (175)..(175): n is a, c, g, or t
  misc_feature (182)..(183): n is a, c, g, or t
  misc_feature (185)..(185): n is a, c, g, or t
  misc_feature (190)..(191): n is a, c, g, or t
  misc_feature (195)..(195): n is a, c, g, or t
  misc_feature (200)..(200): n is a, c, g, or t
  misc_feature (206)..(206): n is a, c, g, or t
  misc_feature (210)..(210): n is a, c, g, or t
  misc_feature (212)..(212): n is a, c, g, or t
  misc_feature (219)..(219): n is a, c, g, or t
  misc_feature (229)..(229): n is a, c, g, or t
  misc_feature (234)..(234): n is a, c, g, or t
  misc_feature (236)..(236): n is a, c, g, or t
  misc_feature (242)..(243): n is a, c, g, or t
  misc_feature (253)..(253): n is a, c, g, or t
  misc_feature (333)..(333): n is a, c, g, or t
  misc_feature (353)..(353): n is a, c, g, or t
  misc_feature (358)..(358): n is a, c, g, or t
  misc_feature (361)..(362): n is a, c, g, or t
  misc_feature (365)..(365): n is a, c, g, or t
  misc_feature (367)..(368): n is a, c, g, or t
  misc_feature (371)..(371): n is a, c, g, or t
  misc_feature (381)..(382): n is a, c, g, or t
  misc_feature (386)..(387): n is a, c, g, or t
  misc_feature (412)..(412): n is a, c, g, or t
  misc_feature (564)..(564): n is a, c, g, or t
  misc_feature (856)..(856): n is a, c, g, or t
  misc_feature (862)..(862): n is a, c, g, or t
  misc_feature (895)..(895): n is a, c, g, or t
tnttgtcacatttcctgctacacagaggtgccgatcatctccacttcttcgcgttcggtgatgctgcattaccgctcagacctgctccagatgctggacacactgttntntctagcnccntgtatttgggttttgcagagcagaagcagtngttgggagtggaaatctcacacanatctaanngngaatnnttantgccnaaccangggngntatcatngatatccacnacagngncatccnnctgtatggancctacctccgcatccacgcgcaacttcactgggctcagatacctgctatacaacttccccgatgacctcgcgctttatangtgttgccagcaatttcacnttccncannttntnntgnttttcactanntgcnntgggtgtgggggggcatctggcccngacaccgcttctctttgcaggttaacatccgaaaaagagacaattcccggaaggaagtccaacgaaggatctttgctcatcagccagggcctgaaggccaggaggagtcaactccgcaatcagatgttacagaggatggtgagagccctgangatccctcagggacagagggtcagctgtccgaggaggagaaaccagatcagcagcccctgagcggagaagaggagctagagcctgaggccagtgatggttcaggctcctgggaagatgcagctttgctgacggaggccaacctgcctgctcctgctcctgcttctgcttctgcccctgtcctagagactctgggcagctctgaacctgcgtgggggtgctctccgacagcgccccacctgctctagttcctgaagaaaaggggcagactcctcacattccagcactttcccncctgantcctctcccctcgtttttccttcaataaactantttgtgtcagcttca

SEQ ID NO: 513367 - DNA, 570 bp, Homo sapiens
acaaatagattcagcaagatgattcttgtttattttgtattgttaaagttttcactcaaacaatgaatataatatacggggctgtggagaaaatatttgtaacattaattctatattgtttattccagccttttaattacaaattaaaacatgaacattaccatacacacagaactaaatataatgcaaaaaatctacttctttattttcccacattctgtattatatatatgaaccaaaaatgcacagagaggcctaagttccccagcctgtggcacattgtcagggggccaagcatggtcgggactgcagggcctttcttgggctaggattgcccacgtggttatgactgaggattcttatgctctcacccacgagagctgagcaaatatttttgcagtgctcactgtcttctggaagagacaagcactttcttgaaattcctaagcattgttgaacaaggattattattattttattattttgaacctgggaggtgaaggttgcagtgagccgagatcgcatcattacattccagcctgggtgacgagagtgaaactccgcctcaaa

SEQ ID NO: 513368 - DNA, 602 bp, Homo sapiens
  misc_feature (2)..(2): n is a, c, g, or t
  misc_feature (108)..(108): n is a, c, g, or t
  misc_feature (110)..(110): n is a, c, g, or t
  misc_feature (117)..(117): n is a, c, g, or t
  misc_feature (120)..(120): n is a, c, g, or t
  misc_feature (151)..(151): n is a, c, g, or t
  misc_feature (175)..(175): n is a, c, g, or t
  misc_feature (182)..(183): n is a, c, g, or t
  misc_feature (185)..(185): n is a, c, g, or t
  misc_feature (190)..(191): n is a, c, g, or t
  misc_feature (195)..(195): n is a, c, g, or t
  misc_feature (200)..(200): n is a, c, g, or t
  misc_feature (206)..(206): n is a, c, g, or t
  misc_feature (210)..(210): n is a, c, g, or t
  misc_feature (212)..(212): n is a, c, g, or t
  misc_feature (219)..(219): n is a, c, g, or t
  misc_feature (229)..(229): n is a, c, g, or t
  misc_feature (234)..(234): n is a, c, g, or t
  misc_feature (236)..(236): n is a, c, g, or t
  misc_feature (242)..(243): n is a, c, g, or t
  misc_feature (253)..(253): n is a, c, g, or t
  misc_feature (333)..(333): n is a, c, g, or t
  misc_feature (353)..(353): n is a, c, g, or t
  misc_feature (358)..(358): n is a, c, g, or t
  misc_feature (361)..(362): n is a, c, g, or t
  misc_feature (365)..(365): n is a, c, g, or t
  misc_feature (367)..(368): n is a, c, g, or t
  misc_feature (371)..(371): n is a, c, g, or t
  misc_feature (381)..(382): n is a, c, g, or t
  misc_feature (386)..(387): n is a, c, g, or t
  misc_feature (412)..(412): n is a, c, g, or t
  misc_feature (548)..(548): n is a, c, g, or t
  misc_feature (554)..(554): n is a, c, g, or t
  misc_feature (587)..(587): n is a, c, g, or t
tnttgtcacatttcctgctacacagaggtgccgatcatctccacttcttcgcgttcggtgatgctgcattaccgctcagacctgctccagatgctggacacactgttntntctagcnccntgtatttgggttttgcagagcagaagcagtngttgggagtggaaatctcacacanatctaanngngaatnnttantgccnaaccangggngntatcatngatatccacnacagngncatccnnctgtatggancctacctccgcatccacgcgcaacttcactgggctcagatacctgctatacaacttccccgatgacctcgcgctttatangtgttgccagcaatttcacnttccncannttntnntgnttttcactanntgcnntgggtgtgggggggcatctggcccngacaccgcttctctttgcaggttaacatccgaaaaagagacaattcccggaaggaagtccaacgaaggatctttgctcatcagccagggcctgaaggccaggaggagtcaactcctcacattccagcactttcccncctgantcctctcccctcgtttttccttcaataaactantttgtgtcagcttca

SEQ ID NO: 513369 - DNA, 437 bp, Homo sapiens
tttaggctactttacaggctctggaactgtaaggccaatgtgtgctgaatcgaggaaaaacaccaggttctgggggccaattggtgctgacttctcaaagctggatcaaaaggaggacacctgggtctgggggtagggaacctaaggccaattaacacgaacttcctagaactaaaccagaaggggaaatcccatctccccacgccgagcagcaaaggatcaaatctccctacagccctcccgcttccagcacatctcagatggaaagagagagtgccctgattggccaagcatgggccaccccttcctctgcatagggcaccaattcacctcagcctttaattagccaggaaccaaatccttcatccagacaagaggtaacttataggagcctcaaaaggggtacttaaaacccggaaaactggctccttcccccg

SEQ ID NO: 513370 - DNA, 328 bp, Homo sapiens
  misc_feature (1)..(1): n is a, c, g, or t
  misc_feature (300)..(300): n is a, c, g, or t
ngattccttaaaggaaagcacaacattccagtcaaaacttggtaaaataaccagtttctccagttgtgtcctgtgcaaaagaaaacagattcttacagaaatataagggattgatgggtaaagagtttaaaagctgtttatacatgcagtacattggatatgatataatttatggtttcttgtttgcagctgtttgtatctttttaatcccaaaccagacaaaattataaacattttatatacaatgttatcttggaaaaagttagatgtaaataattcatcttaatctatatttgaganatctgaggggtattaggaaactcatgag

SEQ ID NO: 513371 - DNA, 149 bp, Homo sapiens
  misc_feature (147)..(147): n is a, c, g, or t
gaactactttcccaaatgcagctgcttgagaatcttggactcattctttttcttacctcacagttaccagttcctatccaggttgggaaaaaatactgactgggatgcatgggcccttccctaagcctgcttggaattgcattccangt

SEQ ID NO: 513372 - DNA, 877 bp, Homo sapiens
gagaaagtgatgaatttccagagctgatgtgttcaccctgggcagatcccccaaatccagaagtcaaacgttactcatggttcagaagttcctcatggtgcacgagatcctcaacactctgccggcagatggaggtggagggcccatgcccgcaaggggagagaagagaggtgagacccaagacatgtactagagcatcatgatgggcaatagagcaggcagagatggaaaccatgacatccatgaccagactaatcatagagaagagcacaggcaaggcatggaccatcacaccagatgaggaggcaagacagacactgataagacaggaatgcaggacaagacacaaaacccagtagacagaagaggagagcgggcaaagaatgatgcaaggaaatgatggaagaaacaggaagaaagagaaacccacaagaacaaaacaaagacaagggaagaacaagacaacaaacacaagagacacaacaagagaaaaaaaaacaccaaaaagcaccgaaatacaaaataaagagaacaagaagagaaaccacaaacacaggaaacacgcaaaaagaagagagagcacgaaccaggaacacgacccatacacaacggagcacacaagtacgcaataaaaacccaagacaaaaaacaaaaaagcaaaaggacacacaacaaaacaaaagcatgggagcccacagaagacatgaccgagagagagagataacaaacacgaccccatgacacaaaaaaaacagaccaaagacaacaccgtaacatcggagcgacacgggaccacacaagagacacaagacgcaggggaaactcaaaagagagggacaagaccaccacacgacaaggaggacaacacgacaaacaa

SEQ ID NO: 513373 - DNA, 82 bp, Homo sapiens
gggggggggggggggccccccccccccccccccccccccttttttgggggttggggaaaaaattggggtttttttgggggga

SEQ ID NO: 513374 - DNA, 423 bp, Homo sapiens
  misc_feature (2)..(2): n is a, c, g, or t
  misc_feature (9)..(9): n is a, c, g, or t
  misc_feature (31)..(31): n is a, c, g, or t
  misc_feature (44)..(44): n is a, c, g, or t
  misc_feature (63)..(63): n is a, c, g, or t
anctgcctncccttggtaacctggaccaccnttggaaatccatnggggtaatattacccccanggctttggattcgggatggttatattaaaaaaccatagatagaatgaacccaatatgaaacctgccagggcaaagtctgaaagtcagcccttggtttggcttccctattcctcaagaggtttgtgaagatttaatcctcagattcccttataaaaacttagagaaaagaaaattttagaagacagccctacatggtcccattgctactcttgctgcacttatgtaaacaatcagaccacatttgaagaaactccacctattttgcaaacaaacttattctactgaaattatcattggtaaaagtagagatgcccatagagggaaaaattatgtggaaaataaaaactgtagtatacctgt

SEQ ID NO: 513375 - DNA, 172 bp, Homo sapiens
ccactaccatgcggaggccagccgtcacaggtgcagctcgtgagttttgatgtgctcaagctgcgctcggagctgtaggaatggagggcctgcattgctggcgtcccggtgccagcagttcttcattacttcatagactgcgggcgggcagccgtcgggcgctgtttggaat

SEQ ID NO: 513376 - DNA, 144 bp, Homo sapiens
tggccacccaagatgctgggattacaggtgtgagccaccatgcctggcctctcttagtaatttgcaagtatatgatacagtgttattaactatagtcaccaaattgtacaataagactgtacttaggcttcaaaagttgaaaag

SEQ ID NO: 513377 - DNA, 272 bp, Homo sapiens
ggtcctactttgattgagacagctctgcaggcctgtcttgctccagggcttttccaagcccagctcttgcctcatggcagctgccccaggcaaatttcttcctgcctgccagcagcctcaacaggcacagctcctccctcacagtggcccatttaggccccactcatgactgtcgggccatttccaggcctagtgcctgcctcctggctgactctttcttgaagcccaaaacttcctcaaatcagccttttgcctaacttctgtctactgtc

SEQ ID NO: 513378 - DNA, 98 bp, Homo sapiens
  misc_feature (48)..(48): n is a, c, g, or t
  misc_feature (59)..(59): n is a, c, g, or t
tagaaatgtattttgaaaacacttattttacagcgagcgaattttgtnatcgcatttanaacgtaaccttttatcaataaagcgactattgtttagat

SEQ ID NO: 513379 - DNA, 103 bp, Homo sapiens
ggcgccgtatcagacgggtgctggagacattgaatcaattgagcacacacacgcatagtagacatcactcgcaccagccctgctgccaagagcccgtcggccc

SEQ ID NO: 513380 - DNA, 181 bp, Homo sapiens
tacatcgagctcggtacctccttattaaaattatctaaaaagtcttctctgataaatatacatctttaatttacaaactctttttgattatacaaatgaaccaagtctttttttttttttttggaagacagagtctcgctctgctggtaaattttggtattttaaaataaggatcccctag

SEQ ID NO: 513381 - DNA, 336 bp, Homo sapiens
tatcagctcgccggtctctctagaggatagctctaatttcttttgacttgcggctccatcgggcgcttccactatggggaggatggcgacaagggctggctgctgtgggaggtggatacctcgtcagcggtctgcacgctgcagcggacacctgctcggcgaacggttgacattgtgtttgacggcaagccagacctcgacaccttgcgggatgcggtggcgcgacaggacgttgccggggcgttcgtgcgtgtccggtggacggtggcggacgaagatcgccatgaggtcaatcgccaggccattcaggaggcgttggggatcctctagagtcga

SEQ ID NO: 513382 - DNA, 403 bp, Homo sapiens
aaacatccgatctcatgagactaagatcactaccgagagaacagatatggagagaaccatccccatcatacagattctctgcacccggacccacccttgcaacgtgggaattattacaatgcaaggtgagattagggtggaagacccatccaaactatgtcagatatgtattgacttcttgcttgcttgctaggttgcataaaggacaaacatggcaattactgaagtaccttaatatctggcttcagatctaagacaggatcagcagggcagctcaaatttgcaaggaggggaggtagatcccaccatattatgggtgcatggcaaaatcaaacagaacttatgtgggatgggagatactgatgcagccatctttggaaacattctacggcttcgtcggtca

SEQ ID NO: 513383 - DNA, 114 bp, Homo sapiens
tacttacgggtatcaaacgtgccgacaaacccctggtcggttgattcctcgaccccaaaattgagccgggcgatgtcgtcacgctctatggcacggatcaggatttacagcgcg

SEQ ID NO: 513384 - DNA, 296 bp, Homo sapiens
atcgtgtgactgtgattgctggcacgaaattagaccaaccctagagttagaatagctagacttcaactatcgtgatatgctaaaggttaatcactgctgtttcccgtgggagtgtggctcggctaagcgtattgagctgcattgctgcgtgcttgatgcttgtaccttaaagatcgtggtgatttagagggtgaactccactggcaatggggatgcttgcatagtgtaatctatatcaagagctaaatagcaaaggctcaggcaccaaacctcatagtcgcaggcgagggatcctc

SEQ ID NO: 513385 - DNA, 861 bp, Homo sapiens
  misc_feature (27)..(27): n is a, c, g, or t
ctgcacgagcacaaagctatgactaangtcgaggcctgggtgttaatcggccgagggcagagagagagagagagaactagtctcgatggtttttttcattttttaccgcaacgggttttgccgccaaaacacaggtgtcgtgaaaactacccctaaaagccaaaatgggaaaggaaaagactcatatcaacattgtcgtcatgggcacacgttaaacttcgggcaagctccaccactacgtggccatcgtgattctataacctgcgggtggcattcgacaaaagaaccacttgaaaaatttgacaaaggaggctgcatgaaagtggaaaagggcctcctatcaagatatgccgtgggtctagcgaatacaactgaaacctgagcgtgaacggtggctatcaccatgtgatatctccgttggtggaaatttgagaccacgcaagtactagtgtgactatcatgagatgccccaggacacagaagactttatcaaaaaactgtgatttacggggacatctcaggctgacgtgtgctgaaccgtgatagggtggctgcgtaggatgatgggctaaaatttgacgctggtatctccaagaaagtgggcagaccccgagaagcatgccctttcgtggcttacacacggggttggtgacaacacactaaatcagctcggtgtttaaccaccatgtggtgtcccccactgaagccacctctaacggcccagaagagatgtgagcgacatttcgttcaaggaacgtccagactacactttaagaaaatgggttaacaccccgaacacagtcctttggtgcccattccggtcggaattggtacaacttctaggccagtgcaacttcccta

SEQ ID NO: 513386 - DNA, 957 bp, Homo sapiens
tcttgccgtcggtttgcgcacgggtcttggtgttcccgaaagtctttcagtggaacctgctcccgtgttaccaagcttcttctgctgttcccgtgcaacactttttgggcgatacttttttcgtgcgcgtgtccccgcccctcgtctgggtccctacggacgcccgttcgttggcaagaatggttcgctttacagcgggcagcatgggttctcccccacagcgcgcgggtcctggcgccaatgttcgccaccccggggttttaagaccactttccgcctcgattctgcagagtcttcctgggggttcccggacagttggtgggtgagccgctggtgcccttcccccccgcaatgttgtgtcgctctccccccccgccctccgtttaaggcgcctgcaggacaccccctgggtgaagggaaaacccaattttcctgctctttcagactttagggaaaccatttcttccggttatagaacaaatgggcctgataaacaagattctccccatatccaattttcatgtcatttagagcggttagatgccatggtgaggaaagacgcctctttggtcctccttctataagagatgtcggtctattggtaaaacccgcctacaatacggggtgagagctactctcttaatggcaattctacctttaataagccccgtgttgtaggacaagagtatgaaagtctggtgacgaaatgggttgggtcgcaaaagcgcgcccgctccgggcgcccttgtggtgataatattcttctattagcacccatggtgtgtctgccggccatcaagggctctagatcactgtggttctgagttttgtatataaaagaagccaacgatcgatgaatcgatgttggaagaccgtttgctactaaaagttgaagctagtgtcgtccgagattcaacaccagtaaggaaaaacaaaactttgtcccccaaaaaaaca

SEQ ID NO: 513387 - DNA, 351 bp, Homo sapiens
gggccggctcctgggcacccacccagctcattcgccgagcggctcccctcctggggttgagtgtcctgggcctgagtctgcagcctcagccatctgttccccaacttgatctcccactgctagttacaaacaaatcgcccggcttgtgcaaacctcctgggctcagtccccagtcccgcggggcatcatttcattctttcctagcctgtaaggtttctcctgaaaaatctattgttagtctaatatgaatttcctaatatgtgacttaaggcttttctcttgctgcttttaaaattttctcttttgtctttgactttgacaatttggctataatgtatgttggagaggacc

SEQ ID NO: 513388 - DNA, 226 bp, Homo sapiens
  misc_feature (53)..(53): n is a, c, g, or t
atatttgctccttcttgttgtttacttctaccgcccgcgaccaagattcctcnatgcccaccagcgtgtaagcttgcgtctacatcccagattccaggcctgggtagataaatggaccaaggagcatgtgccccgtgaaatggcagcagagaccagttagtggcttatgggtgaggggctggagggcctggcgccctgtaccaccacctgttatacagacaccctc

SEQ ID NO: 513389 - DNA, 1455 bp, Homo sapiens
ggggccccagatggccgccgcggagctgaggttgcctggagagatgcgcctgggcgcagaagggttaacgtggccaccgggggctcgcagagcaggagggtgctctcgagactggtgtgtcccaccactagcactccttgaacttggcaggacaggtgtcgaccgcggagggactgcagagagcacccgtccagcgcccacgatgcctgcgatagttatttgtgagccagtcctgctacctggactccaccctggtgtgcagtacgagggcggagcgcatggacgacactggtactgtgcagtgcccatgtgctgtatcgtgtctgtctgcattactgtccgcgtaccgcgtcagactctggctgtggactcacggcaggatgatagatccaggagcagcgtcatcttacagcacaacgcataacagaggtagtggcccagggacaccccgcacaggtggtcatgggagaccaattgaggatcacacgtgagcgcactcttatgcctcacaagtcccatgcagcggcgtggcggcgtgcacgacgcaaggacgcacgtgacactgctcagactcaccgtaacacggttggcaagagtgtcgcaagacgcagacgagtttctgtggcacacgcgacacacatacaacgcgacgaaggagcacgcaggacagagcggtacccgaagagcagcgagcggatacgtgtacacaccgagagcgcagctaacaaatagcgagcacacgcagagacaaacgaagagacattcaggggcaccgcaagacgcacgggagcgcacgacccaagggggagcagagacagacgcacgacacagcggcagagcgagcacagagcgagcagcagagcgcagcccgacacacgagaagcgagcagccagagccgccagcgccgaggcgagcggcccacagaaggcgcagagagcacacaccgaacaggacgcacagaaagcgcacccactatataccacctatccctctcctcctaaacatacaatctacaattccaaaccatcgtcattcacaactacaccactgactcacccatagtactcaccaacacaaccaaaatagctacacaataaaactcatcaagcacaacgcaacacccacagctccccagaagcgcgacaccacagcgacgagcgagccacggagaacggacgaacagcccgcaaatgaaagaagcataccgaacactacgcacccaacagcacacgacgcaacatccacagccgcagatggcggggaacacacaacgaacacacagcgagccagcgactgagccaaccacacccaagtacgctctgacatcacacagacacacgatcacctcacaacagacccagaacgcggaccgaccgcgcggagctcagctgacgacgccatcaaccgcctatcgagttgaacacgaggcgtgacgctaacagatcacccccgca

SEQ ID NO: 513390 - DNA, 279 bp, Homo sapiens
ttatctctcatcgagaaattcaacagagagaaacattatagcctctaaaaaggcataatagtagtaataaactatataatagactatgtacataaagagcaacgatctatatactcacataaagactagaatatatacctagagagaatagctagtatataaattcataatgtgcaacataatacagataacaaaggtaaatgactacatagtgaaatagtctaaaagagctataattaagtactgtatagaaagcaaatattctatgaatctatacaa

SEQ ID NO: 513391 - DNA, 1695 bp, Homo sapiens
ggcgtcgcccttcagcggggcgctgcagctgacggacctggatgacttcatcgggccgtctcaggagtgcatcaagcctgtcaaagtggaggaaaagggcgggaagtggcgtggacaatgaattcgcattgaagatgacgggagctagcttccaaattaaccaatgacggcgggacccggaggctggagaaggccaaggtctcgctaaacgactgcctggcgtgcagcggctgcatcacctccgcagagaccgtgcttatcacccagacagagccacgaggagctgaagaaggttctagatgctaacaagatggcggacacccatgtcacgcacgaggctggtcgtatgtttcggtctcgagcacagtctagagcatcgctggctgcaccggtttcagctgaatcctacagatactgcctggaatattagcctcattctttaccagaaatcggggtgcacattcgtcttcgtacacccgacgtatcatcaatgggcacttcagtcctccttgtgagagccacgcgagagttagtgcaggagattccgagggacaggccgactgcagacaaggcgctgcccctagtgggctctgactgcccaggttggatctgctatggcgagaagactccggggagctcatcattccccaatcagacggccggtcgcgcacaggtcatgggctcctggccaggaatcgtcgcccacagaatcattgaacctggacaagtctacacgtacagggaggcggtatagaaaaggggggacaaaccgagttcaaacggacacgacggagtggcagggcccacaggagcaggaggggagggagcacaagaaccctaggagatgctacggaccaaagggagagcgatcgcgcatgtactctggtgctgcgcgcatctctaaacaaacaacaaaaaagcaatagcggacaagacaaaaaaaacaaagaccaccacacacaaaaatgaacgacaaaacaaaacaacgaaaaaaataataagaagagaaacaaaaaaacgacaacaagcaaacaaaagacacgggagcacagagcgaggaggagagagaggagagataggaggagccaagaagcggacaggcgggcagaagagaaggaacgaaaaagcaacgaggagaaacggagaggtagcggaagcaaggcaagaagaagagacgaaaggagaagcagacgagggaaagaagacgaggaagaagagggcaaagaggaggacaggaacaagagagacgcaggcgggcaaagaaagagcagagaagaggaaggcagagggagagagaagacgaagagacgcgaggcaagaggagggagaagaagcagacggagagacgaagaagacgagcgaaggcaggacgaacaagcgcagagagaagaaccgagacaacagagacgacaaggacgagaatgaaaagaagaggaaggagaacgacgagaagcagagaacgaaaagagacgagagagagaagaagcagaagcgcaatagaacgcgcgaagagagagacaagagagaaagcacagggaacgagagacaaaacgaggagaccaacacagcacgccaacaacgagacaagacaacacagaagccagcacgaaagacaccacagcgacaagcacagcagatagacacgagcgcgacgacgagcacgcgaacgcgagaagcacgaagacacacagagga

SEQ ID NO: 513392 - DNA, 252 bp, Homo sapiens
tgcctcgtaacatctttggttgtggtagtcctgtttactaataacttgttcgtgtgctgtgaacgattacagatttgaacatgtagtgtacgtgctattgagttgtgaactggtgggccgtatgtaacagctgaccaacgtgaagatactggtacttgatagcctcttaaggaaaatttgcttccaaattttaagctggaccggtcactggaataactttaaaaaagcatcacaatactggctcagacaggt

SEQ ID NO: 513393 - DNA, 96 bp, Homo sapiens
gaaggaccaagaggaccacctggaccccggggtggtgccagggagaacagggtgccaccgccttgccttggttgtccagggcgcttccggttagga

SEQ ID NO: 513394 - DNA, 432 bp, Homo sapiens
aaatgttgaggagatcacagacttcctatcaaacttcgattaacttgatactctacgaagtggttaccgaaggccagatttatgttggaaattgagcgtgcgcgacgtgactaaaacattagcagctatgaaagaacaaaatggtgatgtgaaagaggcagcctccattgtacaggagttgcgggtgggaaacctacctctcaagggaaccgaaagagcgtactggcatgcactgtgggcgcaaatgaagatctgtcctagactgtgaaaggatcacgatgcgcagagcacaaatcgatcagctagacaacttatcaccgagaattggtccagagtcgaaaatacagagcaagttagagtcgacgtactatcattctagtgagttctgctggcatgacatgagggatcctatttgtctattgggacgcacta

SEQ ID NO: 513395 - DNA, 522 bp, Homo sapiens
  misc_feature (432)..(432): n is a, c, g, or t
tagtgtagtctctttataatttctttggctgtaaacagaatcagtggtatctgtgatatcctcagtagcttagagtgtggttgttactggaggctgttatgtagttttgctggagactgggatactagggaagccagtgtttgggccttattattgggatgattatgcctttctttgggcctcagaatggcctatgctagcatcacagttagtcagctaggttaggctgattcttgggcctccaagtggttttcttgggttctggaaatggcaacagtggcctgggggataggcgggttctctagcccctgagcagcaagcatggcatgggtaatagcagcagcattggtgggaaagccctctagaacccaagtaatccatgctggtgttggcattagcagcacagggctaagtgggccagtgtccaagctnataggtatcacatgtgggtaggtgctagctatggtagtagcaagaaaagagataatacagattagagcaaaaatgaatgcagttgatgca

SEQ ID NO: 513396 - DNA, 352 bp, Homo sapiens
ctgcacgaggaagctccctggcaggcttttacgaactgacctgcaaccactcagtgaatataatctaggacggagaattgagatctgcttagagccccttcagaaaggcgaaaacttgggcccccaggacgtactactgaggactcaggtgcgcatccctggtgagtggacctattccccttccttggaccttgtgtggaacgcgacccagggtgggactaccggctccctgaggcagagagtttccgatttatctcgtcttcccgtggagaagattgaaactgccaaatactttcccgaaaacttcgagtgacttccgatatctagctggaaccaacaaatacccaggtga

SEQ ID NO: 513397 - DNA, 834 bp, Homo sapiens
  misc_feature (286)..(286): n is a, c, g, or t
ggtccggttgaccgcgcgtctgctgccgagaccatgtctgccgagcggggcagatgctgatggtcagcacccagtgtgacagtggaagaaccggtacagcagctccagtgtggtgtgaccgtgtggccgagcactgcctctgatcagctccacctgcgacatggatgtccgcagtccgtatggcctccagccaatggtagaggctacccggcaccgtcaatgagctgtctgcgtacgtcactcagaggaagcggacgtgagtgacgcctcactggcgcgcttgctngtcatgctgtgcggctacagcctgattccgtctccaatgctatggagcctcacagatgtgcatcaagctcaagcgaatgacggcccgacatgtggtgagcttgtgacacacgtttggaagcgacgaatccgtcccgcagttccttgcagagcagccctacgagagtagaggtacctggcgggatgactcacacggaagcgttgtagtcgtctgtaacgcgctgtccggggagctccatagcacgactggttgatctaggacgtcctaacgagacaacgtagtggcgccaccacaactttgttcgggagcgccgcgtgtgtagcgcagaacccgacgggatgcgtcgctgcgagatacctggtcgttgagagcacatgacctagagggtcgcgctagttgaactctgagcgagcggtcacatttcgagctccattgtggcttcgcctgccttttggcgccgagactgtgttgcttgacgttgggggctcgacaccgtgtggctgggggtgacttcggttgggcttgggcctgtggcacgacctggccct

SEQ ID NO: 513398 - DNA, 188 bp, Homo sapiens
agatatctcgatcactacaacttcactcctggctcaagcatcctctcacctctggctccgagtagtgggatacaggttatgctacatgccagctaattttagtatttttttgtagagacggggttttgctgtgttgcccaggctggtcttgaactcctgagctcaagcgatctaccacctaggcaaca

SEQ ID NO: 513399 - DNA, 103 bp, Homo sapiens
  misc_feature (55)..(55): n is a, c, g, or t
  misc_feature (92)..(92): n is a, c, g, or t
gagtagaaagtacaagaggaatccatttctcaaacagtgcgatgacatcaatctnaaaaaaagagagagcagagcaatgatatcgctcgggngctttgagaga

SEQ ID NO: 513400 - DNA, 940 bp, Homo sapiens
  misc_feature (44)..(44): n is a, c, g, or t
  misc_feature (67)..(67): n is a, c, g, or t
  misc_feature (69)..(69): n is a, c, g, or t
  misc_feature (105)..(105): n is a, c, g, or t
  misc_feature (108)..(108): n is a, c, g, or t
  misc_feature (191)..(191): n is a, c, g, or t
  misc_feature (194)..(194): n is a, c, g, or t
  misc_feature (196)..(196): n is a, c, g, or t
  misc_feature (202)..(203): n is a, c, g, or t
  misc_feature (212)..(212): n is a, c, g, or t
  misc_feature (217)..(217): n is a, c, g, or t
  misc_feature (229)..(230): n is a, c, g, or t
  misc_feature (235)..(236): n is a, c, g, or t
  misc_feature (243)..(244): n is a, c, g, or t
  misc_feature (250)..(250): n is a, c, g, or t
  misc_feature (255)..(255): n is a, c, g, or t
  misc_feature (338)..(339): n is a, c, g, or t
  misc_feature (341)..(341): n is a, c, g, or t
  misc_feature (357)..(357): n is a, c, g, or t
  misc_feature (361)..(361): n is a, c, g, or t
  misc_feature (442)..(442): n is a, c, g, or t
  misc_feature (453)..(453): n is a, c, g, or t
  misc_feature (473)..(473): n is a, c, g, or t
  misc_feature (486)..(486): n is a, c, g, or t
  misc_feature (493)..(494): n is a, c, g, or t
  misc_feature (503)..(503): n is a, c, g, or t
  misc_feature (510)..(510): n is a, c, g, or t
  misc_feature (522)..(522): n is a, c, g, or t
  misc_feature (561)..(561): n is a, c, g, or t
  misc_feature (588)..(589): n is a, c, g, or t
  misc_feature (618)..(618): n is a, c, g, or t
  misc_feature (637)..(637): n is a, c, g, or t
  misc_feature (644)..(644): n is a, c, g, or t
  misc_feature (704)..(704): n is a, c, g, or t
  misc_feature (769)..(769): n is a, c, g, or t
  misc_feature (840)..(840): n is a, c, g, or t
atctttaagagatacgagcagagtcaggcacagtgcatcatgcntgttgtcccagcactttgggagncnaaggcaggaggatcacttgagctcagaagtttgagnccnccttgggcagcgtggcagacccccgtctctactgaaaattaaaaaaaaaaaaattggctgggcatggtggcgcatgcttgtcnatntnagttanncgggaggcnagggnaggaggagcgcnngagcnngggaganngaggcngcagngagccaccagcacgccaccacacgccaggcggggggacagcgagaccctgtctcaaaaaataaatatttatttgagctgtggnnantgaggtcttgaatggnaaantatatgcttccaagatgacaggtcccacgtggggaagggctccagggtaccttctcttccctcctccccactccaggcccnaggagaggccntgagggcagtgctgatcccnattcgagaggttntgacccnngaatcgganatctccnttgcacacgttntggctgcccgagccgacctgtcttgtctcgtccccgccnccagcgtggctgtccgcagagggaccnnctgtgccatcaacaaggtgcttatgggcnacgttccagaccggggggnccgcccnaatgagctggagcctcccatgcccacctggaggagccgaagagaggatggaggcccccantgttggggtcgcaagaagaagaagaagaagtaaagggggactggtggtcgggggcggggggtccnccatgagatgctaatgctatcggtaatctctggggagtccgtttaaggctttccttggtatttggcacccnagccccccatctcctattcctgagtcccccaatgccctgctcccattcacgtccatacccaggaccatgttttcccgagaataaatttaatttatgacca

SEQ ID NO: 513401 - DNA, 714 bp, Homo sapiens
  misc_feature (216)..(216): n is a, c, g, or t
  misc_feature (227)..(227): n is a, c, g, or t
  misc_feature (247)..(247): n is a, c, g, or t
  misc_feature (260)..(260): n is a, c, g, or t
  misc_feature (267)..(268): n is a, c, g, or t
  misc_feature (277)..(277): n is a, c, g, or t
  misc_feature (284)..(284): n is a, c, g, or t
  misc_feature (296)..(296): n is a, c, g, or t
  misc_feature (335)..(335): n is a, c, g, or t
  misc_feature (362)..(363): n is a, c, g, or t
  misc_feature (392)..(392): n is a, c, g, or t
  misc_feature (411)..(411): n is a, c, g, or t
  misc_feature (418)..(418): n is a, c, g, or t
  misc_feature (478)..(478): n is a, c, g, or t
  misc_feature (543)..(543): n is a, c, g, or t
  misc_feature (614)..(614): n is a, c, g, or t
cggttccatctaagttctcggacgcagccttctttgcccccagggtccttgcgaccccctcctcactgctcgctagatgcaccccgatggggagccttggaggtctctgtccccaagcctcagagatccgtatccgctgccgccgctgcctcctcctcaagcgccttgacctccgctacatctgctgttcccctggagtgaccgggcagaggcccnaggagaggccntgagggcagtgctgatcccnattcgagaggttntgacccnngaatcgganatctccnttgcacacgttntggctgcccgagccgacctgtcttgtctcgtccccgccnccagcgtggctgtccgcagagggaccnnctgtgccatcaacaaggtgcttatgggcnacgttccagaccggggggnccgcccnaatgagctggagcctcccatgcccacctggaggagccgaagagaggatggaggcccccantgttggggtcgcaagaagaagaagaagaagtaaagggggactggtggtcgggggcggggggtccnccatgagatgctaatgctatcggtaatctctggggagtccgtttaaggctttccttggtatttggcacccnagccccccatctcctattcctgagtcccccaatgccctgctcccattcacgtccatacccaggaccatgttttcccgagaataaatttaatttatgacca

SEQ ID NO: 513402 - DNA, 901 bp, Homo sapiens
gtcgatatagaattggaccattgatgataagaatacacatgtatgtatctgtgcacatcacacgtgtgtgtgtgtgcacgtacatactgtatagtctaaaaatagcattatactggccagcgttttaagataacgcctgtaatcccagcactttggaaggccgaggcgggatggatcaactgtggtcaggagtttgagatcagccaggccaactggtgacaccccgtctctactaaaaatacaaaaattagctgggcgtgatggtgggcgcctgtaaatcccagctacttgggaggctgaggcaggagaatcacttgaacccgggcagggcggaggttagcagtgagccgagatcgcaccattgcactccagtctgggcaacagagtgagattccgtctcaaaaaaaaaaaaagaaagcggaaaaagaataggataataccctcttccttgtctcaaccggccagtgaaactttcttgaacatttccaatttcaagttgaatactccaaaacacaactttataagtctcacaactcacttaactcctaataggaaactacgtatcacttaaaaaaagggcctcaggaaatataatcttaccaaacgcagcataacatacagtgcagctaattacacccaaatatgtgttccctagtaatgaaacaactcggcctatttcacgtgtgggttagccctaggagctaacatggttgcccacgtagtattcggaaataccgtgatttgtaaaaccactcgtttgtttcaccagtggcaaaaaatctaaagaccggaattggtcattctgcaccaaaacataatggaccagactgaatgagggtactaacaaatagtccagtgtaaaccccaatttcgtgtatccacaatctctttcggatatgca

SEQ ID NO: 513403 - DNA, 407 bp, Homo sapiens
ttgcttcagactgtgaaaggattggcattgcagcatggcttgcatcgcttgctctgggtccgtgaaagagggtgtagtgtgcactatctggggtgtgagtaggatttaggtgagtctgggtgtaagacgtgctctagagctgcacgagactctgcgctctggatcctctggctttagccaatgtactgatgctcacagataagtggtgatggtggtgatggtcccctccatcatctagtgcgtgtgacagtttgtaggtgatgacatacgaggctagctcctttgaaagcgttcagcgagcagcgcagctatacgcggcgcttttgccgtgaccgtcgtacagggctcccggcaggttctagatcacgtcggcgatgcttcgaatcaggtacggctggtcccgattc

SEQ ID NO: 513404 - DNA, 225 bp, Homo sapiens
tgacaggggagatgaagatgactgttacagcatgaattgcgtcccaacactatgtaaactatactgaaagatgttgctcaaagtgttactaacatacactttcatctgagtagcaaaacgaggcagaagtagccaagggcctactgattctttcatgtgagaagaacttagtctagacataatatgactcagactgcttctatgtaaaggcctgccaatcctctt

SEQ ID NO: 513405 - DNA, 185 bp, Homo sapiens
aagtacagaggcatgaccttagctcactgtagcctcaacctcccaggctcaagcccctcaagtggctgagactacaggcgcacaccaccgtgcccagctaatttttgcattttttttttttttttttttttgcctgtttggaaaatttttggccaggtttacttccatgaggacccgggggtacc

SEQ ID NO: 513406 - DNA, 331 bp, Homo sapiens
  misc_feature (18)..(18): n is a, c, g, or t
  misc_feature (51)..(51): n is a, c, g, or t
  misc_feature (98)..(98): n is a, c, g, or t
  misc_feature (148)..(148): n is a, c, g, or t
  misc_feature (162)..(162): n is a, c, g, or t
  misc_feature (327)..(327): n is a, c, g, or t
ctaaaaatattcatgtancaaatctgagaattgaaaactgcagataaccgnccgggtatggtgactcatgcctgtaatcctagcactttgggaggccnaggtgggtggaccacctgaggttaggacttcaagaccagcctggccaacntggtgaaaccccanctgtactaaaaatacaaaaatttgcctggtgtggtggtgcatgcctctagtcctagctactcgggaggctgaggcacgagaatcacttgaacctgggaggcggaggttgcagtgagtcgagataacactactgcattccagcctgggtgacagagtgagactccncctc

SEQ ID NO: 513407 - DNA, 99 bp, Homo sapiens
  misc_feature (99)..(99): n is a, c, g, or t
gtccgtgtcgctctgtaactctgtgaccagcgttcaatcaagtgatggatgtaacgtttctctgttgattaggagtgtctgtatatcacgcgtaacgan

SEQ ID NO: 513408 - DNA, 327 bp, Homo sapiens
tttatttgggtaaatggtttatcaaaggctgtcagcagtcactctatgcacaggcctggatttggcagtcactttgagtatgggactctctactgcccctcccacctacacaacattaccccgcctcctcaacccttcaggtggcctcactcatggacagggtggggaggattagcttctcttctgaagagggacgtcaaagcagtggaagtggggtggaataacctctgcttgcaaagtcctctggttggggaaaacaggcttagactgccttcctcccaactttttgtaagcagaagaggccccaccttggttggttttcttgtt

SEQ ID NO: 513409 - DNA, 986 bp, Homo sapiens
acatgtctcggcgctcgcaagggatgaccccagtcacattaacgtcgaaagcgggaattctcgacccggagcctcttgaagccattcttacagatgatgagccagaccacgggccgttgggagctccagaaggggatctagtggacctccgtcacgctgtgggctagtgtgcatgatgaacttcccatggtggtacattcttgatttgtattcgagcgaccatacggaaagcgaatgtccatagggacagtctctgtttagaatagagctgtggataaggccagcttccccttcacctaatctgagcatgaaaaatagcattcctgagtcgcgcggtgcggaggcttgtgctctcctagtgtcagggccgaggaggcatgagcgatgtgtgttatcaaacgttcaatcgtagcaggtaagtttgcctcgcagacaggtgaacactattagtcacgagtatacacttctctgctaccttggcatgggggcgctcattccattccgcctgcgtatctcgtcagcattgagaggcttctatatccaccaacgctcggggactgaagtgccgaagtatgccccgacagggtattttgtacacgatgaggcccagccagcgtacggcgatgtagcagagcttggcgaacacaggcgcattgtcgacccacggtgctaggtggtttcgtcgttttgcaaactagcgcgacgaggaagcacatccatgtgcattagaggaattcgtaccattaagagaaggcggaggcaatcggaatgctccaccgtgagccccgtgggggcttcgttgcatcaccaagcaccacattgcgggcgttagataagcccagggagaaggcctcaaagaagggttgtgggcgagatatctacggacttggaaaggcttccaagaagcgccgttaaagggtttcctggagaaatcatttggaaggccccccaggggttgggggctggaacggcgtgtcacggccctg

SEQ ID NO: 513410 - DNA, 159 bp, Homo sapiens
tcaggatcgataactgctgccggagctgacccaggagcagctgcaccagcttcacagtcgcctcatctcctaagcactcctcctctgtgcagtccacctcctctgtgctgtcacagaagctgaagccgggaggagtgggagccccctcctctgtgctgt

SEQ ID NO: 513411 - DNA, 568 bp, Homo sapiens
  misc_feature (8)..(8): n is a, c, g, or t
  misc_feature (16)..(16): n is a, c, g, or t
  misc_feature (24)..(24): n is a, c, g, or t
  misc_feature (68)..(68): n is a, c, g, or t
  misc_feature (362)..(363): n is a, c, g, or t
  misc_feature (375)..(375): n is a, c, g, or t
  misc_feature (377)..(380): n is a, c, g, or t
atttcttnacctaganaaatgtanatacacacacacacacacaaatatatatatatagagagagcacnaaacagaactggtgggagattgtggtgaggaatcatggtgttttaagtggcatccttgaacattctaccaaagccgaatgggaagatgaggagagtgttgggagtttccgaactgaagtacaactccgtaactggaagttttcaaggttggaaggcattattttgttagtccgttaaggggcacattattcaaagacttggctgggaatgagtgctaggtgatctgtaaataatctacgagtaacgtctaccaggagtcgaacattaacatcgtagaggccaggctttcgaagnntcattgccacangnnnngcattgcctccaccctttaactgtttctctacaactccaacgattgcattaaaaggacagaatggagcaggtagagggtgaattcaaatataaacaccctctgtggatgtggccagtgaggcagttagaaccattaagtgtctccgcagcaacaatacaactgttaggtcaagtgtacgaagggtgag

SEQ ID NO: 513412 - DNA, 301 bp, Homo sapiens
tcatgcgtggccaacctccttattatctgattccccaaccagggctgggatctggcctactcagggcgctgctatatttcaacacgcagccagggcctagtacatactaggagctaaattaaaaactgatggggccaggtgcggcgtctcatgcctgtaatcccggcactttgtgaggccaaggggggtgtgtcacctgaggtcgggagttcacgaccagcccggccaacatggcgaagccccatctctactacaaagacagagattagcctgtcgagaggctgagcacacattatggagc

SEQ ID NO: 513413 - DNA, 268 bp, Homo sapiens
acttcagtcacaagcatccaattcgcagttgtcagtgtacctgtcgcttgcagcaatgcagtgcaatggcaaccgtgtcgcagcccacgccagatcaggcagcacctccatctcagcagcaaatgttcagcccttgcagcagtgcagttcccaccacacccacgttcagctcgtcagatggttcgcacaggcaggcaacagcaatccgtcacgctacccaacatttaccacactattcacccagcacaaccagccagtcactcaacct

SEQ ID NO: 513414 - DNA, 300 bp, Homo sapiens
gtccaggctcctaaccatctttcatccttgggtgtatccatcggcctaggaacacctaacaccacgtgatgtttaatcctacagcaaaccatcgacactttcagcttgaatgatcatgtatcacttagttttcaagtttaattcaagtgcatctacctcttctccgctgttgacaccagaaaactcccttcaataggccccttgtgaaacctcattattactttgttcaaacaaggggtaaaggtgctccctgtgttagggtgtccagaaataaatttagggaatcccgtttaaagaaaa

SEQ ID NO: 513415 - DNA, 108 bp, Homo sapiens
agcgatcccccttgtttcaggtgcgagatagtactacggttgtggtgctggagtttaagttgagtagtatagacagtgcggtagctagttatggatcaatataaatag

SEQ ID NO: 513416 - DNA, 548 bp, Homo sapiens
cactccagcctaggcaacagagcaggactccatctctaaaagtaaataaataaataaaattttcaaaacttttaaaaatccaatgaaatatgtcaggtttgtacctaccacatttaaaatagggacttgaagaattaaacattttattacaaatgaagcacttcatgcacagactggcacatagtaagtagtcgataggtgttaacaatttgtgttattgttattttctggagtccaactaacaaatcccacagtgaatgacatcacagggatgcaaccaacaagatccagaatatggaaacttctactagataaacaactccatttcttcagcaacaattcaagagagagagagaagagaagctatacattttaaaaggctgaagaaatatatgaaccaaatttgtatgaggcaatcagaaaaactgacaccgactgtattaaggaattatctaattttagtgtggtaatgagattgctgttatgttttctaaaaagtcattatactttagattttcataataaaataattatgaatgaaaaaaaaa

SEQ ID NO: 513417 - DNA, 409 bp, Homo sapiens
  misc_feature (390)..(391): n is a, c, g, or t
  misc_feature (393)..(393): n is a, c, g, or t
  misc_feature (399)..(400): n is a, c, g, or t
aaggccgcacacattgtttgacgtagtagacatcctgcgtcatcgacacctgcgcgtgcccgagttggtccgctgcctgcctcgcggacagtccctcgtcgtcgaggatcgtcgccaccgacttccggaacgtgtgagtggtcacccactccaagtccagtgctgtgcggatctggcgccaccgccgctgcaccgtctcggggtccaggatcgtgccggcccgcgactcgaacacatacgtcgagtcttgacgccgccgcttgagcatgtcgacggcgaactgggggagcgggagcacacgtccgtcgccggcctcggacttggtgagatcctggcgcaccaaaccttgtccgcgatgcggacgatctgcccggtcacgatgcgtctagnntnagccanngtgtgtcac

SEQ ID NO: 513418 - DNA, 959 bp, Homo sapiens
acggcacgacatgggggctataagactctcaaatctacctggggatgaaggaagaaacccagccatccatcctgcatcgggcttaaaggtgggacacgagacagagagacatgtgataggcagtcagcggagccttctgctgtcgacagcacagatggagctccgggactcgttcgctacctgtgctgtttctggcagcatgacggcctgatgtggccctcagagccctgacgcagtgtcccgggcagtgacctgaggtccggttggatagcgtgtcactgatcaccttgtcgagatagctgaaaatgaaatgcgccggagtgtggctgccttcaccgcggaccctctgtctcttacatgcgcaacgtctgagcacaggagcccatccgtggctttaggagttccaccgctggaagccttcatgttcagacaccccggtatgctccaaggcctgatgtgagccagcgggtggtgtgaatagggaaactgcaccccactaacccacatcctccatcctgactgcagcatgtgggttacacccggacaggggtgggaggcagtcacggggtcatgcctggagcaggaacctctcccaactctgtccaggtgttcagacctacttggcccaacactgctcaaccccacacgggttacacatgtccctgtcgatggtggtctgagatgatgatgtgcgcatgaagatcagtgaatctatgggaggaccagccatccctttcagaggcgtgaggccctaggggactctgccggaaaaggagccgccatgctccgtcccaacaaacatcctagaacagtcagaaaacgggtgctgtagaaggagcactcagctcacggggagggagctcttggctgagcttctacagggcagagagctgcgctttgggacttcagccttccttccagtctgggctgagtgttactccagagtacctatgcccgct

SEQ ID NO: 513419 - DNA, 581 bp, Homo sapiens
agtgcggtgggaatgcccggactagagcaagctaccgatagtacacatgatataaatgtgactgctagagccatcagaataattcctatggttattaacgattgtggctgaacttattgagaaatgctaactatggtatcagagcgcaggaggagataaaggtgctaactgggggtggtgtgtatagtcctattgaaaccaagatgatccagtatctacatacccagagctgagtatgctgatgaacggtatattaccaagtatgacactctatacagaccatgagagatgcacaatgcacgtacagaatccctgattatttatgcagcgcattggatgaagcccgacttcatttcaggggtctatttgtggaggaatatgaggtcgctggtgttttgaggcacagatttcttaagagagctgccagaagaccttaaggaaatcaggctccacttacggcacatcccttgggtcagactttagaacctgtgcttgatctgtttggagaagtactccaaagcgaaagtccagggaagacagcgttttttacatagccgtatggagaggtctgactggctttg

SEQ ID NO: 513420 - DNA, 308 bp, Homo sapiens
tttccttttagcccttttattagtgtttaagactccacccaagtttactagcataccaagacagctaataaaacaccaactgacttaaagtctctgcaaatgcatgctacttaaaattccctaaagcacacattggttccgagtctgatttttacagggcagaggctactgtgcttctgtgcttaccatgggtgtctggtcatgctgcattgtggtttgatttcactgctgctgtgtcttctggctgctgtgtttctgtgtggggatcttctgcatttccagcatttttcttgcttttatctgctgca

SEQ ID NO: 513421 - DNA, 592 bp, Homo sapiens
gatacaaggccagactgcaagatatccgctgaattggagccgcccaatagaagtacaagaagagcaaagaagcacagcgggtggtaccaccagccgggggctggacactggccgacgccacgccccccaggcgatgaaaagttcgcggacgcccaccaatgcggtgaaaaaagcggaggtccccagccacgaaataggctggacgaacgagactatcttcgtcgaggcgccccccacgcttggtcccccaacagggaggcccaccaccacttgtcactgccccacagacatacctacatgtcacgtgccccacgagttgatcagcgaggtagacatttggggcccccaaattattgggtagtgacagtaacacaagcagccccacaaaaagtttggtgcggctgtacccaaatgaaccagacgcagcagttgaaaggcacggcaattcattcaatgcggccacaactgtgcagtctgaatacccccggctggggttaacagtcaggcgtctgaagtacaactctgatgcggtaatgtccggggttggtggccggcatacacacatccaataaggctacaaacacctcataca

SEQ ID NO: 513422 - DNA, 719 bp, Homo sapiens
cgattctgtgcgtggatcactaactctgtcggctaacatcgacatctgcacaaacaattcgtgcataatactagactggtagagcttggacagaaagaataatctgcctaacgagccactagtactagaacacaggatacttgcgcactacgcctggatctgccatctgcgaacactgtgccagcgtggacaagtttgtttatcatctatacaggcctgcattgctcgttagtaacagatggatggctccgcagatggctaaccctccttcacactgtgacatctgcctcatgactgaggcactcttgacatgaagatcgtgtgacagatctttcatagtggctagccagacgcaccgtttctagattgcctcgtatatgcatatggggatggctggttcccacgttaccttatagaatgatagatgctatgacagtgaattctctctggtagagatatgaaaagatatgaccgcgtggcatcttgtcttaatacataactgactagctcactgtgaaattcctactgtatctaccatgacatatccgcaggtagctggctgtagccacagctgagccatcaattatattcgttgagatgggcaagcacgaaccaatagcgagttgtgaagcctctccctagagcggagtgttctccaccgagaatggttcttcagatggtctccatgcatgattatgactgatattctaggttggtgc

SEQ ID NO: 513423 - DNA, 411 bp, Homo sapiens
ggaattatctgccttcaatttactatgaaccttcaaggcagataattccaaaggaaaataaaaaatggaaatttcttctaggggttatgctgttaatgcttcattacccagcaaaagactagaatggcactaaagacatatccttgttttattgtgtagggcagcattctagtttcattaaacatggcatagtaagaaatagcccaggcattgcagccaggcagactcaagcatttaagtccctggccatgcaacttcacagctgtgggacttccagtaagtcatttgcacttgtctgagtctaaatttttctcttctacaaattataggaagaatactaccaaccttgtagtgatttttgttattgttactgattatacaggcaacgggtagtatgacacctggcaccca

SEQ ID NO: 513424 - DNA, 847 bp, Homo sapiens
  misc_feature (1)..(1): n is a, c, g, or t
  misc_feature (177)..(177): n is a, c, g, or t
  misc_feature (198)..(198): n is a, c, g, or t
  misc_feature (234)..(234): n is a, c, g, or t
  misc_feature (256)..(256): n is a, c, g, or t
  misc_feature (267)..(267): n is a, c, g, or t
  misc_feature (294)..(294): n is a, c, g, or t
  misc_feature (521)..(521): n is a, c, g, or t
  misc_feature (525)..(525): n is a, c, g, or t
  misc_feature (567)..(567): n is a, c, g, or t
  misc_feature (584)..(584): n is a, c, g, or t
  misc_feature (599)..(599): n is a, c, g, or t
  misc_feature (601)..(601): n is a, c, g, or t
  misc_feature (615)..(615): n is a, c, g, or t
  misc_feature (625)..(625): n is a, c, g, or t
  misc_feature (638)..(638): n is a, c, g, or t
  misc_feature (664)..(664): n is a, c, g, or t
  misc_feature (671)..(671): n is a, c, g, or t
  misc_feature (715)..(715): n is a, c, g, or t
  misc_feature (733)..(733): n is a, c, g, or t
  misc_feature (773)..(773): n is a, c, g, or t
  misc_feature (785)..(785): n is a, c, g, or t
  misc_feature (830)..(830): n is a, c, g, or t
nctcaagaaaactggagccaccctgccctggaaggctcagctcccctgcttgaggacgccgcacacctgttccaggacgtgacataggctctggtccttgggcgtactgctggccaaggagaactaaagcttgttgaggtaggtgtgcacctggctccagggttcctggagcctcangaggtcaggggaacccttgtngaactccaccagcagcatcatctcgtgaaggatgtnattggtcaggaagctgttctgnacgtaggccanctccacatccatggggatgccatagtnactgggcctttgctcgggaggaggcatcacccagaaaggcgagaacttggactcggggcctgggttgccagattagtaaggggagctgagcagggcgaggcagggctggaagcatttctggagctctgcagccgcgctggtagtccatctgtgcgttgatgttctcctcttcgatggcagctgctgtttctgcgttcccgagccggctccgacaagggaaggctctnagcnccgtcagcttctggctgttgacgttccagcggccccccaggnaacccacgacctcactncgtgttaggggactntngaagttcagcaggnacagcacgtngctagaaacagcnacgttgaacggctgggacttgttganggctgcnaaggatgttacttccaccagggtgtgggggttcctggccaagtngcggctgcccagcatgcngttgcggaccggaacccggatcttgctgttcacccgcttncctggggttgtngcctccgggtgggcaggctctgaagggctcttccccagttgtctncgacttttgttctctgc

SEQ ID NO: 513425 - DNA, 313 bp, Homo sapiens
  misc_feature (175)..(175): n is a, c, g, or t
  misc_feature (267)..(267): n is a, c, g, or t
  misc_feature (293)..(293): n is a, c, g, or t
aaaacaaaacaaatttaaaagcactcaaaaataacctcaaaaagagactagtgagtgtcccttaaggaaagcccttcctgcagattcccacagaactcggcccaggcacttaacctccatctcagctctggtacagctcactgcgtacagtgtgtaccaaactcttatgcctggnctgctgataaattctatttatctctgaacctcaatttattcaaatctagttatgatatatcatagtgcttgtaattgttgtaaaatatagangtaacatacagcatgtgtctacacgnttaataaactggtgctaatt

SEQ ID NO: 513426 - DNA, 458 bp, Homo sapiens
tttggaactagcagcatatccacttctctgtcagcctcaagcagcatcattgcaacagataatgtgtcattcacacccagagatatgctaacagtagaacatctggcacaatttcaatccaagaaatttactctgggaaaagttccattgaagcctccacctctggaacttctaaatgtttaaaagggcaattttaaatacggaaaagaatgatgtttaaaattgctatgagtgattcatacagagatgtatatatgcatacatgtatatattcataaggaatataagcttccatcaatagtgattgtaaatgtgaatttattgttaactgtaaatatttaagtataaagtatcaaaatctctgcaagcaagggaatttttatgtactgtaattatgaatggaactgagagattatgctcgaatcaagtacttttctcatgccataccaaaaaaaaaa

SEQ ID NO: 513427 - DNA, 299 bp, Homo sapiens
  misc_feature (8)..(8): n is a, c, g, or t
cccccaanaccacggcttgggaatgcttgggcctctgggcagggcaggcaaactgtacccaaactgggtgggcagggggctggaaggcaccaggcctcaggaggaaccccatagtcccgccttcaacctgtaaccatcggctgggcccttcaaggcccacactcaccccctgtgggtgatggtcacggtgggtgggtgggggctgaccccaacttccaggggactttcactgtggacccccaaatggcataactgagataaggtgaataagtgaccaataaaaccagttttttaccaaa

SEQ ID NO: 513428 - DNA, 452 bp, Homo sapiens
tgctaatgaatgccaggacaacttcatctccatcaagggtcctgagctgctcaccatgtggattaggggagtcttgaggccaatgtcatgagaaatctttgacaatggccctgccaagcatgcccccatgtgttgctattacttttgactgagcatggattactgatttgccaatggcatcagtggagtgtacacatttgtgagcataggtaggtagagagtgcttgcttgcacctgcagtacatccacacccagcatccttgcaccagcaacattgtgattgtgccattgtcccacgacaaacaacaacatttggttgtatcattcacatattgtggctgctaacacaaacactgtggcacttgaaacatacactcttgaatctcttgtcacaatacactaccagaacccatgtgacctggttctttgaatccagggctacaatactaaac

SEQ ID NO: 513429 - DNA, 260 bp, Homo sapiens
acgaactgtcacgaatgttgacatctgggttgtgatccagaggtttagagtagaagtatgttatcttctcccctgccaattaatcacaagtggtctttatttaataatgaatttgatattttataatgctgtatgtcaaggactgacaaatttattctgataaagggctgagatgaaagtttgtaagacttggctggtcatggtggctcaacacctgtgatctcagcactttgggaggccgaggcaggcggatcatgagg

SEQ ID NO: 513430 - DNA, 1333 bp, Homo sapiens
  misc_feature (1144)..(1144): n is a, c, g, or t
tcctccaaaaaaaaaaaaaaaaaagggacccccccgtcggtttaaggggcctgtgggggggaagcccagaagagggggggcggtggcgggggggggaaaagtgttttgcgggtggcgcccataatctgtctggcacagagaggtcttgtgggagaggggcgcccaccccagtctacagttttgtgtgtgggtcttgtgcggccacaacacacatgtgggcgcccaggggggtgtggtgaacacactctccgcaagggggagacacaccgcgggggggagaatatctctttctctggggcaaagtgggggcaagtgtggcaagaagggggcgcgggagagccctctctctcacaaaagaggggggtgtggggcgcacacaccgcgcgggggggctctccgtggagagaaataagcgagggggcgcgcggggcggcgggaggcgagaggagacacgcggggggagaggagatatccgagaggggcctctctctctgtgcgcccggagagaaataaaaaggcgcggagaaagaaaagcaggcccgggggcccccacaagaggtcgcgcgggaagaaaaggggtggtgtccccgagaaaaaagagtggcttgggggctccacacagagagagaaaaatatacgagaggggggtctccgaggaggccacaaacggggggagccctccgggatgggcacggggagagacaggggggggggcacagatgagaagaaaagggacacactggtgagagaacccccggaagtttccacacgctctcggggagagcacacacccgggtgcggcggacaaaaaaatgctggggggccaaaaaaaagacgggtacccccggggagaaaataaacccccccaggggagaaaacacccggggggggcgggggacgccacaaagaaaaataatcccccgaggagggaggggccccaaaaggataatgcggaggctacccccgcggttgttctgtgtagcaacagagggggggcccccaataaggaggagagcacgcaaaaaaaaaaagagcaaagcgaaggagagggacggcttttataaaagcgggtgtagagttgggaaaaaagttgtcgagtcggtgggaatgctggtggggaagagaagacctctatatttggggngggaggagacaaaaaatgtgggtggcaacaactccctacgaggaatataaaaaaggctcggggggaggagtaaacaaaaatagggtgagatactgggtgtgtatacaaaggtgtattttgctgcgagtgaaaaatttgttagcgagagattaaaaataagagagaaagtatagtagaagaagaagagac

SEQ ID NO: 513431 - DNA, 387 bp, Homo sapiens
  misc_feature (1)..(1): n is a, c, g, or t
ngtgcaacatctgcctctggtactcagcatgtgccacctcgttgaccctcatttgaccctcacagccaagttctgttatgaccccttccttggtaagaacccgcccagctcttgtatccaaaatgtctggcttcaaaccccatgctctgaccgctcaatggcaccgcttccttgccagcctatctacagctcccagggcacccagggcacctcagcctctgaaaggggaatggtcagacccggaagcccttgaatgccaagtatacctctggtttaacactgtcgtctcgtgtattatatgtgtatttctcatctgctcgcaagtattctcgtggcacagaagagagagagaggggagagaagagcacatgtgatgtgtcctcgtgc

SEQ ID NO: 513432 - DNA, 552 bp, Homo sapiens
taggatcccaaattgagtcgggtgcatgggggaggcactatacccgtgctgtgagaggcagtctgtctgttggcaagcttaaccctgtgaatgtatcagcaccggacagtcatcgtctgaacaaattcacagtgtgcctgccgtcagggaagggcagacctgtgtaccaggcaagtacttgtccctgtgagcgcccaacgtgtcctcacgcagctgcgaactggcggcctgtgctgggtacttttgcgtttcctaccatgcccctctataccccgcagcctgtgactgtcgtatcagcgttcctggccaggaatgttcaccctctatcttgccgctcaggatcaacagccattcttgcccccatgactaccacggacagcagcctgcctgtaggagtcttcgtgtgggatgtggaaaatgaaggggacgaagctctagatgtgtgcatcatgttctccatgcggaatggactgcgtggtggagacgatgccccaggggctttgtgcgatgagccctttctgtcctgcagcgtagcgcgtaaactgtccgggg

SEQ ID NO: 513433 - DNA, 323 bp, Homo sapiens
ataaaagcgacccgctcataagggggctgcactggataggttatactagactacgttagggtggttggtgtaaatgagtagaggcaggagtccgaggaggtatagttgtggcaataaaaatgattaaggatactagtataagagatcaggtccgtcctttagtgttgtgtatggttatcatttgtattgaggttagttagactatacgtcatagtagggatggtgacttacgtcggatgtagataacgatacttgggacggtggggactcaatagacggggaaaactacgacacttgatcagtacctgcgtgcgggtacggcc

SEQ ID NO: 513434 - DNA, 520 bp, Homo sapiens
agtgtaaagggcagggcacagcttggagtccaagcattttgctgatgcattgctcattattcccaaggttcttgctcagaactcctggttagaccttccaggaaacatttacgttcaaacatttcacgcagaacactcagaaatcaggtccagctgtgggtgtgacctgaacacaggtgtaccactggtggcaccacaaataagcgtaggggacacaatgggggataagaaacagctacttacaatcgttgacgatgattgcaccaagcattcccgggtgagagacactgccacctgcatgtgtatctgaaggatgtatgtaggcacccgatgaattagacttgaatgcacagggactccgagacagcggtggaattgtgtacgacaaacaatattgaaaaaacactaaaaaggcacacggagtcgttaagaaaagtacaccaattcaccaggtgagcctcacgaggatatacacacgagagtcagacacactcaagatgttcaatctgaaggatagtca

SEQ ID NO: 513435 - DNA, 534 bp, Homo sapiens
tcatatattttttgcagggccctcataaaggggcaaatagggctaaatgtaaaccccaagccggccataaaaattgaaatatggggcttaaaaaaaatgggaccccaagaagtttattttccattttaggaaacaaagatcccaattactcctttgttatgggcccaaagaaaattttttttaagccaaaagccccttaaaaaagttccaagccttgaacttttttgggtttaatttaaaataaaaccctttttggaggttttatgggaaacaaaaaaactgcgggaaaagggaaaaaaacttggcccctaatccccaaaacttccaggatcattttccaattaaataacaagtctgttttgggaaaccctttggggcccttttttatccccccaatgtttcctaaaggcttggttgggaaaaattcaggaaatgttccccgaaaaaaaaaggaaaacccttttttaaaacccaatcgggaaaaatgggaaatttttttttggtttaggaaaaaacccttgggggttttccccc

SEQ ID NO: 513436 - DNA, 305 bp, Homo sapiens
tttgaaactcccttccccctttttgcagcctcccaaagatagttcaggctccagcctcatgtgatagcatgaaaagaaactggttcccacagctgtggggtttgctgccctcatccccaaccccagtttaaatgcccaattacgcttttttttaaggccccaaataggataggaaagatcgttttgctatccctgaatgcctgtcccccctgttttgtaaggtaagattgggaaggggttggcccttgcccctgcgggtgagaaaccaactttaggaataaagaccctctctccctgtttgccca

SEQ ID NO: 513437 - DNA, 837 bp, Homo sapiens
gggagctgcggaataacgtggctggcgctgccacgaggacaggctgagctgaatgtcaggaggtagggcggcgaggcgcggtggctcggacctcattcttctgagtgttataatatctggtgttagctgcagaaccaaaagaaaaataatgtaaaacctgaaatataaactgagaaggacaaagtacgcaggggagcgacaccagacaggctcaagagcggccaaaactcccctctccctgcccaagatgaatctggttgagcctcccgtggcatatgcctcccagagaggaggaagaagaggaagaggaagaggaggagagggagaaggacgaggtagagacaacaagaggaggaggaagaggaggagcgggtccctgtgaggtggatcccaacgaagaagccaagcctcaggtcccggactataaactacatcaccagcagcagccagaggccagggagccaccaaaagcaggcagtgaagactccggggaccaggcctcatcaggtgtggaggaggagatgcagcatggggccagggtttgataaagtggcttcagtcaacccaactacagtgactccgggggaccaggactcccaacagccaagaggcagaggccacaagagctgccagctgaagggcctggggtagagtacgaggtcctcagaaacaagcgaggaaagccctgaagaacagatggggtggaaggcaagagaagagtccggctgactcatcctcaaacacagcccaagggccggaccaaatgagaccttgacaaaaccaaactctaccaggccggaaaggaagacatacagaacggcaaaaaaccaggacaag

SEQ ID NO: 513438 - DNA, 879 bp, Homo sapiens
  misc_feature (223)..(224): n is a, c, g, or t
aagaatgcacagactttaacatagatactttcaaaaataggtttatgacagtctggttgacagtctgtgaaaaccatcaccatagttaagttgtgaacatattcatcgtcacccagaggtttcactagtgcacctttttagtacatttttctctacctctgtcctctgatctattttctgttactactgattagttaccataaatggaattatgcaacggatnntttttctttctagtttcacacagtttaatcattttggtattcacttattgttttgtgtatgaattgttcattccattttataattgaatagtattcttttgtatggataaacaacaactggtttatccattcacttgttgatggaaatttggattatttccagtttttggtgattacaaataaaattgttaggaacactcgtggacagctttttgtgtggatataacttttcttttccctcaggtaagtgtctagaagtgatatggctgggttgtatagctggtgtatacttaggagctgtcaactgtttgccaaaataggttgtactattttaccttcccatgagcagtgtacaagagtttgagttgctgcacatcattgttaacatttggtatggtcagtcttttctatttcagctattctgaggagtatgtagaagtactccatgatggtttcagttttcattcacctaataaataagttgtaagcatcttttcttttttaaaaaagttatttttaattggcaataatattatgtatatttatcatcttatatacttctttgtggtgccgacatttatattcactctttcagcattttgacttatgtatacattattattactgtagtcactatgctatacgatagatcaca

SEQ ID NO: 513439 - DNA, 278 bp, Homo sapiens
agtccccgctgctggacctcgacctcttcaacttcgactgccagaggcggagggggccgctacggctgaccgagccccgctcgctagagcctggcgcctgtgcgtcaagccggtggagctgctccacggccgtggccgacctggtgcgagaggctccgggcgctccatgcgggtcgcaacggcctgtaggaggcctacgaggcgggagcggcgcgccaagctgcagcaatgccgggccgagcgcgtacgcatcatgcgcgaggagaatgcgcgtcttt

SEQ ID NO: 513440 - DNA, 283 bp, Homo sapiens
aggaacagagactcatgcctgttatcgggggcacaactggcgaggctgcatatgtacccagaaagatgaaatgacaggaatagcatcgataaaaaatgacggctatttgcccaagccgatctccaactcctgttctcaagtgatcctcccacctcagcctcctgaatagctgggactataggcatgcgccaccacacccagctaattttaaaattaaaagtagagacaggctctcactgtatagcccaggctgggacatgctattgaaacttctaaaactagg

SEQ ID NO: 513441 - DNA, 206 bp, Homo sapiens
  misc_feature (23)..(23): n is a, c, g, or t
  misc_feature (163)..(163): n is a, c, g, or t
cgggcaccgagatttggtctgantttatttatatggcatgaaatctcctggtttattttgggatttttttttttaggtttcaaagtttgttttttctaaagttgtgtgattatatatttgaaattttaaatttcaaagaaaggtatgttgtttaaaagggganccaaaagaaggtagtattgaaaaatgttcttggttttaataaa

SEQ ID NO: 513442 - DNA, 294 bp, Homo sapiens
  misc_feature (62)..(62): n is a, c, g, or t
  misc_feature (206)..(206): n is a, c, g, or t
  misc_feature (236)..(236): n is a, c, g, or t
aaggttacgcactccagactcacggaggtgaagggggccgcgtggggctccttcagagaganggagatgcaagctcagctgccagagctggagagcaagatcctcacccatgtggcagagatgcaggcaagtcggcaggggaagccgcggctcctgagcctgaccgctgcagaaagaagcgtgagtctggagtgcgtaaccctgancggggagaggacttttctaagctctatttnaggtgttagatctaattacttatagattcgtgagtctggagtgcgtaacccttgagcg

SEQ ID NO: 513443 - DNA, 513 bp, Homo sapiens
  misc_feature (16)..(16): n is a, c, g, or t
  misc_feature (23)..(23): n is a, c, g, or t
  misc_feature (89)..(89): n is a, c, g, or t
  misc_feature (163)..(163): n is a, c, g, or t
  misc_feature (186)..(187): n is a, c, g, or t
  misc_feature (360)..(361): n is a, c, g, or t
  misc_feature (479)..(479): n is a, c, g, or t
aacatgataaaggccncgcctgnaaaatctacagttaacatcatactcaatggtgaaaaactagaagcttttccactaaggccggaaanaaaggtaggaggataacttgaggccataagtttgagaccagcttagacaacaaagtgagacccctatctctatnaaaaataagaaatcagaaacaanncaagtaccaacctgatggtacttttctctgtttatagaaatctacaggctgggcatggtggctcaagcctgtaatcccagcactttgggaggccgaggcgggcggatcacagggtcaggagatcgagaccatcctggctaacatggtgaaaccctgtctctactaaaaatacnnaaaattagctgggcttggtggcgggtgcctgtagtcccagctactcgggaggctgaggcaggagaatggcgtgaacccgggagggggagaatgcagtgagctgagatcacgccactgnactccagcctgggtgacaaagcaagactccgtct

SEQ ID NO: 513444 - DNA, 390 bp, Homo sapiens
cctttatgcacagaccaatatctggcaatggcactaggagacaaataagctttaccagtctcaaagccctggctactacagtgaatccacccttctcctggatcttatctacttcagcaaaagaaggccacccactaaaccaggcccttgtactttgggtggaaactcctaagtcctctagtctcctcaaacagacagccaggctgccaatttccacaataataatttctatagcactgagtctttggtagccttgtaactgtagctactgatgctacagtctggtccctgtatgataaaacaccagagcaacagaaacaaaaatattgactgaagccttctaaaatctctctaaatataccttcaataaatatggttttttttacaaaa

SEQ ID NO: 513445 - DNA, 901 bp, Homo sapiens
taatttccttagctggtatgaaaaggatctttaataattaacggtttttatagaccatcggtggaatgtatttttcatatggttatatgggccagaaaattagggtacaatttttggcgctccatcctttaatcactttgcactggtgcatggaagatcttctggacaagaaacccttggatttctcagagacttctgggcactatagaagcacgagaagagacaccactggggcaagggaagaatggtggatatctccagaatatggtgctataattaattctaaacagtgtgtgccgggtattttagaaagaacagagaagaacagatattatacgcaaagaccatgtccaacaagtacaaaaccgcggggaacaatattggggggtcacataattaatggggtgaggggggggaatgtacaatagacggcaataataagtggggctatgagggaaaggaaccccaaaaaaatatagagcgcactttagagctaagagacacagaggaggagtcttttatagacgaagccagagggtataaaacgtaagtattgggggagttattatgtccatacgagggagcaaacagagacgcgcgtgggtgtacctgtgaaaggagaaaagttgtaaaagcagggctgattatgttggcaacaccgaggtatattaactccacaaaaatttaagcaattttagagcggaagtacacagttttttagttggcacaagacaaaatgtttcaaacaagcgtgtggtctaacaacaggtttatcaacaaagaggttttagccacaaataaggcctcaacacgggtgatgagagaaccggtttattatacataacacagggggcgaacacacttgaggaccaacagatattttgtggaacaggctaaggac

SEQ ID NO: 513446 - DNA, 206 bp, Homo sapiens
cgcatcttctcccatcagcgtgtctggaagacaatctgcattcagttcagctaaaaaatattaggcaaaacatttggagatgaagtttccttgtccaggggtataaccttctttacaatattttccttgatgggtgtaatcctttttttttttttttttttttttggttttttttgggccccaatgggccaaaaatcgggggaccc

SEQ ID NO: 513447 - DNA, 351 bp, Homo sapiens
  misc_feature (225)..(225): n is a, c, g, or t
  misc_feature (254)..(254): n is a, c, g, or t
  misc_feature (295)..(295): n is a, c, g, or t
  misc_feature (301)..(301): n is a, c, g, or t
catgctctggaaaggggtgggtcggggctggctgcctcataaggctccagacaggagtgcagtgggcctggaaggtaggaataggccagaagaggcccagctgggcaaggaagagcagtccaggtggcgtctgccctctgcgggctggagtcggctgggggcggtccatcctcagccccacgggcctctgcttggtggcctctcttgttgctcccttgggaagcnagggccacaagccggggcaaaccccttanggcactttagttagcgtgtctgggagctgggctccgtggangccccngtgcaggaaggcaggccccgggagcacatcatcccccatcaacctgaggc

SEQ ID NO: 513448 - DNA, 108 bp, Homo sapiens
ctgaaaattagggggcacttcaagtagatagcttctatttcctatatttgtcttatatacaagtatttactttaaaatgctttgttggaattattttgataaaagtcg

SEQ ID NO: 513449 - DNA, 708 bp, Homo sapiens
  misc_feature (344)..(344): n is a, c, g, or t
  misc_feature (616)..(616): n is a, c, g, or t
  misc_feature (622)..(622): n is a, c, g, or t
gggattcaagcctcgtgaacgaagcggtggggagcaggcacaggactgggatgctctgccacccaagtcggccccgactaggggcaggaaacaagatcggaggccgtaggcttatggtggtgctggaaggggccagtctggtagacagatcaaggtagggaaacgacgagtatgagctactcaagctgtgacaagcacaagtctatattgtcgaagaatggacgggaccctggggaagcgcggtcggatatcaccgcacacagagtttgcctgatgctgatggatagtcccctgaaccgagctggcttgcctacaggtttatatccattacacagaagaatgtncctgaattgaaggtgaatccctcagtacccgatattcctcatgaaagctgttgaccggcctgttaggtggccatcaatggttcaatgcttttacatcatagctcagatgcttcgagcagctgattggcccccagaaggcttttgacggtaattaagaatccagtatcgagatcactttccagtgggactgtgatgaaagtaggcacttcttgtttccatcccggtgtgtcagtgatgtggcgtgagctgggtgcccagtcagtgatcctatngtgtcngtggtacgggcctttgtccatggccaaggtcagtgtggcagtatacgggagaagatggtgtccatcatgtacctgaccccttgctg

SEQ ID NO: 513450 - DNA, 138 bp, Homo sapiens
  misc_feature (21)..(21): n is a, c, g, or t
  misc_feature (40)..(40): n is a, c, g, or t
  misc_feature (47)..(47): n is a, c, g, or t
  misc_feature (53)..(53): n is a, c, g, or t
gatcgagctcgctccgctttngtatagcagaggtcttganacctgtnaaggcngcatgagttctccaagctgacgtcagactccacttagctcccctgtgtgctcttcgtggatctcaaagcgtgagcctggggagct

SEQ ID NO: 513451 - DNA, 101 bp, Homo sapiens
tgtcgcgacccccagaatatttccctgccggcatatccggcccgggcactggcgttccatctcgaaggccgtgtacaggtacagttcgatgtcgataatga

SEQ ID NO: 513452 - DNA, 352 bp, Homo sapiens
gcatcagtggcttgggtacagatcttccatgccgttagtcatggcccactttgacgtggataatccaattaccccaaaaggaaacacaccaacaccacgtatgtattagagaggacaggcagaaggccccaagcccatgtatcaggctcaacctcctccctttcaaaagacaccatatcttatccccaaaggacctgagactatggtgcttaccgactgaagatagtgccttttcatttcaaggcaaagaaatgaccacgcaccaagtgttgtgaccgtgtcccgctcctcttagatagccttcatcccgtgagactgggtaatatgggttgaatgcgtccgtcgacaatag

SEQ ID NO: 513453 - DNA, 262 bp, Homo sapiens
tgcgtccctatcaccctaaatttattatgttcagtggtatgaatgtgggactacatcctggaaaatgtggtatgtatataccatagaatactacacagccataaaaaggaacaagatcatgtcctttgcagcaacatggatgaagctggagaccattatcctaagcaaactaacacaggaacagaaaaccaaatactgtatgttctcacattgagtggacttcatgtcaacagacatagacttaataaatttagggttgatg

SEQ ID NO: 513454 - DNA, 454 bp, Homo sapiens
ggacggtaccaacaacatgaatcaatctcacaaatataattgatacccgtgggctgggagagatccccaaacaccaatgggacctcaaccccagctggtgtccaggctcttgacactgtcgtgagaaggaatttaaggataagtcagaaaatagtgaaagcacagtgatttattgcaaagggaaaagtacacactcaagggaatgtgggcggactcaaaagtcacgtgtaagggggttcgaggttgctacctctataggtttctttaaccaaggactgggatattcatgaacattcctgggaaaaggtggagatttcttggaactgtggtgccacccatttttacatcaaacctgggtgttcttggaactgtcgagacacgggtgggtgtgtgtttaggatattaatgagtgtatatcgaggtcctaggagaaacctgctcacatccagtgaca

SEQ ID NO: 513455 - DNA, 925 bp, Homo sapiens
agagagtggtgacgtccgggctccgtagagagagatgtccggtgttgccagtgactaagagagtagtaccctatgggtgatgtggagcaaggcaggaagatcgattaatgaagtgttcccagtgccacgaccgttgaacatatgggcggcaagccgactgaggactagggcgaaatagtctccatggtacttcttttgggggcgagcagaagagggtcagggcccctgaagtaggtctatacacagacccggcactaccgaacgaaagggcatcgatcttgcgtagagagatgccactgcatggaggtgtgaaggagacatcccaagcaagttcgtccctgtcaatcattaaaatgactctatgtcgccattggaggacggacgggaactaacagggcagcaacttacactagcttagtctcaaaatggcgctactacctggggtatctaatgagtgcactgcccctagatttatctatgaaacccggagttgtcttcttgactttagtaattgtggtaccatcctttaatagtatctcgtacaccagttttgcatgatcttgaatgaccgcatagacttattttgttgtcgccgggcctgatttccaacctaatgaactgctttgtggatccctgactatgtaccgtcgcgtgattaaaaatagttacctccagttccagttccctggtatcccttgttgaccccttctaattgcttttgttagacttcgaacgtatggttcacttttcacaagatggtgagtgcactttagacgtctggcactgggactttacagcaactagtggggcggccacattacaaaccggaatgtcctgctagaaccgacaacacccggggggtccagaaagcgcgggacgggggaaaacagcagttgtggcgaacacagaaacacgtagacggcgc

SEQ ID NO: 513456 - DNA, 325 bp, Homo sapiens
gccggcccgagttgcagtgcacccagcggggtgatgaagcgagactgtctcaaaataaataaataaataaataaataaaactggccagatgtggtgactcacacctataatcctagcactttgggaggacaagatgggcggatcacttgaggtcaggagttcgaaaccagcctgaccaaatggtgaaactctgtctctactaaaaatacaaaaattagccagatgatgtggtgcaagcctgtaatcccagctactcgggaggctgaggcaagagaattgcttgaacccacgagacggaagttgcagtgagccaagaccgcgccac

SEQ ID NO: 513457 - DNA, 105 bp, Homo sapiens
gtgcaatcagtacatggtaaaaagttgtggcagagatggcttccatatccgggatgcggctccacccctatccacgatcatccgacatcaacacagatgttgtcc

SEQ ID NO: 513458 - DNA, 201 bp, Homo sapiens
  misc_feature (67)..(67): n is a, c, g, or t
  misc_feature (72)..(72): n is a, c, g, or t
  misc_feature (116)..(116): n is a, c, g, or t
  misc_feature (140)..(140): n is a, c, g, or t
  misc_feature (182)..(182): n is a, c, g, or t
tgctggtgaccctggccgcccacctccccgccgagtttcaacccctgcggtgcacgcctccctgganaagtncctggcttctgtgagcaccgtgctgacctccaaataccgttaanctggagcctcggtagccgttcctncctccgctgggcctcccaacgggccctcctcccctccttgcnccggccctccctggtcttt

SEQ ID NO: 513459 - DNA, 913 bp, Homo sapiens
ggcggggggttgggtcggtgacttaatgaaaagggatggttcgtcgtcatgataggggggttctctctccttgtgagggcggagcggcgcgcctttggtgtgttggaggagagccgcgtggttgtgtcggggcgggcggtgtctgcgtgaggaaggacaggtggggggggtttgtcgcccgcgcggaccgcggtggggtgaaagtgaggggttgggtgaggggcctcgggcgtgtttgcgtgcagacgatagttgggcagcccggcgccggctgggggggggcgagcgacggttggtgcgcctgccgcgcgccccgggtgaagggggctgttgggtggttgcgccaggagagagtgtgtaggtgaggccgcgtctggtgggtgcacgggggccccagggggtgtaggggaccaccttggggaaaaataggggggagcgcccggggtcccaaggtgttattggggaagtccactggggggaattaaagaaagggcggtgggatgagtgcgcgcacgacggagtaccctaggtggggaagggtgacccacgagggggcgactgtccccgggcgccacttcggcgggtgacacccacgcttacgcacggcgttccattgctccgcttcagggcttggagccgccagaagggcgttgacggctgtgccaccgccgcccaagcactggcatgcaccggtgtaccggcccctggcccagcccctgccgtggttggagatagttttgccggggcactttatctgtgcccccgccccggtgggaccccctaaggtgccctaggacgaggtcagggtaacacctcacgtgggatgattagtaaagactggggtttggccttccctaatccccttgggggcgccccaaatcccccatcactatccgaaagaagccccaacatg

SEQ ID NO: 513460 - DNA, 790 bp, Homo sapiens
  misc_feature (145)..(146): n is a, c, g, or t
  misc_feature (182)..(182): n is a, c, g, or t
  misc_feature (676)..(676): n is a, c, g, or t
catcaaaagtaaaaggcgcccccatcatcttcattctaaccctactatcaccatgacaacatctcatcaactcacttcaatcactaaactacaatcttttaacactcctcattactcaaacagtcatacccctcctccctcattnncttaaatacaattttttctctagaggccacttacanacccaacccctcattacaacagcccaactaactatactatcaccattttccacacatatgcacctctaccccacatatcccataactacatcaatagccaaatccaggctacataaaattcgcaccctacaaaatacttgaaaattcccaatccctttgactgttattatacactatcagtcactccatacataatacaccccacctccctaaccacatttacccatttcaacaatattcttagtaccttttccctaaaacttggaattcgccccctaacaataacactgctaataacaaattgcatacctaataacccccacaacctttaatacccttaattccatctacctttctattttttaaaatcacataacaaaccttcttaatatacccatataaaatttaacttatacaaaaaaaacccctccaacaactcaatctttctaaaaaagccgtaaaccccaaaaattatcaaaattggctcttattcncctaaataccataaaccttacctctcttacctccctcatccttatacccaccaccttaccactttactcctacaaatttacttcttttctccccctcctcacctctttcaaaat

SEQ ID NO: 513461 - DNA, 405 bp, Homo sapiens
  misc_feature (64)..(64): n is a, c, g, or t
agcagtcaagtagtgaatggataccatatttattatggttgatgaaaaaaggcagagcttatcnttaattttttttagggaagagaaggaataaaataaaagtggttcaagctgggcatggtggctcacacctgtaattgcagcactttgggaggctgaggcaggcagatcacttgaggtcaggagttcaagaccagcttggccaacagggtgaaaccccatctctactaaaaatacaaaaattacccaggcgtgatggtgggcgcctgtaatcccagctacacaggaagctgaggcaggaaaattgcttgaaccggggaggcggagattgcagtgagccaagattgtgccacttcattccagcctgggcgacagagcgaaactctgtcaaaggaaaggaaagaa

SEQ ID NO: 513462 - DNA, 126 bp, Homo sapiens
tgctttaagaagaaagaaaaagaaagtgttctggagttgtttctattaaaagggaaagccttactgaggctccttaccctctctatctgccgtatataatttctgaataactcctctattaaaagt

SEQ ID NO: 513463 - DNA, 552 bp, Homo sapiens
gctgtcgaggaggtcgcaatagtcgccggcgcgaacatggcgggctgaaatccactccaggccgcagagcagacgtccggctgctgcttgagcaatgcatcgaggtggcaccaggacggccgtcacggactgcgctgctcatccccacaaggaggacggcgtgatcagctgtcagcgaggtacagaaaccatccggcgtactggctgaacaagagacagatggatcaagtactggtcccagcattttagccacacaaatggcctctccttggctctgcgtagtggcgttaccaatcatgacagcagacggatatttgtgggccaggataatggagctgtaatgggaagtttcagcgtttctgaagacttttagataaaatcgacctttatcaagacctacccagctcatcagaaccggttgtctgcgattatcttcagggttggcacagagtgcggtgactcacgtaccgtgccacgagcaacgtgtagtgagctcggatgtgcacgcggaagcgggaacatgctcgggaggcaacttcttcacgttctggg

SEQ ID NO: 513464 - DNA, 499 bp, Homo sapiens
  misc_feature (263)..(263): n is a, c, g, or t
gcagccctgttctgttgagaatctctcctacccgcattcaagtgctctctctaaagacctcgtcaccccgcctgctcctgcggagtgacttgccgcagcgagggccgtgaagacaggtgcgcccagcctcgcagtctggcctggctccggggaactcggcgcctccctcgtcaccgtcggtggcggtaaaactggcctctacgcttctgcttcaatctccaatttggcattcaaagcacacctttttgtggctttttggccanggttttgggcgcgaagatgataacagctaagccaggaaaacaccgattcaggtgaaggtacaagtaagaagctggcgaaacatagagctgcagaggctgccataaacattgtgaaagccaatgcaagtattatggtggaagcttaaattgtcttgtgctaatttcaagccagctcaaaaatatcatggtgagcttgcagttctgacccttaatgcctgaccttccaagcaacaaag

SEQ ID NO: 513465 - DNA, 981 bp, Homo sapiens
  misc_feature (304)..(304): n is a, c, g, or t
  misc_feature (643)..(643): n is a, c, g, or t
  misc_feature (672)..(673): n is a, c, g, or t
actaggtcttcaatcaccaccataagcacatagggtcagccattatggcacggggtcaccctagaatcaaccgagcatatgccagcacatggtgaagattatcacaagaatttacaataagaaagtctctgtcgcaaagagtatgtatacaaagtcacatatacctctagtaaaatatgccccatccaggatctcacgaagatatgcgtcgttccttacggaagtcattgtattgcttcgacacgactatggtcccagaccaaggtcattgcaactattttgcacatatacataacaatgaggnttcattgccatacttctacactggaactagttagtacatacgcagaaaacccatcgcacaatcattttaatcgtatggcttgaccaagaggcacattcccgtgcgactacgaatgtgacgtaaactatataacttggagattctttgtccaagtagaacggtttattggccattcacgagcctgctcttgaacatataattaaaagtccacgccaagacgtgttataacccccaaacgaggaaacgccatgcttggcacagtttcgaagccgctggataacgtaacttccaggctagaacaaaaagtggaatgaatggcaccatttcattaagcgtaantaatatttctaaagaactatcgtgcacanntacctctccacaagattatagcgtcttaatgacatccaactcttccatcttatctcattgcatcttcatttccataagacactgagccagatattaagggtgagactccaaaaaaaatagacaccacttgacgtattgtcggtggcatacatctatggatgacaactcctcacttgtaactttgggctttcccatgaatttcttcacaaattctttaacttgtccaattagaatacttattggactttcaatacccactattattttcttactttgactgggatgccaaatctggaacatgggttgat

SEQ ID NO: 513466 - DNA, 144 bp, Homo sapiens
tcccccaagagcccaaacggggccagagttgaggttggacgaacacactagggccagagctggtggaaccttgtaggctatgcaagaacctggggggtattctaggagcagcaggcattcattaaagcatgttccaccaagcac

SEQ ID NO: 513467 - DNA, 461 bp, Homo sapiens
  misc_feature (3)..(3): n is a, c, g, or t
  misc_feature (92)..(92): n is a, c, g, or t
  misc_feature (191)..(191): n is a, c, g, or t
  misc_feature (203)..(203): n is a, c, g, or t
ganaccctgccggccaccgcgtcgggccccgacgatgttctcttccacgccaccacatcctgagttctgagaacgggcaaaagcccggaaanatcttggcaattgtgaaatataaaattcactgtatcttagatacagctaaataagtccccgcagttcaagagtcagtgtaaagaaggccttggctgggncacagtggctcntgcctgtaatcccagccacgggaggctgaaggcgggtggatcatgaggtcaggagaccgagccctcctggctaacacgctgaaaccccgtctctactaaaagtacaaaaattcagccaggcatggtaacacatgcctgtaatcccagctactcaagaggctgaggcaggagaactgcttgaacccaggaggtggaagttgcagtgagctgagatcgcaccactgcactccagcctaggcgacagagtgagactccgct

SEQ ID NO: 513468 - DNA, 1093 bp, Homo sapiens
ggagagaactagtctcgaggtttttgagggatatgtttcccgactctgatcttattaattggttcctcaaaaaatcttatttctgactggattcaaacttaatcgtaaaaccctcgcagaagaggaaagctcgtgcgttcttctctcgcaatttggtcccgtggcgcttcctcctttagccctcctttacattcctcttgggcccaaaagtttatagcattattcgtgcgagccctcttctcttatattttatcttgggatacgcgtgcattctctcagagcaatacgcccgccgttgtggttgcctgcgaggacacgtgtggcagttaacagagacgccgtaaactctgtggggtgccttgggtcccataggtttctcttacccttcttattattacagagggcctttcttacaacatacgtggggcggacatctcattcttctctttataacacagaagatttgacaaaacgtttgtgcgggaatctcgtgcatacgcctcatatgtgggggcgccccatggcgtgcaaaagcgcactcgtgatagtatactcacgctcagctcccaaggaatatatctccttttcctctctcccttttttttaagcaataataaccccacaggtttagaaagaaaccggctctcaagatttgtgcaatctccaccaaagtgtgtcaaccacacgcagacaccagtgaattattctcctctagttctctttgtctctctccaagagattctctcctgtgtggggctctgtgtacaccagcgagaatgtgccccctttaacttcagaggataatagaccacgtgcggcagaacaccgtggccccaatggggggctcaaagagaacaaccccctttgatctttacattggtggagaaaacaccctgttgcttggggttcggattccccccaacccacggtgaattctcggggcacccaacaatataaccccttttccaattctcatttcacccccaagaaaggtgttcacgaaagaacacacttttcgtgttggcgcccaaatagggcctttcttaaagtaaaaacatgtaccaaaaagtatgggggttacaatgggtcccat

SEQ ID NO: 513469 - DNA, 192 bp, Homo sapiens
tagaggatctttggggggaagttgaacacggtggtagtggattgtgctcgtgtcgagcacagccatggggggctcccagcctctgccgaacagtgcggagccaagcacctgggactcaaactgcagcagttggcccatgaagctgacagttgggagagatgatgcttcgcctctgcttcacaaacttaaaga

SEQ ID NO: 513470 - DNA, 238 bp, Homo sapiens
gttcggaggacgatgatgtgaaggtgaaaagccgagtttggttgtcagtttgcggggattcctggtgctggattctagaggtcttggtgctgtgtagaccatcattttgtggcatgttcctttacctttctatgtgtgggtttcctcatcactaaaggggaaaaactaatcataatcatgatagctatgggggtggggatacgcccagggtttgacaaatagggactcaaacatacat

SEQ ID NO: 513471 - DNA, 156 bp, Homo sapiens
gatcccccttctgcgaggcagtctctattcctgagcatctttcctcccggcctacttatggctggctcactcccattattcaaagcttaattaaaaatgccccctctcttgctacctaagcctgtgcctctccctaaagagactgcctcgccaaat

SEQ ID NO: 513472 - DNA, 805 bp, Homo sapiens
tgatccagaggcgtcacaagggcaaacgaaaagggccgtggcgagatgcgagacagaaggttggcgtcgcccccccggtcgaggggagaaaccggggagggtgtgcccccgccaattgcgttggagatactgtgggtggaaccaccgccccacacgtggtggataaggcgagcccgcggcgcaaacacccacacggtctgggtggtggagctgttctcccgaagcgatagcgcccgccctgcgggcgccgacaatccgcggtcgggagcaactaagttcgaacacaacacacacatgccgctgcgggggttcctaccagagagcagaggggtgtcacacaacgaagagtccttccagtgggtgtccctcataggatccaccacaagttatcgtgccccgaagaaatcctctgagcggggatacagaaggattgttttctccctcatgtcggcgcggcccgcccccccctcctggtaaccagctgcggggcaaacacggtctctctgaaaactcatggttgtttcgaacaatgggcgacataaatggtagaagatcatgtaagacaacgggctttagtacaaagtagcaaacgagtttgggtgatacctcccgcaagtggcaagagcgatacaaattcttgtcgtggccccacatcctgtcgttttttaatctgggagcgggccacgatttgaatgcaattgatattcgaagcaaccccgagcagtttggctgcaagcacggtcgtcaccacaactgagccccaaggttcggaccccccttaaaagaggaaaagggcccacaaaca

SEQ ID NO: 513473 - DNA, 213 bp, Homo sapiens
gggaaatctccatactgttttccacaggggtagaactaatttacattctcaccaacaaggtataagtgttcccttttctccatatccttggcaagtttctgttaattttgggctttttaataatacccattctgactggtgtgagatggtacctcattgtggttttaatttgcagtaagtaagggtttttttcacttggccaaatcctgatag

SEQ ID NO: 513474 - DNA, 735 bp, Homo sapiens
ggacacccacccaaccaagcctgctccccgaacccacgcctgtctctgcagtggggggcttggttctgggagccttacccacaaatgcagcagcacgaaacaccgcatcatctctcccaaagtggagccccgagctttaaccctgacctctatcccccacctcaccccacaatgctcctccatgatagcctccggatcccagggctccccatcattcttcctcttcttcctcctcatcaggtcattgcagagcccctaggaagctcagaccctatgaccactcccgactctctcgaggcgaggtcctacaaacgaggagggccactgctatcctgcactcctgcacaggacctggagcagcagggcatggcggctttgacagcccaccaagcacatgaggctccacaggcctgatacttaggccatccatgaggttaaggcagtggttggcaaagccactgaggcctacgagaacccaggcaagcttcctcaccagggcctagccttaagacacctgatcagtaatcacttcaaggaagcccccagagggagccagaacagtacggacgggggggcaagcggaagtactgcccagactgtccccacgaagacagacggcagctcataacacctgttttggcctagaaggccgctgctagccctggaggccccggcatctgctcatgggtaccaccacaggcagaaaacgcggacacgaggaacaaattctcaacg

SEQ ID NO: 513475 - DNA, 120 bp, Homo sapiens
  misc_feature (35)..(35): n is a, c, g, or t
gtcgttctagaggatccctcactaattcattccantaaatattcatggaactttattaggtgtcagccccagtgctaggcctaggagattatgtgctagggagtgacatagatcaaatta

SEQ ID NO: 513476 - DNA, 542 bp, Homo sapiens
  misc_feature (36)..(36): n is a, c, g, or t
  misc_feature (76)..(76): n is a, c, g, or t
  misc_feature (104)..(104): n is a, c, g, or t
  misc_feature (158)..(158): n is a, c, g, or t
  misc_feature (184)..(184): n is a, c, g, or t
aaagggaaccccgtcaatgggaaaacccaacggggnacaaagcctggctactacggctggaagctccaataaaacncggaaacccccccgtcttaccttgtgcnccatggttttggatttggaatttggggtttgaaaaatttgtaaaaattaaatcnatttctcctttgttgtggaggaaaanaacttgtgttttcccccgtgacttgcccagggcgtaaagggtgggcatcttcgggtgcccacgtggggcagcacaaacctccacacaccctctcccactctcgacacgcacggggctggctgggccgtgatttggaaaggaactggtgggagccgggtggattgtttaatcttcggagctggagacctgtttctgtgttgggatgagcgatgccctcttgccccaacccactcgtccagaccagccctgtccacacaggcccccggcccccaacccccagccccactgtgccagcagactcgacaggtttttatacaaggttgttgagttttaaaatgtattaaaatattcttcgagg

SEQ ID NO: 513477 - DNA, 1077 bp, Homo sapiens
gttgggcctgtgactgtgtgatcctgtgaggcttctgagcctggagcagtgcagctgcctggaggccatgaggcctgttcgcccgcctcatgtggccgttctggcctgcctgctcccctcccctgcgcctgttccctggcagtggccagagagtgccgccgcctcctgcccggtggttctcgtggcgaagggaagcctgcgaagcaggtcctggggaagagctcgcctgctcctgagggaagcagcgataagatggcaggctttgaaaggggagcctggaggccgagttcactctgtacgtcgggacgccgcctttctaaccgccgccgtcggctcggcaccactctgggacctgctgcccacacttgactgcggggtccaggatcagcgggattgctggccgtgcgcgccttggtttcttgtaaaagagcaggaaggagcgccgagaattgcaggttccgcggcagaaaccctctgtagagggagcagggatgcaaccgaacaggcttgtggccggacagcttgctgacccagcacattgcaagccttgcaacgcacaacggatttggggcaaagaaggcccccatactcccggtgaataaatattggagtcttggctcttgttgcccaaggcttggagttaccaatcgactgttgtcacctcagaggcatcagcttgcaaggctatcgcctactacaccaggtgataccacaggtagagtcgtccatgcctcgaagacgctcttggatgtatggttgggggattcacatggaatttcgccagtaaagacttgattcgtgttaccaattaaaccaaacaaagtgtcttccatggcaagtaagagaatcgctcagcaaaatagccagtcgaaacgagctttaactgactcacatttacgatttggcggtccacaagatttttgagacacacgagcttacggggggcaagaacagattcgtagccagaaaggggactaattgagatacgttgccccattgaaagacaccaaccacttgataaaaccccactcggatgatccaagcgaatacattgcctctatttcacgacagatcaac

SEQ ID NO: 513478 - DNA, 225 bp, Homo sapiens
  misc_feature (84)..(84): n is a, c, g, or t
  misc_feature (133)..(133): n is a, c, g, or t
caaacaggtgcggcggtctcttcaggacatcagaagcagtgaagatgacgtgggtaaacccagagccatgaaagctggcatggncctggagaaaaagtgaaccaggccttttgatcttcatgccctgggttcntgccgcacggacccccatctctgtgacttcctggagactcacttcctagatgaggaagtgaagcttatcaagaagatgggtgcattggagga

SEQ ID NO: 513479 - DNA, 112 bp, Homo sapiens
gccttaggctccccagtagagctgggactacaggtatgcgccaccacacctggctaattttattaattttaatttttgtaagagatgggggggcaggtctacactactgtag

SEQ ID NO: 513480 - DNA, 274 bp, Homo sapiens
  misc_feature (25)..(25): n is a, c, g, or t
  misc_feature (33)..(33): n is a, c, g, or t
  misc_feature (50)..(50): n is a, c, g, or t
  misc_feature (64)..(64): n is a, c, g, or t
  misc_feature (121)..(121): n is a, c, g, or t
  misc_feature (123)..(123): n is a, c, g, or t
  misc_feature (132)..(132): n is a, c, g, or t
  misc_feature (171)..(171): n is a, c, g, or t
  misc_feature (179)..(179): n is a, c, g, or t
  misc_feature (213)..(213): n is a, c, g, or t
  misc_feature (229)..(229): n is a, c, g, or t
  misc_feature (255)..(255): n is a, c, g, or t
gtccccacctgctccgaagacaaanccaacctnccgtttcttttataaancagtcggctttttncttaataagccctcactgtacagaacagcccgttgatggtttatttggggtcccctntnccccccagnccctttttttctgttcggtttagcacaaatacttccctncctccggnacctcccaaacctaccccacagtcagtgtacttnttttatatatatttantcttattcaatggaaccatgcttttntcgttttatacttttctag

SEQ ID NO: 513481 - DNA, 401 bp, Homo sapiens
tcagttcgcggggggcgtggacggtgcacctatatcctggtgatggtggatccagatgcccctacgcagagcatacacccagactgagattctgtgcgacattggcttgtacccgatatcaagggcgccgaactgaatggtcagggaagattcagggcccggagttatcagcctaccaggctccctccccaccggcacacagtggcttccatcgctaccagttcgtttgtctatcttcaggaaggataagtcatctctctccttcccaaggagaacataactcgaggctcttggaaaatggacagatttctgaaccgtttccaactatggcgaacctgaagcaagtcacccagttcatgatccagaactcagcaggactcaccaacattccaggctcccag

SEQ ID NO: 513482 - DNA, 372 bp, Homo sapiens
gcactatttttattattatattattattattattattattattattattattattatttgagacagagtgtcagtctattgaccagactagagtgcagtggtgagatcatggctcacagcagccttgaccccttgggctcaagcgatcctcccgtcccggtctcccgagtagctaggactacaggtacaacaccattgtgtccagctaattttttaaatttcttgtagagacagggtatcaccctgttgcccagattggtcttgaactcctgagctcaagcattctgcccacctcagcctctcaaagtgctgggattataggcatgaaccactatgccctccctactttactttttcatttcacacgttgag

SEQ ID NO: 513483 - DNA, 207 bp, Homo sapiens
ctaattggttcttcgatgacgtctcctgagctgttccagggttgctggagggtgaggccctgctggccacgtgctccaggaatgtgtcttttctctgaccctgctgcctctggggaagctgtccctcttccccgggatagcggacgactgatgtgatgcacgcggtgcccctcactgggacgggcccgtcatcgaagaaccaattag

SEQ ID NO: 513484 - DNA, 304 bp, Homo sapiens
tatctccgccatatcctgtctgcgtggagtagatgcgtcaactaggctaaaaatgacgcaagactccctgcgtcatggatgtcaaggtctttcaatgcaccttcggtttacatcgtcgtttcacaagaagatcggccttcaacagggggtttaatcacctacaagcttttaacagctacaaccttgtaagtctgtgttaagatcaccttcatttttacatctacaaagcattgcccttctataggatattaaattcggggctctcgtagtgatgaaacaattgtagatatcagaagcagtgcag

SEQ ID NO: 513485 - DNA, 603 bp, Homo sapiens
agcggagtgtctcgagcgctcgccgacgtgctgccgcggcggccgcgcagagactgctgagcccgtgccgtccgccgcgcaccacccactccggacacagaagcatccagtcatggatgaccaatgagctggttcagataggccaatactgggcgagcaggctgaacgatatgatgacatggcagcctgcatgacgtctgtaactgagcaaggagctgacattctccaatgaggagaggaatcttctctcagttgcttatcaccaatgtgtaggagcccgtaggtcatcttggagggtcgtctcaagtattgaacaaaagacggaaggtgctgagaaaaaacagcagatggatcgagaatacagagagaaaatcgagacggagctagagatatctgcaatgatgtactgtctctctttggacaaagtccttgatccccaactgcttcacacagccagagagcaaagtcttctatttgcacactgaacaggagattacgtaccgtaacttggctgcaggttgccgctggtgatgaccagaacgggattgtcgatcagtcacaacaagcataccaagaagctttagaaatcagcaacaaaggaca

SEQ ID NO: 513486 - DNA, 1180 bp, Homo sapiens
tagatcgcgagcggcgcccttttttatttttttttcttctgaaaaactattctgttaaagtagtgtcacattcatttagtgctacaggatgtgagcagggatgtgggaaaacacaatgtggaaggctcactcccgtgtcggttgtgggaaaacttcggggcatgtgccagtccttcacccaggcaacgagcctcgtgttaccaggcttcaggcacagccttgcctttcatcgtgggactctcgatatatatagtaggttatattatgtggttatatatttttattcatcacctttatgggggcattaggaactaaagagaaaagagaaaataaaaaacaaaaaaaaaagaaaaaacaacatacgaaacgagagagagagacagcaaacagaccacggacaacagcgcgccaacacacagcacgacacccaaggacgacacacacacgacgagacgacagagcgaacaagaacagcacaacgggaacacagagcgccaagagcgccaccacagaacaagacagaaggacacaagcgacacagaagccgcaaacagagcacaccagcagcccaacaaccataagaagagagcgagcaacaaaaaggagacgcacaacgaagcaaaaggcaagacagagcaacaaagaaacagcgcgcagggaggagagccaccagtagaaaaggcaccagcccagccacgcaacaaagaagacccacacagacaacacacagacaagggcgccaagcgcgacgcaaccacggcgggcacagagggcccggcgcgaggagagagcaggcccgcgacggagcgacaccaagaagacagacaagcaaggaaagaaagaacagaaacgaaaccacacacacagaagcagagaacccaagcacaacgacggggcacggcaccacgcacacacggcacaacgaaagaacaacacggaaaaaacaaaccgagcacaggacaaggaaaacaggagaaagcacgcggagcgacggacacgagagacggcgggacggcggggagagacgaggacggaggacaacagaacgacgaggaagagagaaggagaacacaaggctagaagcaacagaaagcgcagcagcaaaggagggaagggcggaagcacgaacgcagagaacgacagagaccaacacagacacgagacagggagcgacaagaac

SEQ ID NO: 513487 - DNA, 1042 bp, Homo sapiens
gctatctcttctccctgcccattgagggaatcagagatcattgatttcttcctgggggcctctctcaaggatgaggatttatgaagattagtgccagctgcagaagcagacccgtgccggaccagacgaccaccgaagttcaaggacatttgcttgctatcaggaggtactacaatggccacgtaaggtctgggcgtgatttaaggtgctccaagggaggtggacctaccagctccgatccgtgtggtgctcatcaatccatggaccaaagctctctcatcgtccccgtgtcgcagaggctgactggtgggagaacaatgactcgagtagagtccccacagctgtcaccttgcagaaggtagacaagagcctgcgtagacagagttctggttgcattgggtaacgcactgcaattcccatggcaccacaagggggtcaactgggcaattcggttcttcccgccacccatgttgccttgaagggaaagctagctcgaatgatcggcgtgggcttatacagatggactagcataacaactctactagaccgctgggggcattgcatacttgagcaccctgggagacagacatttcgctcaatggtcccactctattgagactggcccggtatatcgtcaacgaacccttaacaaggcattaacccttagaacacgcacacggaatccctcattggggaaagggggatggaaccttgggtatttgccgacccaaaaggttcattcccccttatttccaaggggaaaggtttatcaaacctttgagagcacaacccctattcggcgtccaaaagtgtgaacccccaaagaaatcacctagaaaaggggtctctccgccgggttggtcccacgggtcggggggaaacccatccgaaggcgcccttcccccaaggacgattgagttgcggatctttaaccaagaaccaacttaaggggggtatttctcgtctaaattatccgaaagggtataaaacaaaagttgtgacacaagctcttgcgaaactttgtatcatgggccggcttggg

SEQ ID NO: 513488 - DNA, 186 bp, Homo sapiens
tcgcgaacgtgttatccccatgttgcccaggctggtcttggaattcctggactcaagcaatctgtcagacttggcctcccaaagtgcggggattataggcgtgagccaccacccccggccacctttgtcttagtgaatgctattaagtcgttaggttagtgatgtagtcatacaacttttttgttg

SEQ ID NO: 513489 - DNA, 127 bp, Homo sapiens
ccaggagtttgagaccagcctgccagacatggcaagaccctgtctctatggaaaacaaaacaaaacaagattagctgagcatggtgctgtgcgcctatagtccctgctactcaggaggctgaggtgg

SEQ ID NO: 513490 - DNA, 660 bp, Homo sapiens
tggaaacacagttctcgcttcgtgttcacccaggctagagttgcgtgtggccccattctcggctcactgtgcaacctgtggtgccttcgggggtccaagcgattctcccaccttcagttcacccaagttagctagaatttacaggtgcattgccaccacaccacttaagtgttttgggggtttaagtagagcacgggttttccacccggtgtttttgcaccagaccgggtctgtgacttttcaagcttcttttgagcctcaggggtgactcgtgacctcacccttccgccttctccaagagtttgtcgtgcgagaagtctacagggttgttggggccgcatgtgtctgctctgggccttggacacagtggtacgtgctcatcttataagagggacagtgtgtctccccacgaggttttatttcccgaaggttccaccgtggtgtcttccgtgggttgaagtggcgatctagcaggcgaggaattttacgaggcaacatagtttctttcaagaaggaaatttttccccaactaccattcatatgtgcacagtggttgtgcgtaggatacacccattacagcgccttggcgacgcctccaaaggcaagggacaacatttaatcttcttaaaaagggcgtttttggacggggggaaaactcgc

SEQ ID NO: 513491 - DNA, 709 bp, Homo sapiens
  misc_feature (7)..(7): n is a, c, g, or t
cattatnggccggttcgatgacgcagacctgattttagcgcggtccgcgttacgaagtgtatgacggccagcaagacggaccgcttgctcaaggccaagaggacccagatactcaaggctcatcaagctcaagtccatgccgatgaacgaaccaatgtgcattggtatcatcgaagtaacctccgtaaaggatgacgcgctgatgattatgccagagcaggagcagacccgcatcgacgagtggacaaggttccagtcatatgatgctatcagtcacaacaatctttcccgttattgcaggtacgggccacatggagctggacgtccgcatctctcaggacatgaccctggccaagagctacaaagatcatgtgcgcaaagaatactgagtctccagatcgacacgccccaacaagcacatgaacgcgacgggctacttccgatctaagctgtgacgcccaatcattcacaaatcgaaatagaaatgctcaccaactgggaccaaatgctatcggaccgttctactgagagcctcaaccgagcctgcatcgacagctcaacctggcacattcggcacactcccctcgaacattgctcctacattaacacgcctcgagctcttcaccacccgctctgacaacttgcactttaccactcaaccaacaccgctcaagtgccaatcgcgtcttcgccagaagactcacttccc

SEQ ID NO: 513492 - DNA, 255 bp, Homo sapiens
gagggttcagctgtctcttacttttaaccagtgaaattgaactgaccgtgaagaggcgggcataacacagcaggacgagagaacctatgcgctttaattattatacaacgtaactaacaaaccacaggtactaactaacaaactgcattaaaattcggttgggacgactcggagcagaaccaactacgagcagtacatacttagacttcacagtcaggcgactactatactcattgtaccatacttgacacggac

SEQ ID NO: 513493 - DNA, 125 bp, Homo sapiens
ctgaaagcttacttttaaatccactgttaggaatgggcactgtaaaagctatcagctatcaacgtgaacccttacatggtttcctttgatcacatgacatcattatgatttccttatcgcttgcg

SEQ ID NO: 513494 - DNA, 417 bp, Homo sapiens
gtagctcctgcctaagagaatttccagcttagtagaagagacaagcaaaataataaacatacatatgatatgtgctattatatatgtatgaatagggaaatgttggaaaagagaggagccatatataacaaagcctgggcaaggcaggagggttataatgattttcagatatttttgcaaaaagttgtaaggttaagaaaatttctttaggtcatatatacataaggggggtagactattttgggtttgatgtgtctttatgtatctataaaactataaggagctaaagtttagaatcaaatctatttgactggatgaatgttatacgtaaactttgttaatatattttctgaagcattgtagtttttttctatatgcgtgtttgagtgctaataaactcatatcatcctgtaaaaa

SEQ ID NO: 513495 - DNA, 365 bp, Homo sapiens
gggtaatactactgctccatgccaaaccaagcctgctggatactcaccatgtccattatccgcttacaggtgtgcctcaggtgctctctgcagaccttcgattgtacttgaaaacttcacataacaccagcttgttagggtccttacggaaggtgtcccgaaacatggcagcaggcacgagatacatgtcactgttggaaccctcagactgtaaagtactggagccatcaaaattccactcaggcaactcttccacacacttgggctcattgttcaggcctcccttgggatcataggcacccatgtcgcactggtgccgcttgcttagtttctcaatggcctcctcgatgtacttcagaccaccc

SEQ ID NO: 513496 - DNA, 405 bp, Homo sapiens
  misc_feature (127)..(127): n is a, c, g, or t
gtctagagatcgagtgtcatcccccttcgtggacattgatggtaccttctcggaaggcagagtcaattgtaccaccacagatcctggctgaacttaatattggagaggcccagaaaacccccttgtntataaatctgcaaaaattggctggacatggtggcgggcgcctgtaatcccagctgcttgggaggctgaggcaggagaattgcttgaacccggggggcggaggttgcagtgagctgagactgtgacattgcactccagcctgggcaacaagagcaaaactttgtctccaaaaaaaaaaaggactcatttcctaagggtcatgggcttagagcagggttggtgtacttggggaaaatccgggtaattttggacctgaccttacacaaagggggatggaca

SEQ ID NO: 513497 - DNA, 411 bp, Homo sapiens
cccacctggtgccgctatcgccgtttgtctggtgactccggtcttgagctctgcccttgtcctgcctccggtgagggtgagccagtcaaggaggtgggggttagtccccccttgtcagatctggaggggtgctcgccgtgtgcactgccccaggagtctgtaccgcagatctttcccgtggggctgtcttgcagtggaggggacctcccataagtagttttgagagggtggatgggcctctggcccaccagagcacgccctagtcccgactccttgcgttccggtggcccctcctccctccctagaatctgcctgaaagggctggagaggggcagtattgggggactgtgctagctttacccccgcaggacatacacaggagcctttgatttcattaaaaagatgtgaacc

SEQ ID NO: 513498 - DNA, 108 bp, Homo sapiens
ctgtatttttaatttcgaatgtttgtgctttttaaatgagccaagactacgaggggaaactatcacctacaatcagtttggaaaacaagacctacaaagggaagggga

SEQ ID NO: 513499 - DNA, 961 bp, Homo sapiens
acgaagtgctgctaatgtatcagagagtcacgcatggaagtcagacagtgacgaagccccctgatcctcctacaagtgcctggaaatgtccaagagagattgccgacccaggcagactgtgcatgggtctggatcccagggcaacaagacaaagatgaagagagcgaggttggtgcctaacctgaatatgtcttgcataactggtgttcctagccataccatatgaatatgctggtgaacgacagggacatcatgtcagggggccatgtggtccttagatccgtgatgcggtggcacgaagagtcagaccagtacgcagccgtttagactgcagaacatgcaaagacagtctgtgcccatgtggacatcgtgacaaggccagccctcggagtgcccatggaccaagctccaggaatgtgacctatggggcagatggagggccaaggacatcgacgtggactagagagcatgggcaacagcagtgatggcgatgccctccacctctttcctccagatggagtgggacttctctggctctgccctaggttggaaagagttgcattggaccctacttgccttcccgggcaaggataggacctttcaagcaaagtgccatgtttctctaaaattgtggaatcctaatgaagttgttgtctaggagatggcagttcgttcctagctcagagatgagtgaagtgaagtatggtgtgcacacaccgtgttgccatgttcctgtgcgctgatgattactgcccaacgcaatttcctgaacaaatgaacactcttctcaattacaaaagacggcactttactttggcatttgccatctggaaaacctatcctggggtttgagtatggaccgggggtgcctggttggttatgtccccctcttggttgcgtgctataaaccacctaccaaaagggctaccgcggactacaggaccaaaggaagcacaagaca

SEQ ID NO: 513500 - DNA, 300 bp, Homo sapiens
ccgcagtctggggcttggtcaccctagtgaacccacatgtaaatcctactccttgaagatccacaagtacagtagtgctgatatatacaccagatattagtctataacttgatgagactgtggatattaatatttcactcttttctcaggtcctcctctcaccaccccttgaactacatatgaatgatgctgggagaaaacacattgccattgcttggaagcctccagagaaaaatggtggaagtcctatcataggatcaccatgttgaaatgtgttcagtacgcactgtgaaatggatt

SEQ ID NO: 513501 - DNA, 913 bp, Homo sapiens
  misc_feature (605)..(605): n is a, c, g, or t
  misc_feature (662)..(662): n is a, c, g, or t
ggagagaactagtctcgagttttttttttatatttttggcgggtaaatcgggttattttttcaaaacaaaactaaaaatcgccactcaaggtttctgagcagagggcctgatcacggttaaaaggctttctggtgaatggcgcagcaggaacgtcatacgccgggtgggtcaagaaatggagtggcttctgggcgctgctgggactggtgggcccagaagccgggagcaccccttcttctcctccctctggctcatattggtgcttggtggctggccatccaggtcagcaggggaacagccaggcccaatggctgcgctcagggtctggtgggcatccaagagataacagggggtctcccggtccccgacaggtttctggctttggcccacctgggtgggggtacgcgcctgggccaccgaagaacggggaaggggagccaacttgccaggggcccggagctggggttggtgcgcaaaatctttatggggaccccggggagacccttgcgagaaaatctcgtttcgaccaagagcctgaagtctgatcggcgagtatggggctccggaacaaaggtgaggtcgggagggtcaaatttacccgggncaagatccgcaaggccgcccgggaactggctgacgcttgatgagagggacccacggngtcggtcagaaggcaaggccctgatgcaggcggtgggtccgcatgggggtgctggatgagggcacagatgacgcgggataacatcctgggcctgaaggatagagggattacttagagagaacagctggagaccccagggtcttcaaggcggggctgggcaaggtccatcacacaagcaccgcgtgctagatcccgacagggccatataaggggccgaaagcaggtggtgacacatccgggctacaatggcc

SEQ ID NO: 513502 - DNA, 198 bp, Homo sapiens
cctcgagaccaagaggtcgtcacgagggttggggcggccacaaatgtgtgattggttcggaaattgtgatgcctacagccattgaaaaatgaagcattcatgttggaacatcttccaaggatgtcagtttagaaaatagcatcccacatctgggtatctgagtggctatgaagatgcaaataaaataatctgttgtca

SEQ ID NO: 513503 - DNA, 846 bp, Homo sapiens
  misc_feature (129)..(129): n is a, c, g, or t
  misc_feature (580)..(580): n is a, c, g, or t
tgcaggggaaaataactttttttgaaaccccaccaatggcaaaatctgtcccggggctttaagcctcctttcttccttgtggccaatccgggctcttcttttcagggggctccccagtgaaggtgcttntccttctcctcctctccgtgttgctcgtggacatcgggccttgtggcgcaaagacttggtgggggtgggtgctcaagtgacctttagggcgtcaatcttctcgcagagcccgccgctcgacgtgcaccgagcagaggcactgtgcgggaaggggtggagcccaccgcggcttttgtggtggtctcccccgccaaacaacagccctttctcgagcttgtgcacaaaagctcctgtgggctcacttctccacctgttgatgtggcacagacagccccacgccgaagagggttgtgagtgctgtcgtggtctcgagaatgaggtctctatagctcgaggggtggaggccatttgtgtctcttgtgaactcgagcctgtagccggcgccccttgtaatatagaggggtagcccgcgtgggcgcatactcttatatgtaactctctttctcgtggnggtggacactctctcgagagtgggcggggaaagtggttcacgccttgtctctgtggccgcgagcgcggctgtgtgccccatcggagagagatcagggcggctcttaaccagccgagagcacgagggtttagtggccctatgtggcctcctcaatactatagacggagggggcccccacccgtttgttggcgccagagtgcacgcatcgtcgggggggaggcactcctgtggggcagggggggcccaagacaatcccctcttggggg

SEQ ID NO: 513504 - DNA, 667 bp, Homo sapiens
agggggatgtgtgtgtgcgtgtgtgtcagtctgctttgtgagtgtgttaaaggctacagaccacagttggtttaaaatgcttggaacttcccaaactggctttactttatgtttatacagtgctcagggattaacgcagctacatccatgccattgctgtgggaggtatccccggatgcatgtgttcttgagtctactaaactatagaaaatactatattggtttcatttattccaacttaactaggttctattaaacgcactgaaatgacaaggttgcactatcatgcattcaggttattttctaactcctcgcttctgacagtgcatgtctgccggaagcatgctgaaacaagattaacacaggagtcgagtaacagagagaaacatttgttagatgtacagccattggcttatggcatgtaatatagtgtttatacctgggtattgcattcaaaccctgcagacccctccttccccttctccctgcctgggatttactggatcaaggtaatgaatacataccattttgctagtgataaaaactcttaggacgtgaatattgagtgtattaagtagtatatcctagatgtgatgctgaaggaaagtgggctatgaggcctcattcacagttgacatagtgcaagtagagacggtagatattagag

SEQ ID NO: 513505 - DNA, 125 bp, Homo sapiens
gagctggtccgctatcaggcggcagcagctgctgcagctgtcggtttgctctaccaccttgtccttttcaatctccagaagccgctgcagttcggtaaccttgccttccagatcagcaatgcgct

SEQ ID NO: 513506 - DNA, 210 bp, Homo sapiens
tagccacgatcgacccgccgtgtaagcactacttctagctcacgccaaactcgtactccacctgccaagtcacactactccccgtatctaacaagcgtaaaaatcaaatgccagtttgaacatacaaaacccagccccattcctccccacactcatcgcccttaccaggctccacctacctatctcccttttattgctgaataactttgt

SEQ ID NO: 513507 - DNA, 250 bp, Homo sapiens
  misc_feature (18)..(18): n is a, c, g, or t
  misc_feature (24)..(24): n is a, c, g, or t
  misc_feature (49)..(49): n is a, c, g, or t
  misc_feature (74)..(74): n is a, c, g, or t
  misc_feature (105)..(105): n is a, c, g, or t
  misc_feature (110)..(110): n is a, c, g, or t
  misc_feature (121)..(121): n is a, c, g, or t
  misc_feature (132)..(133): n is a, c, g, or t
  misc_feature (136)..(136): n is a, c, g, or t
  misc_feature (150)..(150): n is a, c, g, or t
  misc_feature (175)..(175): n is a, c, g, or t
  misc_feature (189)..(189): n is a, c, g, or t
  misc_feature (207)..(207): n is a, c, g, or t
aggataagtaatataagnaatgcnaattttctcattaatttgaaggaancgttaatagaatcagtctaattgtnaaagacattacatttgaaaaatagaaatgtnaatgnttactgtaacntaatactatgnnagnttagaagctgagtnttcatatttcattataatccttaanagttaaggggattnaggttagtatttaaaaanaatgcttttctgttattttgattaaatataaaaccatactaac

SEQ ID NO: 513508 - DNA, 291 bp, Homo sapiens
  misc_feature (124)..(124): n is a, c, g, or t
ccccccgggggggggggggctttttttttgggtcccccccggcccccccccgccccctttttttttggcccccccttgggggggggggggccccccttgggggccggggggaaaagggcccccngggggggggggggccccccccccggggggggttctcggcccccccccccccccccttttaagggttttttcccccccccttttggggatttttttccgggggggttttttttttttttttttccaaaaggggggaaaaaggggccccccccaggggggtttttccca

SEQ ID NO: 513509 - DNA, 838 bp, Homo sapiens
gaagcttggcgtggttgggtgtgggtatacacgcgggttccacatgcgtatcgaaaagtgtatgtctgttcggggcccatctatcctggacacggcatgaggttcgtccgcaacgtttgccaagggtgtacagatttcgcaaaatctaaatgtcataaataactttagatcatagaagcgccaagtcctcggcaagattaggtggacccaaaacgtcgattccggaaacatgcagctggtatcagcagtcttaaccagatgtgagtaaatctcatatcgacctgttgagaaaaacgtcatgaaaatgaagggtagtcaagataccagcgagagctatggtacataaatacgtattggatgcgcatgaacgagagattgacggagagatcaaatcagaagcgccaagcgtaaatttcataattgaacagatggacagaaaaataaagagctacagaaagttcaggtatatcacagaagtcaaggcaagacatccatcttatccgagccctctgctggcaaagggaacgcagttggaaggacgatcatggtacagcagttcacaagaggcatgtggacagtgggagatcgctccgttaaagatctctgtaaccatattcattctgatgtaccgattgagaagtgcccttcggataccttggaaccgctacaactgtttggtattcctccattaggtcgacttaaattgccacgtgttcacagacatctgtgctggattgcacctactaatatcggagatcgggtgtccgcatgcgcttcagggtaaacgtcatgatcgcgtctcgtaaccagacagtccgagtgcccataacggtggggg

SEQ ID NO: 513510 - DNA, 405 bp, Homo sapiens
  misc_feature (18)..(18): n is a, c, g, or t
  misc_feature (24)..(24): n is a, c, g, or t
  misc_feature (44)..(44): n is a, c, g, or t
ttgcccaaaatggttttnatttangacctaatgtggtcctagtncctagaggattccatactggaatccatcggtttaatattaccgctatttgaaaggcagccatagtatagtacttttggaaaattggcctgagggtgatgtcttttggaatatttgtgaattcactatgaagcctaattccttaaaaatgacctccttcactcaattatcagtgttcttggtttgccctgggagtgaaaagagatcttaaaatctttttggttttagttacataattgactgatgtaatattatgtaatgatggctgtacacagtgtctcatgccctataatcctagcactcatttgagctcaggagttcaaggccagcctgggcaacatggtaaaaccctgtctgcaccaa

SEQ ID NO: 513511 - DNA, 318 bp, Homo sapiens
tcagaacaaggtcattttgcaagagctttgatgggaaatcactaggcatccaccctacagtcctggtttggcaccttctgactttttgtttcctaatcttaaaaaaatttttcagggcagtacatttttctcaagttaatgaataaagaaactgcattgttgtggtgaagaactctctggtctttctcggggatttttctgctgaagctttggctaagtttctcaaaacacccccatgataagcacgttaccattctttggccctacagaaagtcaacaagcaaaatgccttgagcattcaaaagctgttgccatgac

SEQ ID NO: 513512 - DNA, 515 bp, Homo sapiens
  misc_feature (208)..(208): n is a, c, g, or t
cagtcggcgccgcccggagccgggagcgccgctccagcgaggcgcgggctgtggggccgccgcgtgcctggccccgctcgcccgtgccggccgctcgcccgccatgcctggcttcgactacaagttcctggagaagcccaagcgacggctgctgtgcccactgtgcgggaagcccatgcgcgagcctgtgcaggtttccacctgcggncaccgtttctgcgatacctgcctgcaggagttcctcagtgaaggagtcttcaagtgccctgaggaccagcttcctctggactatgccaaagatctacccatgaccccgggaaggcgtgcgaacgatacaacggctacttttgggcgccctggccccttattcccgggcttttggcaattccacacatgtgtgccgtgaacgggtgccttggccggctttgggacggtcggtgccagcgtaacctggtcacattcataaccaagggggcccatcctttggaagttaacccttggcacggcttcaaact

SEQ ID NO: 513513 - DNA, 242 bp, Homo sapiens
tggcgctgtaatgaaccgacagctgcagctgttctctgtggctcacattaaatgctgtgcgctggtgtacgcataccaaaagtcaagcaaaaattgacccacactatatcataaactctttcaaaggagtgtaaacagatgagccccttcgtgtggagatggctctcacctgtcacttgatctgcctacatgtccgtggctcatttgtggatacttgtggatccatttcccagacaggattt

SEQ ID NO: 513514 - DNA, 138 bp, Homo sapiens
gtaccccccctccccgggtatgtatctagaataccagcttcagcatgtcttacagcaggacttcagcctcaatatctaatccaacgtttttatttccttcttgatgtactgcataaagtttagagattacttcattgg

SEQ ID NO: 513515 - DNA, 515 bp, Homo sapiens
aagtaggaccaagagaatttaatatatacgcctgtgacaaatatgggtatcatagatatattctaatttaacgtgagttaaaacttatgggctctatggacagattttggaacttcacaggaggggcaacattatagtagtaaaggaaactcttaacacctgagaacagaattaatagccttatttaaaggttaataattgatatgagtaataatgtctggaaaacaaaaatacaataataccctctggtataggctgaattgtgtctgttcaaaactcacctgttgaaatcctaaccccactacttcagaatgtgactatatttgaatggggcctttgaagaagtaattaagttaaaatgaggtcattaagttggaccgtaatccaatatcacaagtgtctttattaaagcggaaattgggacacagacatgtactaagggcagtccatgtgcagacacaggtaaagacaaccatctataagcctcagagaggcttcagaagacaccaggcctg

SEQ ID NO: 513516 - DNA, 198 bp, Homo sapiens
gcgactctagtggatctgcctgcttagatagcttggatcagaggtgcgcaccataacgccttgattgttaacatacttgagtagaatgggggtttcaccatgttggccaggctggtctcgaactcctgacctcaagtgatctgtctgcctcagcctcacaaagtgctggggtaacaggcatgagccattgcactccgg

SEQ ID NO: 513517 - DNA, 283 bp, Homo sapiens
ggtcactctagagatccccgtctgtgactacccagggtaatacctttcatttatgtgtgtatatatatttatatttatgtatatatatttatatttatgtatagattttgtgtacatattttatatatttatatacatatttatgtatatatatatttatatattatgtgtatatatatttatgaatatttatgtatattatgtatatatgtatatatatttatattcttccatctatattcacttaagtgggtagtcacagacggggatccttagatcgact

SEQ ID NO: 513518 - DNA, 247 bp, Homo sapiens
gtttcccttttttgtttttttggtttggtttggtttttaaccaaagataaagggaaaccgacttaagccagccgttagcccatgtggccaaagaagcttcttggggattaaggggccttggaaaatccttcttaaaaataaggttcttaagcccctcctcccggaaaccggtggaaaaaaaaaggtttaaggtttttaaaaaaaaccggttcctccctaaggaataaaaaattttttttacctgaaa

SEQ ID NO: 513519 - DNA, 256 bp, Homo sapiens
ggtcactctagagatccccgtctgtgactacccagggtaatacctttcatttatgtgtgtatatatatttatatttatgtatatatatttatatttatgtatagattttgtgtacatattttatatatttatatacatatttatgtatatatatatttatatattatgtgtatatatatttatgaatatttatgtatcaacgtagatctagatatgatccatgaattcgtaccttgagatactggaaccccctgca

SEQ ID NO: 513520 - DNA, 418 bp, Homo sapiens
  misc_feature (367)..(367): n is a, c, g, or t
  misc_feature (378)..(378): n is a, c, g, or t
  misc_feature (400)..(400): n is a, c, g, or t
  misc_feature (411)..(411): n is a, c, g, or t
gcaggaaatggccagctacctaggtggaagataggtcatggagttaccgtactcctacttacgtgcttaagcgcatcataaggttacaggcagggcttgagatcatcactaataaacatcaaatgcattagatttactgacccagcaagctacaaaaaatgaggaatgctatctatcagaacagattagctttagactatctcctagcccagggaaggaggagtatgtgggaaaattcaatctaactaattgttgcctggggaaattcaatgacaatgggaaagacatttatgggaaataacttgccaggattaaggaaatttaaccccacgttcccgtttcaaacgtaggaaagggtggtcttccnggttcttctcnttttggggggctgttttttccntttttccgggngggttcc

SEQ ID NO: 513521 - DNA, 185 bp, Homo sapiens
catcacttggcttcatattgcatatcttgactctgccctatgcctgtatatgtactatgcatgtaacaggcgtatatatatttatgaatatttatgtatattatgtatatatgtatatatatttatattcttccatctatattcacttaagtgggtagtcacagacggggatccttagatcgact

SEQ ID NO: 513522 - DNA, 1037 bp, Homo sapiens
ggtgtgcgggctcagtgatggggcgagcgtggtgaggaaccctggactctcagagatggagatttcaccgtgttgcctagtgctggtctggagctcttgatctcaagcgatcctccctgccttggcctcccaaagccctgggattgcaggtgtgatgccaccattgcctgggtctagagtgtgttgccttttttttttttcttttttttttgttggagagacgggatgtctcgcgttgtgagtctgcccaggcggcaagttgtgtggcggatttgggctgagggtggaaagtcctcggggtcccattgaggaagactcgcagtgtctcccggggtatcaaccgcctaattgtctccgtagcgctcgagccagcctcccgcgagagtatgagcgagtggggagcaactaagagaggagcgccgccagaaccgaaacacgggcggaccgcggggtataaaactacatgcgcaggacttgtaaacagataagattgacagaaaacagcggggggaagtgaaaagcatgtgagagtggacctaattaacgagagaggggaaccatttgtgagtcaaagagcagaccctactcggataggggaaccacaagcaacagtgtggtgagagaaacgggacaagcgcacccactacaatttggatacacaagacaatccgcagtagagggataggtgaaacaaaattataaattttattaaccccccgccaaagatcaaacatatcgatggagtggcggaggtacacccacagtagataaaaacaagccacatgaggcaagtataattagatattatcacagcccgccaataggatatcgcgccccaaaaagacaaacttactgtgcagaagtgagaaattgaacactctccaacaaagataaggcccacgttgtatcccaagaacaagagaaaccccacgtctacagtatagtaaagccccagagatatattacaccaaggtgggacgaccagtagagagaataccccaaccaaccgggatgaaagtagaaagaagatcggtgag

SEQ ID NO: 513523 - DNA, 1398 bp, Homo sapiens
gctccaccgttactactcaagacaagcttagctcaaagcatttactccatagataaagtatagtgcgcattagaacttgaaaccgtggcgctaaatatgcatataggtaccgcaagggcatacacgatagaatgaattagtagcttccagcattaaatatggcgaggagctaactctccctagtaccctttctgcactacatgatatttaacatagcatagataactttgcagagggagacgtcctaaagctagagagcacgccgcggataactcaggacgactgctaacctaagtgaaacgagcctatagagagacacatgcgcgtctatgttagccaaactttgagtgaggaacgacttgactacgggtatgacgcgtgcgagcttagaccgtactcggtagcacctgcgtcgactagcctgggttgacctaagactacgacatctttagatgcagacctttttaacacttttgccctcaggcaggaaaccgctcctaaagattcgcgccgtttgtgcttcagaatgtctcaaagcgtgcatatagggtctccaaccagtcaggggaaacaccaggcattcgctatctgggacactaacttagggcaacgaggaacacccggtttgggttagcacgtacgtaggcttacagactacccacttgattaaagcgaagtgcacaacttaagcctaaggggcgccttacaccacaggcccgagtggcctaccccaagattctacaacgtgaaaaagtccggttcacaaaaaggccttccaaagccacccaccaaccttcaacacgttcatgtgacgaaaaacttcccacgaaaacagccagttaatttacatccctagtaaaactgtacccttaccatcacacaccccaaaaattgggggacaccccaaatttcctaatatccacgacccttacttaagtaaaacccaaaatcataaaactggcatctcacggcttaattatagtggtaacaccacactttgaacaacgacacccaacgttgccatccacatacccggcacaattaaacaacccccttgtactgcttcacatgaaaactctcaaaacataccaacacttgaacaaccttggaaccaaaattgtaaaaataccatgcccccaaaatttacattcctataccaaatattccaatcgctaaccaacacagcttcaacttaactgcacccacccttacaaacatgcacactacccctcaaaacaacacgtcgccacttgccttccaatttcaccggacatccgccgctctacctcaaaactacacgtcgtacccaaacggtaatactttggcgcctaaacatcacatttcaacgcccccgcacccactaggttactaatcccatacgcatacacatacttcaac

SEQ ID NO: 513524 - DNA, 719 bp, Homo sapiens
cgagaataaattttaacacagttagtaaacatcttatatagaagtataaagtggggcctgttgatcataaatgtgtcagagttcacctataataaaatattcaacttgcccgtgagattaaggaatgttgcaataattgataaatgggctaatgtggtgtccgacttggagagtttcttgttttcattgtgctgttgatgctagttctgtaatgcaatggttccgctagcatatattgtagatagtggtgatacagtagtgcacatagtaccaggcaaaactcaagtgctatggcacagcttggtaaatctatcactgggcctcatccaccttatcagattcttgtcttcgtgtgtctgcacgggttctctttaaaaatctgtgatgtcgtactgggttgtcagatttattcgcatcactttccaagtcgaatgtgaataatgtctgaagagtaatgatttccctgagagaacttgtgatccatttgaatataattgaaggtgcatatgtctctggtgtaccatggttgttacatcaagacgggaggaaatctcacatttggacatcaaggacgtgagaccagaagatccaggtccacgacaccgggatttcacattacttgcttaaggattgtatttttaaaaaatgacttatttggctatgttgaataaagtcatggtgttgaacctctatcagggttatcttggtttgggaacgaa

SEQ ID NO: 513525 - DNA, 525 bp, Homo sapiens
aggcagtagtgatctgggtgatgcctgtttccgacttgatgcgatttgatgagatattcctaaagacgcgggtttacctgtatggctacgtgagccaccaggaggtgaaggagatcttcatgcactcgggcctcacccagaaccttctagcacacatatgggccctggccgatacgaggcaaacggggaagttaagcaaagaccaattcgcgttagctatgtatttcattcagcagaaggtcagtaaaggcatcgaccctcctcaagtcctctcgccggacatggtcccgccttcggagagaggcacgcccggcccggacagttcaggctctctcggctccggggagtttactggcgtgaaggagcttgatgacatcagtcaagagattgcccagttacaaagagagaaatattcactggaacaagacattcgagaaaaggaagaggcaatcagacagaaaaccagcgaggtgcaggaattacaaaatgacctagaccgggagacaagcagtttgcaggagctcg

SEQ ID NO: 513526 - DNA, 441 bp, Homo sapiens
ttagcggcgcccttttttttggagacggagtttgctttggtcacccaggctgagtgcaagggcacgatctcagctcatgcaacctccacctccggggttcaagcgattctcctgcctcagcctcctgagtagctgggatcacaggtgcctgccactatgtccagctaaatttttggtatttttagcagagacagggtttggccatgtgggccaggctgatttggaacttctgacatcaggtgattcgcccgtctcggcatcccaaagtgctgggattacagacgtgagccaccatgcccagctgagaatattttagaagagatgggtaaaatatgatggagctagcacacactcccccaaacccagaaaaggtttttagaccttttttctttttccagctccaatttatgacaattctaaatctgtctctcaaattgtttc

SEQ ID NO: 513527 - DNA, 351 bp, Homo sapiens
gggagtatgtacatatgtaaatgagaaatagagacgtgtcaccagatgcattcatttctctggaatgtgtattgtttttattttgcgaaacaaaacaagaacaaaaaaaaaagctgggaactccattcaccggtggaaaaactagatcctgtgggttatagcattggtgagttctcccacgtctgtctctcttcgctcatggtaattatacttcggacccttgagtgggaaagggggtttttggtcctggttttatattttaccttacattgtacatatttacgcttcagtggtacatagtccttggccacctggtggtatttttaaggggtggctaatgggaatataatg

SEQ ID NO: 513528 - DNA, 425 bp, Homo sapiens
ccgtgataaggggcacagaccgcaaagcgacacggccgatgaacaccgaacaacagcagacaagaaaaccaagcacaaacaagaatacaacaagcgcacaggaagacaaaagacaacaaaaggggacaaagagaatatacaagagcggtagcaaatgcgacaaaacaactgataaaaaatgaagctgacaaaaacgacaagaccaacacaagagacacagcataatcaagcagcaaccataacgactatcccaaaaccacatacaagcataccgtaagaggagcatgacccacacgaaagcatatcagaagagcacagacaatggagcgtagcactcacgagaagtcatcatagagtacgcacactactagtagacgacacagacaacacaacgtccacatgacacagaacgacctaacaagaca

SEQ ID NO: 513529 - DNA, 140 bp, Homo sapiens
ctcaggaaagccacatgacagcccaacagggaggcatccccctcctcctcaaggaaggccacaaggaccaccccaacagggaggccatccccgtcctcctcgagtaaggccacaaggatcaccaccagaaattttccgga

SEQ ID NO: 513530 - DNA, 162 bp, Homo sapiens
  misc_feature (87)..(87): n is a, c, g, or t
tctactgtctcctccctgggctaagcaggggagaagcgggctgggggtagcctggatgtgggccaagtccactgtcctccttggcgncaaaagcccattgaagaagaaccagcccagcctgccccgtatcttgtcatggaaaatatatgaggttggaaatca

SEQ ID NO: 513531 - DNA, 147 bp, Homo sapiens
ggtcaccaggactgcttttcactcatggtaaagtggatatagttgccactcaatgaccccattcatatgacatcaactacatggtttacatgttccaagtatgattccacccatggacaaattccatgtgcacctgtcaaggactga

SEQ ID NO: 513532 - DNA, 229 bp, Homo sapiens
aaaagtgctgggattacaggcatgagccaccacactcagctctcaatctccattcttaagtaatgacctggcttcttgtgtcactgagaacaaaagcaatcaaaagaggacttctggccaggagcaggtggctcatgcctgtaatcccagcactttgggaggctgaggcggtcccatcatgaggtcaggagtgcgagaccagcctggacaacatggtgaaacactgtct

SEQ ID NO: 513533 - DNA, 1159 bp, Homo sapiens
cacgactcaacatcctggataccctaagcaaattctctcatgatgctgatccagaagtttcctagtaactccattttctgccatgaggcctggctggcgcagatggataccaataatgcccgctctggctgcaatgctgcgccagtttagctcaactatcagtgccaaggacccaaacaacctcttcatggtgcgcttggccacaggtgcctgacacatttaacgtgaagggcacccttaccctctgcaccataccacagccgaccggacagcttatgagccaggtggccgtggctggactgatcactgtgctatgtctctatcacctggcatgttcgacaacattcattctacggccaatcacacctatgtatcgccatgggcctggtggcatgccatgcacgcccccgaatgctggcttacgtttgactgcagcgagactgcgtgtccaacttgccagctgctctgatccagcgctgaggccaattgcatatgtgaatgctgagtgcggccacggctggccaagccctcaagactaatcactagagtctcccagcacggcaataccaatccccccagaaggtgagctcaggcccaacggatgtacacacgggcacgcacctagggaccacaaggcagggaggctctcataccacgtgcccacccccgcattactgggcacacagcacagggcgaacccctcagccaaagtaaccccacccacctgattgaatcctccctcaaggtcgaacaaaccaatgtgggacacttgtaacccatggccgctttgaactcgttcctccaccgcacggagcagatgcaactccatggatagtacatcaggcgttggcacaatcaggttagagagacatacctttggtaacgacaatatgacgctccaggactagtccctctacaggctcccagacactgaccaaaaccagcggaacacacacacacacatgtgactgtacccaagaacaaaaccagtcacaggcgcccgcctaagatgagatacccagaaagggaaccgcgcaacaacgcaacacgcgcgcacccaccacaacgaggacacaacaccccgaccaagttcacagacacacgaagatcgagttgtaaaaacatcctaaggcgcaacctacaccgggaactgagaacc

SEQ ID NO: 513534 - DNA, 254 bp, Homo sapiens
ccgaaatcgcgcactgcactccagcctggcaatagagcgagactccatctcaaaaaaaaaaaaggccccagggggttattccttttcctctagggcagaacccaaaataaacctttctttatcaccaatgcttgatggtcccataaatgttccacctccctaaatcttcagaaactggcgaaaactggagtggggtacatggtaagcacgggagaaactcagaaccaagggcaggcggtggtaagttcccgtgg

SEQ ID NO: 513535 - DNA, 328 bp, Homo sapiens
  misc_feature (102)..(102): n is a, c, g, or t
  misc_feature (129)..(129): n is a, c, g, or t
tggtggttacgctgtaatccagtatttgggaggctgaggtggatggtacaacttagggtcagagagtcgagcgatgacccatttgacctcccaaagtgctgngattacaggtatgagccacaactcctnggctaaacatgactttttacaaacagttcaactgatctctactttatagagacatcctttaatagcgacaggacataaaacaagctacatgaagaacatgaatatctacagaagacagtactatggagattcattacggatgtgaaaaatgatactcttggtcaacgtccacctggtgtgcgaggagacagccaattac

SEQ ID NO: 513536 - DNA, 458 bp, Homo sapiens
gagatttttacagactagccctcttcctcctagacaattaacccattgatgaactatttcccagcttctccccaagaaaacgtttgtaaggcccgcgctgacccaccgacgcaattttctgctgaggaatgttgactccccacccccaacttggctagaaataaacacttactgatgccgaagccatcagcgatagctattcgagatctctccagcccatgatctcgggtgtcttacactgggaacttaaaagttaccaaaccaaaggcactttcaggttgaggcaaccaaacctttctactgctgttgacatcttcttattacagcaacaccattctaggagtttcctgagctctccactggagtcctctttctggcgcggttcagaaaatggccctagatgaatgagaaaattatttttttttaatttaaggcccaaatatagtttcaataaaatg

SEQ ID NO: 513537 - DNA, 120 bp, Homo sapiens
cgatgtctgcgaactgggaaacagagacggagcccaggagctgagcggcactctcatgtcatgctgtgtctgacgtgggtctgattcctaggtgtcgcagtactccttgcagggtacgga

SEQ ID NO: 513538 - DNA, 693 bp, Homo sapiens
  misc_feature (69)..(69): n is a, c, g, or t
cgcaaaatgcggctaaggagcctatcacacctgtccatgtactacgattggtgaggtgcagtcgctttngattgtttcagtcttgtcatggcagatctgtctcacataggatgaactgtgcagtcactcgatctcggcgtggctgccaagcatgccactgtgttcgcatccttcttagcaagatataggctatcagtctgtagtcagccactcacctagaggcggactacttccgagtgacagctatcagctcatcaatccatggttccagttgatgttaacagcttgttgaccggcacaagtcgttcagcatacactctgtagtgcctgcagaggcattagcctggaccgagggtcatctggtgcagtcagtgcctctgctggccagctatcgactgtggccatggtgacttgggcatgaccacctatagacagcgatgggccccatccctcagcatttcagagatgcgtgtgatgccaggcgttctcattattaccatgagccattgagaaattctagtaacagcctggacctgtgatcattccgttctcttcctcagccacaggtaagagtagcaatgttaagagtggtagcactatcaggtggttgaccttgtccgggatgcgaaagtcagactgcctgtccgaggggtcctctcgccctcagctagcctgtgtgtcgtccactccaca

SEQ ID NO: 513539 - DNA, 806 bp, Homo sapiens
  misc_feature (625)..(625): n is a, c, g, or t
gggcgtttgctgtggcggctaggacccgcgtgcgctgagagacctccgctgctggtgccccgcgacgcctcctgtccctggcccgggcgtctgcggctctgcctgcggcggtctcattgggtggcccccggtggcgcgggctgaggtaggcggcagggcctgctagttcggacgcggcgtgcctgctactggcatttacaggcctgaccccgggagctcgcgccgcgcgcgcggctgacctgccgatgcatcggagactagcgcgtcctttcgaacgctccgacatacagcaccttacacctcgagtcggtgtcagttttgactgacgtgcgttctatacattgcctggaacaaacctttcagaaacatctcccgtttacccttgcttggcacgtcacacgcgcgcgattcctggtaactttcctttgcaccccgacgcttggactctacctgtatgcagtaacccaactgacagtccgtttttccacctgtaaaccaaagacctacgttcattcccggatgccacacttcgcccgattgccataacttctccgcaaacgtactgtcaacgccaaaacccaaacatacacttccagacccccactcctcgccagacccagcaacngttacttctacagcgcaagcaaaacgccctttctacacaccttgccacaccttacacagcttacatcccctgcaagtctcgctgacacacattgtcctccaagacgcacactttccaacacccattttcccgacaccgaacctcacccaacccggcggtttgtcccacatggctattctag

SEQ ID NO: 513540 - DNA, 478 bp, Homo sapiens
  misc_feature (9)..(9): n is a, c, g, or t
  misc_feature (15)..(15): n is a, c, g, or t
  misc_feature (23)..(23): n is a, c, g, or t
  misc_feature (26)..(27): n is a, c, g, or t
  misc_feature (29)..(29): n is a, c, g, or t
  misc_feature (38)..(38): n is a, c, g, or t
  misc_feature (42)..(42): n is a, c, g, or t
  misc_feature (56)..(56): n is a, c, g, or t
  misc_feature (85)..(85): n is a, c, g, or t
  misc_feature (126)..(126): n is a, c, g, or t
tcgtcgacnccggtnctcttcancannanatacctgtncagnccctacttccatanacacttgcagacccagagccccttaccgntgccaggacccaccttctcagtctcatacttgtgcccaggnatgcttccttggacaatgaaagacccagcagctctctgctacacttggctaggtctcctcagatattaaaacccacagctacatttctgttccccagcccacctgcttgaacagtggcccagtgcctcatacttgtgccaggccccacatcctcagatactgacaaacccagatcctcacacctgtgccattctttgttgaacaatgaagactcatcactttgtacctgtgcccattcccaactcctcaggtggtactgacagatccagaaccttagacctgtgcctcaccccacctcctggacactgacaggcccagtgggtcatatctgggcttgaccgatcttctcggc

SEQ ID NO: 513541 - DNA, 347 bp, Homo sapiens
taggtaacatggcacatgtatacatgtgtaacaaacctgcacgttgtgcacatgtaccctagaacttaaagtataatttaaaaaaaaagaaaaaccaaataaatggagacatattccatgttcataaaaaaaaaaaagaaaatggagggtgggaggaaggtgaggatcaaaaacctacctattaggtactatgcttattacctaggcgacaaaataatctgtacaccaaatgcccaccacacacaatttgcctaaataagaaatctgcacatatactcctggacctaaaataaaagttaaaaaattaatgatatttccataaactaactacaaactatctgaaatgc

SEQ ID NO: 513542 - DNA, 896 bp, Homo sapiens
  misc_feature (3)..(4): n is a, c, g, or t
tcnncgctgacaatcaataagaaaagaggaacaagagaaatgaaaagaggcgcggctcggcggtacggttcgctgcaagacaccggcgtgttaggagacgatagaagctatcagcgcggcggggtgagttaaaaaccgcgtgaggttgagacagcaaagcaccataagggggtgagaaacctgctccttgtaagggggtaatgggtcccgccccccggacgagaggcggcccgtgtggggacccgccccgccgttgggaggagggccgcccgctccgtggacaaagtgcgggacaaattgtgcggaagcgtctggcacatatgtggcgagtacgccccaccggtttgccacccaaaatttgttgcctcaattatgtggggccaaaaacccttattaatggggcccctatgaattgccgaaaggaagtagcggcgcactcatgggcccgatgcaatggtgctgcgagacaacaaagaaaatttgtttgggaaacggtacataagccttggacacactggagcgcaatgttattggcgaaacaacaaaaggcgcctatgttagtattggagaactaacaatagaaaagggaagttttctactgagacatgaatagacttgctattccgcaccattttggaattctccattagggagacattgaaacaaactcagggagaaccctatgattcagcacagggaaatcgccctttgcgctggtcgttatttaacgcataaaacgggggctgacaaaaccacaggtggcagaggcccggtgcacaaacattgttttcgcatgatcctgctctggttcataatccctctcgacagctcccatggataagaattctattttgacaagcccagcttaaacaaaaaagtccccacgcccacataca

SEQ ID NO: 513543 - DNA, 198 bp, Homo sapiens
cttacggattcactaggtccgatgatatcaaacgcgggaaaccaggtagttcccctaatggagctcccagggaatattctgccaggggtgcaggatctcgagcaccccatgcaagaaaacttgtaggtgtcgcagtgatatggggcggattttgacggtcacatccaatacaaatgcttctcaaatctccacatcgga

SEQ ID NO: 513544 - DNA, 209 bp, Homo sapiens
cgatcatgcggccttactccaagatacgatgaccaccaagataagaatggtatggaagacacgacagaaggctaagaacaggaaggtaatctatgtgcacctgaccaaatacgcaagaataacaggatcaacaattgaacggcagtgctataagacgtatcaagtaaatacattaaaaaccaaacaagtgattatggaagcactaaaac

SEQ ID NO: 513545 - DNA, 101 bp, Homo sapiens
accctaatcattccaattacctgctatctgctctgccttgaccccgtcaaagcactcaccctgtcattctctttaaattagccaatcggaattagttttgg

SEQ ID NO: 513546 - DNA, 377 bp, Homo sapiens
tccagtagaatcttcagctccaatctcccagcgtcccatctggagatataaattaagaacacaatgatacagagatccctctgtgtcgttgttattaccaaataagtttacttgccgcagtggcactattattgctcacttcaccttactgtcacggtagacttagcacacattgcaactttggtattgatggtcgactcagaggggatttttacattcagggtaggaggataagccagatcactgctaaggctccaagttctgtatattttgcgccattgtagacctgtgataacttcatatcattacctcattcatcatgttgacaagaacagttgatccgactatttaagtaaagggctagcccatctacttct

SEQ ID NO: 513547 - DNA, 577 bp, Homo sapiens
  misc_feature (2)..(2): n is a, c, g, or t
  misc_feature (162)..(162): n is a, c, g, or t
  misc_feature (222)..(222): n is a, c, g, or t
  misc_feature (336)..(336): n is a, c, g, or t
  misc_feature (378)..(378): n is a, c, g, or t
  misc_feature (402)..(402): n is a, c, g, or t
  misc_feature (420)..(420): n is a, c, g, or t
  misc_feature (441)..(441): n is a, c, g, or t
  misc_feature (451)..(451): n is a, c, g, or t
  misc_feature (488)..(488): n is a, c, g, or t
  misc_feature (491)..(492): n is a, c, g, or t
  misc_feature (496)..(496): n is a, c, g, or t
  misc_feature (515)..(515): n is a, c, g, or t
  misc_feature (530)..(530): n is a, c, g, or t
  misc_feature (543)..(543): n is a, c, g, or t
  misc_feature (567)..(567): n is a, c, g, or t
gntcgcaggatagagtgtgaaatctctaagatgttctaacagactgtgaaagcacctctccagccacggctgtctacagggtccatgcttaagcttcactggaactctccatctgcctccgctatgtcacgctgaatgccaaatccttggacttagattctnctagggctgtcagtggtgtaggtacagcttctgtgtaaatcaaaggcccctttccccagnaggatacagacagtgtcaggccaccttgcttgggtaggaagcactggggctggatttcagcccactcggtccctcatctggacagtggctccctcggtgctgaacttgtccgtnggacttgttgtgagcttccccatcccctgtgcttttatgagnaggatgaaatgtcaatttacaagncggtcccagggaggaggntggcaactccccccaactttnggataacaanaaggggtttgaggattggtccaaaacaatctttcttnttnngggncccccctttccttttttcnaaaaagggaccaaangggtttcaaaaancccaaatgttttttgggggttttncccccaaccc

SEQ ID NO: 513548 - DNA, 240 bp, Homo sapiens
gggggggcaaaaaaccccccgggcccgtgtttccccccacagggtttttatttggggatttttgggggcccctggtttttgccctttttttgggtggggcccgcaccttttttttttggttacatttggaaggggggccccccgggccccccccccctttttgggggttgggttttttccccccccccccgggggggggggggtttgttttggggatttttttggggtttttccccccca

SEQ ID NO: 513549 - DNA, 839 bp, Homo sapiens
  misc_feature (34)..(34): n is a, c, g, or t
  misc_feature (68)..(68): n is a, c, g, or t
  misc_feature (98)..(98): n is a, c, g, or t
  misc_feature (120)..(120): n is a, c, g, or t
  misc_feature (126)..(126): n is a, c, g, or t
  misc_feature (160)..(160): n is a, c, g, or t
  misc_feature (199)..(199): n is a, c, g, or t
  misc_feature (203)..(203): n is a, c, g, or t
  misc_feature (211)..(211): n is a, c, g, or t
  misc_feature (223)..(223): n is a, c, g, or t
  misc_feature (262)..(262): n is a, c, g, or t
  misc_feature (364)..(364): n is a, c, g, or t
  misc_feature (495)..(495): n is a, c, g, or t
  misc_feature (513)..(513): n is a, c, g, or t
  misc_feature (525)..(526): n is a, c, g, or t
  misc_feature (556)..(556): n is a, c, g, or t
  misc_feature (599)..(599): n is a, c, g, or t
  misc_feature (613)..(613): n is a, c, g, or t
  misc_feature (617)..(617): n is a, c, g, or t
  misc_feature (622)..(622): n is a, c, g, or t
  misc_feature (628)..(628): n is a, c, g, or t
  misc_feature (633)..(633): n is a, c, g, or t
  misc_feature (708)..(708): n is a, c, g, or t
  misc_feature (712)..(712): n is a, c, g, or t
  misc_feature (821)..(821): n is a, c, g, or t
  misc_feature (835)..(835): n is a, c, g, or t
attaaaatgctaaatattgcaaatttaagctttntcagtatatggaaaagttgaagggaaaaaactgnaatgcttcttcaaaggttaaaaaataaccnagtcttttggtaatttgacccnacgtgntttttggccctaaagcatgtaacctcggggtttnaggcccagaacccacccccctgccaccctcccacccacncccngctcagtncctggcgttggnacacaggcaaggattggcacaacaaaattggctttttcnccctcttaatattgaagaaattcccacatttctcatttggtaatggtgttgtggcctcagatttcttctagtatttgcttctgatgaatgattatggtctanacataaaaaagtaagactaagtattgctgaatttgcagttatgttgtcgtgtataagagctacttccaagtgtggttacaaatgaacccatggaatgatgacttcatgttcttctcgtgggtttgtgccgngctgctttccacataggnattaaatttaannattagtctggtgatttcagttctgtgaaanattttgggatctataccaattaaacattttcatagttctgccnattgtccttccctnaggntccantgctgnttggnggccattctctgcctttttacagtcacctgaacaatgacccatcatctcttgcttgcttgaaatcttgctgaaangttntcatttcctgtttgctgtatgggctcgggtgggatgtttgttggctttgttgtgtttattccccaatttgtacattatttgttgtcctttactactgtaaacagtaaanatagtttggtattntgaa

SEQ ID NO: 513550 - DNA, 815 bp, Homo sapiens
  misc_feature (34)..(34): n is a, c, g, or t
  misc_feature (68)..(68): n is a, c, g, or t
  misc_feature (98)..(98): n is a, c, g, or t
  misc_feature (120)..(120): n is a, c, g, or t
  misc_feature (126)..(126): n is a, c, g, or t
  misc_feature (160)..(160): n is a, c, g, or t
  misc_feature (199)..(199): n is a, c, g, or t
  misc_feature (203)..(203): n is a, c, g, or t
  misc_feature (211)..(211): n is a, c, g, or t
  misc_feature (223)..(223): n is a, c, g, or t
  misc_feature (262)..(262): n is a, c, g, or t
  misc_feature (364)..(364): n is a, c, g, or t
  misc_feature (495)..(495): n is a, c, g, or t
  misc_feature (684)..(684): n is a, c, g, or t
  misc_feature (688)..(688): n is a, c, g, or t
  misc_feature (797)..(797): n is a, c, g, or t
  misc_feature (811)..(811): n is a, c, g, or t
attaaaatgctaaatattgcaaatttaagctttntcagtatatggaaaagttgaagggaaaaaactgnaatgcttcttcaaaggttaaaaaataaccnagtcttttggtaatttgacccnacgtgntttttggccctaaagcatgtaacctcggggtttnaggcccagaacccacccccctgccaccctcccacccacncccngctcagtncctggcgttggnacacaggcaaggattggcacaacaaaattggctttttcnccctcttaatattgaagaaattcccacatttctcatttggtaatggtgttgtggcctcagatttcttctagtatttgcttctgatgaatgattatggtctanacataaaaaagtaagactaagtattgctgaatttgcagttatgttgtcgtgtataagagctacttccaagtgtggttacaaatgaacccatggaatgatgacttcatgttcttctcgtgggtttgtgccgngctgctttccacaataagataattcgaactcttcatcgcgatttagctcctgcgtgcatcttccacgttctgctgaacatactcttcgggatcctataccaagttaaacacttttcatatgctctgcctttttacagtcacctgaacaatgacccatcatctcttgcttgcttgaaatcttgctgaaangttntcatttcctgtttgctgtatgggctcgggtgggatgtttgttggctttgttgtgtttattccccaatttgtacattatttgttgtcctttactactgtaaacagtaaanatagtttggtattntgaa

SEQ ID NO: 513551 - DNA, 1242 bp, Homo sapiens
gcatttctttatgcctggctttgcgccgtctcgaccagccgtggaagccgagcagatatcgagctctcacagtgccggaactcacccagtcaggtcttcgatgccgaggaacatgatggctgcctgtgacccccggccacggacgatacctcacgcgtggctgctgtcttccgtggtcggatgtccatgagaggaggtcgagtgagcgagactgcgttaaacgtggcagaacaagaacagcagctacttagttggaatggactccccagacaatgtcaacgacagccgtcgtgtgacactcacgcaccgtcggggccctcaagcatgggcgagtcaccttcagtaggccaaatagcacaggccagtgccagcgagcgtcattcagagcgccatctcggagaacaaggtctcactgaccaggataccgccgggaagagccagcgctccacatggtaacacagggcgagggcatggacgaagatgcgagtgcaccggagggctgaaagcaaccatgaagcgaactcgtcgtcttgagtatcagcaagagaccaggatgccaaccggcagaaagaggagagaggcgtttcgcgatggaggagagccgacagaggagggcccataaggccagaagccccacagtcacactcaggcatactcagggccccattagccggtattactacaactgcgccctttgcgctcatacccatacaggaaaatgcatgggaaacaggatgaacaatcgacgccaaagacgccccaaagcaccacatgggccactcggaaaaaacgaacgaaactaaacacctggagaagcacaaaaacacagaacaacgacacacaaaaagagcacgacaaacgggacaaaagtgcaccaaaaccgtagtaccgaactgtgcaccacaacacacggacacaacagcgagagaacaataggacgagacaccacaaaggaagacagccacaacaaataaccaacaaatgacagatggcaccacgacttagaataaaccgcccgagagaaaaaacggaacagaaaaaacaacaaacgaacgaccacacaaacaaaacaagagaagagcgggcaccaaacagcggcggagaagacacgaagaacacaagacgcaaaaacaaaagagaaacaccacacacgatagaaagcggaccaaacacagctcgagaaaagaacacgaaaccccacacatcacgacgaacgccgccaccgaagcagccgacaccaac

SEQ ID NO: 513552 - DNA, 101 bp, Homo sapiens
atgaaagaagaaagaaagaaagaaagaaagaaagaaagaaagaaggaaggaaggaaggaaggaaggaaggaaggaaggaaggaaggaagaaaaatagagaa

SEQ ID NO: 513553 - DNA, 277 bp, Homo sapiens
tgtgaggttgacggctggggtgtgctgagcaaggtgcagcatgagtaggagatccatagtgttggtgcaggtccagtgtcatgcagggacccagtgagccccgtatgaagagcttgggttttcattccaagtagcagtgggaagcccgctggaagctcaggcacagtgatgacggtgtgacccagacggtacaccttaagaaagatcactgcaacaggcagcatggacgcattgggtccccatggacgcttggacggggatagcagggatgggttgg

SEQ ID NO: 513554 - DNA, 390 bp, Homo sapiens
  misc_feature (29)..(29): n is a, c, g, or t
  misc_feature (32)..(32): n is a, c, g, or t
  misc_feature (46)..(46): n is a, c, g, or t
  misc_feature (64)..(64): n is a, c, g, or t
  misc_feature (82)..(82): n is a, c, g, or t
  misc_feature (163)..(163): n is a, c, g, or t
  misc_feature (167)..(167): n is a, c, g, or t
  misc_feature (175)..(175): n is a, c, g, or t
  misc_feature (178)..(178): n is a, c, g, or t
  misc_feature (181)..(182): n is a, c, g, or t
  misc_feature (184)..(184): n is a, c, g, or t
  misc_feature (259)..(259): n is a, c, g, or t
  misc_feature (310)..(310): n is a, c, g, or t
  misc_feature (338)..(338): n is a, c, g, or t
  misc_feature (356)..(356): n is a, c, g, or t
ggggccccgcaacccaccctggactccgnccntcctaccctgcgcncagtccttccacctcgangtttacaagccccccctnccacttttttcgctatgtttcttttctgctggaaccacactcgactcatatcgaatataaaatatttgtgtcttcaacagngagnggaagagnggncgnncncgcggagctggccccgccgcctggtactcaagccgcggggacattgggaagggacccccgccccctgccctcccntctctgcaccgtactgtggaaaagaaacacgcacttagtctctaaagagtntattttaagacgtgtttgtgtttgtgtntgtttgttctttttattnaatctatttaagtaaaaaaaaataggttcttaaa

SEQ ID NO: 513555 - DNA, 389 bp, Homo sapiens
  misc_feature (29)..(29): n is a, c, g, or t
  misc_feature (32)..(32): n is a, c, g, or t
  misc_feature (46)..(46): n is a, c, g, or t
  misc_feature (64)..(64): n is a, c, g, or t
  misc_feature (82)..(82): n is a, c, g, or t
  misc_feature (162)..(162): n is a, c, g, or t
  misc_feature (166)..(166): n is a, c, g, or t
  misc_feature (174)..(174): n is a, c, g, or t
  misc_feature (177)..(177): n is a, c, g, or t
  misc_feature (180)..(181): n is a, c, g, or t
  misc_feature (183)..(183): n is a, c, g, or t
  misc_feature (258)..(258): n is a, c, g, or t
  misc_feature (309)..(309): n is a, c, g, or t
  misc_feature (337)..(337): n is a, c, g, or t
  misc_feature (355)..(355): n is a, c, g, or t
ggggccccgcaacccaccctggactccgnccntcctaccctgcgcncagtccttccacctcgangtttacaagccccccctnccactccttctccatcccctccctctccccgcccagcactccacccatactcaccatacctcactccctcatttaacagngagnggaagagnggncgnncncgcggagctggccccgccgcctggtactcaagccgcggggacattgggaagggacccccgccccctgccctcccntctctgcaccgtactgtggaaaagaaacacgcacttagtctctaaagagtntattttaagacgtgtttgtgtttgtgtntgtttgttctttttattnaatctatttaagtaaaaaaaaataggttcttaaa

SEQ ID NO: 513556 - DNA, 133 bp, Homo sapiens
atgcgggaggtagggcggggcgagagagtacaagctccctggcagctgatctgatttgagcacaggtgtgctggagagcaggtgtgtggacgacacatcctccagccacctgtgctcaaatcagatcagctgg

SEQ ID NO: 513557 - DNA, 261 bp, Homo sapiens
ttaatcctggccactccacccctccttttagtttaagccccgcacctcgcacctagactaaagttagcttccacttataagtcagaacaaatgaattttggtttttcactcctatgttacttcacttagaataatgcctctaggccaggcacgatggctcatacctgtaaagccagcactttgggaggccaaagctggtggatcacttgaggttgggagttcgagaccagcctggccaacatggtgaaaccctgtctctac

SEQ ID NO: 513558 - DNA, 1301 bp, Homo sapiens
  misc_feature (1039)..(1039): n is a, c, g, or t
gctgagatgttaaccaggcagtcctggttgggctgttatgactacatatcgctgatacgtctagctggacaccgaatgagggaagctataccgtcggaatatggccctaaggatcgatactccatttccaacgatgagctccaaagggctatggtatgactggtaggggatacagagcgcaatttgcttaccaatatgtatgtcgcattcagaacgaggcgatagaatcgcagagggggcaatgtcgttcccgttcatgcatgaggtacgagagtaacctataactccacgactgtgcgcgattcgcgtggaagcgcatctcgtacgtgcagtagcacaatcgcccaggtggaatgtgagtacaacgtactgcatggaacgactactttttccgcgcgtgagcagtcgaatcgcgactccctgtcgactcaaagctacaggggaacggatccagccagctgcgtgaatatgacggtacaatgggtcatgtcccggcatgaacaaaatatttgacgctagacctaagttgtggcgccgaaggcctggaggagcgacctttgttgtacctcctctaaatgcaaagcccagagggggtgggccaagggcctggcggaatatcgaaccagaggtccatgcaggcagccctccagcagcaccaaatgcctacacgttacattaggccccccggtggaaagctaaggtagcaacaatcgcgtctttacaagtacatccatgtccttggcaatggaatccgaagtctaggaggcacgtggccgtgatatgcttgacttgttcgaccacgagaatcgtaggtctactaggaacaatcgcggccttaataaagccaacaggggggcaacttccccaacgtaggagaagaccggaacgggcagctgaactttgggcaggcgaagcgggggtaccatttccaagttacattcccccccaaggttggcctcccgtatgctagatgcgacccttcgtgctcagagttcctcgcaagcacaaggaagcgtttgatttgacatgacattcgagnaagcggggcctacacccgtgagctgccataaaccccataagatctcggcgctttgctcatagtgaattgggggtccccggacgtcacgctgggaccccatccgtacgcgaagaagacctacctttgcataagacactccttgaccggcgtaatttcacacttttgtgcatcggccatgtggcttctcacggggcgacatctgattatcgtgcccgaagagggtgattcacattagccacccttgagcagagcatgttaagtg

SEQ ID NO: 513559 - DNA, 158 bp, Homo sapiens
  misc_feature (13)..(13): n is a, c, g, or t
  misc_feature (21)..(21): n is a, c, g, or t
  misc_feature (157)..(158): n is a, c, g, or t
ggcagttcggcgntcccgcgngtctgtctcttggcttcaacagtgtttggtacggaacatatccggggggactctcttccagcctccgacctccctccgatttcctctccgcttggccctccggggaccatcttctcggccatctcctgcttctggnn

SEQ ID NO: 513560 - DNA, 818 bp, Homo sapiens
  misc_feature (539)..(539): n is a, c, g, or t
  misc_feature (551)..(551): n is a, c, g, or t
  misc_feature (615)..(615): n is a, c, g, or t
  misc_feature (620)..(620): n is a, c, g, or t
gtgaaaccttgcttagccccagtttatgaagatattctcttatgctttcttccacaagctttatggttttagttttcatttgaagtctctgaatctcaaatgaattttgtgtgtgttgtaaggtgacggtcaagttgtttgttttttcctgtacggatatttcgttgtttcagcaccatttcgtaaggagactttactttcctcatggattctttggtacctttgttgcaaatcaaagactaatacatctatttctgaattttctgttctgttatatgatctatctgtcagtccctatgccagtatcacggtcttcattatgtagttgtgttagtcttgaagtcaagtattaatagtataagtcctccaactttgttcttcttttcaagattgctttgactattccaggtcctttccacataaattatacaatcagcttctcaaattctactttttaaaaaaagacagatgagatttgaatggtatgtgtggagtctattgatcagtttaagaattgacaacactactgtacttttaantctacgaatatngtatatctctccatttatttagatctttaatttctttcaggcaggtttgtagtttcattggggnaattntgccatttattagcatttaattctgaagtagttaataattctgatactattataggatgggattatttaattcatttccaggtatggcaattgtagttacactgaatttattaggtatatttgggcatggtaacactaattttgggtgacccttgggagctaggattatgtgcactgtgtgaaaaattttttttaaac

SEQ ID NO: 513561 - DNA, 327 bp, Homo sapiens
tgggctacccagagaaggaaagagacttgcccagggacacacagccacctccgtcccgaggccaccagaagcccgaccgccaaattcgaattccggctccgtaacttagcggctacttgacctcggtggggtcaccaagtgtgagccctggagctgttacccagaaaagaggccggtggaaagacctcctttgggggtagtgaaagtcaaactggggcgccgcgcgccgggtcccgggtgggtggggcctgggcgtccgcgagaagccgcagcccacgtgcgctccctcgcaggccaaaacctggcgcgccacgcctcggattacac

SEQ ID NO: 513562 - DNA, 516 bp, Homo sapiens
  misc_feature (374)..(374): n is a, c, g, or t
cactggagtcaagatgggatttacttcctctcgtttcaggttatgcatgacatcctgggatgtaagatcacagaatccccctccagcccaccagtcacacgctaccccattcagtatttattaccctggccaggcctagtcctccactccctgcacaggactgagaaggcaatgaaaggtacaaacatgtaccatgaggtcttactaaccaaagtagggctgcccctcctgtcctgacagccccttggtctcccagcatggggaagcgtgaggagttgcccagcagctgagcgagccccccatcaactccgtggcccgcatgagcacgcgagccacaggcagcagaggagggctaaggacgaggacggaagccntacaagctccagttggtctaattaccgccgacgtctgtagcccagcacacagtaggcacgtggagaggactgattcccaggagtaaccacactacggtaccttttatgaagaaaaattagagcataagaatctactacatag

SEQ ID NO: 513563 - DNA, 1500 bp, Homo sapiens
  misc_feature (688)..(688): n is a, c, g, or t
tattccgcaaggggttggccgccaaaacccgggtgtcgggaaaactccccctaaaagccaaagggggaagggaaaagacctcattatctcaccatgtgtggtcgccatgtgggacccgcgtataaattcgcgggacaagtctcccccaccatagcgggcccactcgtgattcttaataaatgggcgggggctctcgacaaaaaacaccatttgaaaaattttgtggaagagagggaggtctgggcggaagagaggggaaagagggtctctcctttcaagttatattgccgcgggggctctggagaatataacgcgtgaaaaagccgtgagagcgcggtgaaagcggtggtattctcccccatgtgtgatatattctctctctgtgtgtgaagacacattgtgtgaacacacacacgacaaaggagatcccactaggtgtgtgacactatatctcacttgtgtgagtgtcgcccccacaggagagccacacagagagagactctttttctcacaaacacacacgtgtgtatctctacgcggggagacacactctctctcaagggcgcagtgaacagcgtgtgtggcgtgtctcgctgtgagaggtgtgtgagagcgagagcgtgagagtgtgtgggagccgagacacttgtgagacagcgcgctgtgggagtatctctctcacacaganaatatgttggggccgagacaccgcgctgggagagaggccgatgattgtctccctctgctcctgtgtggtgctatatacacccacgcgcgttgggggggtgttgttgtgcacaacacacaaaactaataatatgttgtggtgcgcggaggttgttgtttcaacacccaaaagaagtggtggggtgatctctcccccacgatgatgagagcgacaccaccaactcctgataatgaagtgtcgcgtagatggaaaagaagaaacagatcttctagttaggaggggacgacgacactgttgtggtttacacaacagaggcaggacaaactgtgcctcacaacaaccaacactatactaacaccaaattattataaagagcagaacaacacacgatgttggtgggtgtagtaaaaacaaagcacccccccacggaggagaacccagcaaagaaggagagaaagcccacattttatatgtgggtttgggccccccaacaaaaatatatctcacgagtgagggtactatgcagcacaacgtatgtatggtgcggcgacacccccaacaacttagtgatggccctggagtggtgagaacgcacccccacaagaagtgtgttgcgtccctaaaacacaaaatagattgccaccgtgttaggtggtgccacaaccaaaggggagaggaaactcgctagcgaaaaaaagatgatattcacccccccctcgtataaataagagcaggtcatgctgcttacaaaaattcgcgccccatagagtggaagaaacaacacacccagcatgctgctgatatatacagaa

SEQ ID NO: 513564 - DNA, 693 bp, Homo sapiens
tacctcagctatgctgtcttccagttgggtgatctgcaccgtgccctggagctcacccgccgctgctctcccttgacccaagccacgaacgagctggagggaatctgcggtacttatgagcagttgattggatggaagagtagagaagaacatcgttaacaaatcagacagaagctgagctagcaaccccagaaggcatctatgagtaggcctgtggagctacctgtcctgagcagggatgtttacgatgagcctctgtcgtggggagggtgtcaaactgacactcccgtagtacagaagtaggctttctctgtaggtagcaccgatggctaagctagggccccgatcgagctgctcattgtgccccttcaaagcagagacggacgaggtggagagcagcgccgtcatcgatcggtgcaggtagctacggatgtcatgtctgatgaggaaatcgagaggatcaaggagatcgcagaaaactaaagcttgcacgagccaccgttcgtgatcccaagagcaggagtcctcactgtcgccagtctagcgggtttccaaaagctcctggctagaggaagatgatgacgctgttgtggccggagtaaatcgtcggatgcaggatatgacagggttaacagtaaagactgtagaatggttacaggttgcaaattatggagtgggaggaaagtatgaacc

SEQ ID NO: 513565 - DNA, 151 bp, Homo sapiens
tgtgcagagtataaaagagcagagtcatcaatcagcgcggacttctgtgcacagcaagtatatcacaataccccaatgaagacagtccaattcaaagtggagtgaaatgacccttccggtacaggtttgtacactctggacgcaatgtgac

SEQ ID NO: 513566 - DNA, 244 bp, Homo sapiens
ccggcacgagatttttggcataaagatacctaaacccatcaacccagcggagggttgaactgaatttctgggaaataaatttgttttaaaaactaattattttaaaaccacttaattcttaaaaacaatgtcaccagtttcaaaagtttcactttgggaggatattccttaaaaggcatacatagatggtaaagtatcccccccccaaaaaagaattattcagtattataaaacatttactttc

SEQ ID NO: 513567 - DNA, 487 bp, Homo sapiens
gggtccctgcctgctgagctctggcttacacacacattgctagcttcaagttctctctgttaatgtactagttagcagaactaatacttagcgagctcagacatttgtgtgcatttcattgcaggttcttgtgctgcctgtgggctgtccccaggtggcctggaggtgggcaaagggaaagtatcagacacactatgttgtcaaggatggtctcggtactagaggctctccgtgtgggagagcatccctgcagaacccaccaagcatgaacgtggttagcctgaggctgttactgagacagagattctggggctgtgttatgcaacatatagacattctcacataagcccagctcatcaccatttcctcctttacctttcacgtgctgttgcttttcgcattaggctgtgggttcacgctttggggagcccggactgtctgttctctgcgtccgtggtcggcgcctcctgcggggtccccctcggtc

SEQ ID NO: 513568 - DNA, 188 bp, Homo sapiens
  misc_feature (21)..(21): n is a, c, g, or t
  misc_feature (172)..(172): n is a, c, g, or t
aggtgactctagagccgcttntatgaggaacgtcactgggatgaggaacgtcactgggatgaggaacgtcactgggatgaggaacgtcactgggatgaggaacgtcactgggatgaggaacgtcactgggatgaggaacgtcactgggatgaggaacgtcactggcaggcgngcctctaatacctgta

SEQ ID NO: 513569 - DNA, 245 bp, Homo sapiens
  misc_feature (21)..(21): n is a, c, g, or t
aggtgactctagagccgcttntatgaggaacgtcactgggatgaggaacgtcactgggatgaggaacgtcactgggatgaggaacgtcactgggatgaggaacgtcactgggatgaggaacgtcactgggatgaggaacgtcactgggatgaggaacgtcacttcattgtcatgctatggaagccaagctaatccttaacttcagtcggagtaagcctcctaaatccagcatcattgcagattcc

SEQ ID NO: 513570 - DNA, 103 bp, Homo sapiens
atctagaggatccatcaggcgaagatgtggcaccatgagctcatctttctatcacatgctggcgacctccctgcttgctttctggccaagctctcccttttga

SEQ ID NO: 513571 - DNA, 1151 bp, Homo sapiens
ctctaaaggccactagcacccatcccagagctgtcagcaccggcctcagcccaggcggctctctccctgagcttcctgtagccctgaccctctccagcctcagacctgagacagggctggacaaggaagcagagagcagaagaaaagcagaagcgaagctcagatctgctgggaggaagattacattttgtcccctcctggggtcttgcacagtggcaggtgacattcgtgttacaggaatgactgccagggcctgggcctcgtggcggtcttcagctctgctcctcctgcttgtcccaggctattttcctctgagccaccccatgaccgtggcgggccccgtggggggatccctgagtgtgcagtgtcgctatgagaaggaacacaggaccctcaacaaattctggtgcagaccaccacagattctccgatgtgacaagattgtggagaccaaagggtcagcagggaaaaggaatggccgagtgtccatcagggacagtcctgcaaacctcagcttcacagtgaccctggagaatctcacagaggaggacgcaggcacctactggtgtggggtggatacaccgtggctccgagactttcatgatcccattgtcgaggttgaggtgtccgtgttcccggccgggacgaccacagcctccagcccccagagctccatgggcacctcaggtcctcccacgaagctgcccgtgcacacctggcccagcgtgaccagaaaggacagccccgaacccagcccacaccctggctccctgttcagcaatgtccgcttcctgctcctggtcctcttggagctgcccctgctcctgagcatgctgggtgccgtcctctgggtgaacagacctcagagaagctctagaagcaggcagaattggcccaagggtgagaaccagtagcatctgctgtccatcaaggccctgtgctgcaacagagcccctctggggactggaatgacctcctgaccatcaaggcctgcaacagagcccctctgggggactggaatgacctcctgaccactccctcccgggctgctctctccaacatctcctggaatcctttgtgagcctccttcagccttttccctgtgcccgatccaacatgtgacacatgaggactttagagcacaatggatc

SEQ ID NO: 513572 - DNA, 238 bp, Homo sapiens
  misc_feature (21)..(21): n is a, c, g, or t
aggtgactctagagccgcttntatgaggaacgtcactgggatgaggaacgtcactgggatgaggaacgtcactgggatgaggaacgtcactgggatgaggaacgtcactgggatgaggaacgtcactgggatgaggaacgtcactgggatgaggaacgtcactaagctcctgatttcccaacctggttttatggtcctctctgtgtgaagttggacggtggttagtcaaatctctaag

SEQ ID NO: 513573 - DNA, 396 bp, Homo sapiens
  misc_feature (16)..(16): n is a, c, g, or t
gagcgtcgcgcccgtngtcggatacgagctgaagctcgcggtgccggccatcttgaacgacggcggcttcacctgctcggcgatgtacatgagataggcacgcccatacgtgtgatagccgttcaccttctcgtccgacttccaataggtgcccgccgcggggatgctgctcggcgcattcgcgggctctttgaaatcacccgcgggccacgtcgtgatgttggaaggcaagaaataatagagcgcgacggtcaccgcaccgggcatgcagaagttccaataattctgatcggtataagagttgttcgcgtcgtccttgccagagccttcgggttctacgatttgatcgacgacgctggtgtcgagcgttccaggcggcaagctcgcgtctgccgc

SEQ ID NO: 513574 - DNA, 238 bp, Homo sapiens
ggggttgaatgtgccggggacgcgctctcgggtcccctgagggcgctctgtctcctgggactgctgctgagccacgcagcagcgcgccgtacgaccatcatcacgttccccggcgatgttagcccccaaaacggacaaagagttggaagtgcaatacctgaacaccttctatggctgccccaaggagagctgcaacctgtatgtgctgaaggacacactaaagtagatgcagaaattc

SEQ ID NO: 513575 - DNA, 248 bp, Homo sapiens
  misc_feature (21)..(21): n is a, c, g, or t
aggtgactctagagccgcttntatgaggaacgtcactgggatgaggaacgtcactgggatgaggaacgtcactgggatgaggaacgtcactgggatgaggaacgtcactgggatgaggaacgtcactgggatgaggaacgtcactgggatgaggaacgtcactataactgaactcctcacacccaattggaccaatctatcaccctattagaagaactaatgttagtataagtaacatgaacattctt

SEQ ID NO: 513576 - DNA, 271 bp, Homo sapiens
  misc_feature (18)..(18): n is a, c, g, or t
  misc_feature (241)..(241): n is a, c, g, or t
gcagtcttctcccatcangggattttatacattgacctttgttggttatcaaaaagcagtaacgactgatgggacgaagatgcgtcttcgtcccatcagcatcctaccagcctctacagatattttagaaagaacaattagagcagctgtggaacagcacctttttgatcttcagagcagcatagatcatgatcttaagaatttacaacagcaaagtgtggtgtgtaataatgaagcaganagtattcattctcgatgggagcaagatgcg

SEQ ID NO: 513577 - DNA, 271 bp, Homo sapiens
tataggatccacatatgcgagctccattacatgaaactaaagacttcgtgcacttgctggctcttgaggggtgtgacctcggaatagcattgggatcttggagacactgaaaatgggacctatgtctttgggggagtccccgagctcctttctcagctgctgcaggtcccacagcctcatcttgagtctggcctgctcctcctgaagggcgtggagggcggcatccagtggggctgacatgggtctcgggtctgtttgtggaggtagcact

SEQ ID NO: 513578 - DNA, 286 bp, Homo sapiens
  misc_feature (21)..(21): n is a, c, g, or t
aggtgactctagagccgcttntatgaggaacgtcactgggatgaggaacgtcactgggatgaggaacgtcactgggatgaggaacgtcactgggatgaggaacgtcactgggatgaggaacgtcactgggatgaggaacgtcactgggatgaggaacgtcactgggatgaggggtgtaggcacgaaggctagagaaggaagagaagtataccgagggcgtctttgattgtgtagtaagggtggaaggtgattttatcggaatgggagtgacgttcctcatcccagg

SEQ ID NO: 513579 - DNA, 101 bp, Homo sapiens
cctttacctatagcaagtttgaacaaactcacaccaacatgacgcacgtgtcaagaactacgggctgctctcactgcttcaggaaggacatggacaaggtc

SEQ ID NO: 513580 - DNA, 892 bp, Homo sapiens
ctaaacctgtactgtaactaaatattgtaggcaattttaacacaaagtatttagctacaaagtattcatttagctaaacatatctaaacatggaaaaagaatttttcaattgcattataaactcaggatgaccgttgtatctgtggtccatcattgatctaaacattgttatacagtgcatgactgtacgagttaccatggggtttatggtttccaagcacaatcccagacagaatagaagacaattaactattacagtcaaaaacttcttacagctcacataaatctgaatccaccaaatcaaagaacaaaatcctcttcaatatgtgcctgatgcccaaatttcaaaactccaaagtaaatgaatattaaacaagtaacttgccaagacttgggctctccaaagtggagataattaatgctatagaggtccatgtcttcggtgtgccatgcaaacgtggtcttccacatgccaaaatagagatatggggtatttacaccctcaatagaaatgccacactcttcttcaaccacatccaagactgtattgaggcgagctatgttccattcatccacaccctggaatgagagagaaaaaaagagggagaaatcaaatcttactaaaccatgaaagatagcatttactaatcaaaccactatccaccaaaattattacattgtatattctaactaactgaaaactgaaaaataaaacaactcttattcaagagccacatacatatgtccattattattggtcaaagattactaccagcataatgctggttccatacaactatctggtagaaatttataccaaatagcttcctgatgccaaatggaaagtgaaagttacagacccactcccaacttggctgatcctatagatgtc

SEQ ID NO: 513581 - DNA, 855 bp, Homo sapiens
  misc_feature (148)..(148): n is a, c, g, or t
  misc_feature (151)..(151): n is a, c, g, or t
  misc_feature (191)..(191): n is a, c, g, or t
  misc_feature (220)..(220): n is a, c, g, or t
  misc_feature (227)..(227): n is a, c, g, or t
  misc_feature (229)..(229): n is a, c, g, or t
  misc_feature (236)..(237): n is a, c, g, or t
  misc_feature (280)..(280): n is a, c, g, or t
  misc_feature (290)..(290): n is a, c, g, or t
  misc_feature (298)..(299): n is a, c, g, or t
  misc_feature (325)..(325): n is a, c, g, or t
  misc_feature (348)..(349): n is a, c, g, or t
  misc_feature (470)..(470): n is a, c, g, or t
  misc_feature (486)..(486): n is a, c, g, or t
  misc_feature (529)..(529): n is a, c, g, or t
  misc_feature (594)..(594): n is a, c, g, or t
  misc_feature (721)..(721): n is a, c, g, or t
  misc_feature (784)..(784): n is a, c, g, or t
acacgtttgagagctcccagccggcaatcctggacttccagtgctcaaagggcggagagaatctcagcgtgggccaaaggcagctcgtgtgcctggcccgagccctgctccgcaagaaccgcatcctggttttagacgaggccacagntgncatcgacctggagactgacaacctcatccaggctaccatncgcacccagtttgatacctgcactgtccngaccatngnacaccgnnttaacactatcatggactacaccagggtcctggtcctggacanaggagtagtngctgaatnngattctccagccaacctcattgcagntagaggcatcttctacgggatgnncagagatgctggacttgcctaaaatatattcctgagatttcctcctggcctttcctggttttcatcaggaaggaaatgacaccaaatatgtccgcagaatggacttgatagcaaacactgngggcaccttaagattntgcacctgtaaagtgccttacagggtaactgtgctgaatgctntagatgaggaaatgatccccaagtggtgaatgacacgcctaaggtcacagctagtttgagccagntagactagtccccggtctccgattccaactgagtgtatttgacactggactgtttcaataacgatttatgaatgaccttgcctcctctgattttcatatttctaaagttcgttctgcttttaatacnaagcttttcctctggacaggagaagctgctggtcaggcaccctaggactcaggctgactctgnggctgccgaatcctaaaatggagtctgagaaaaaactcatggcacacgttaaaaaaacaatctaacaaaaa

SEQ ID NO: 513582 - DNA, 158 bp, Homo sapiens
agtcatgaaaatccagttacaccgtaaaaaccccggaaatccaaaaaccgcataaaaaaaaggggatcacaaagaaaaagaaaaaagatagaaaaaaaaacgaaagagaaacaatgtaaaaaggaaagagaaaacaacaagaaaaaaggaatatgcag

SEQ ID NO: 513583 - DNA, 465 bp, Homo sapiens
agcacggatacccgtataacgtagtagtagtaggtcgtatcatatagcagattgtcctccaaaatccatctctgactgtggccgagtcaggtacagagtccatcactcctacactatagaaccttttggcctgactgctgtactatgccccctgtgggctccatgcatcagccagaaagagctatactaaaacctcaatacacgtcgtgtctactctacagctcaaaagtaccccaaagccctcttatttactagcatgaaggataaaacccaaagggccccaatgctgcctctgcttacctatatccctccacttcatacacacttcagactgcactgacagtaatgtacatcaactctattcaaagctcatacctgcctacagggccttagcacatatgtaccctcaacctaaaatgtacttctactacatattctcctagtaaagatctaccacacatcata

SEQ ID NO: 513584 - DNA, 473 bp, Homo sapiens
tcagactaaataggctcttctgggtctctgagatccatatgaatttagaatttatctgttctatttctgcaaaagaataacactgctgatttcgatagcggcttatatttgacatctgttagagttgttcttgggtaagtagatgcatactttatcaaaatattatggattcctaaccatgaacacagaaggtctttccatttagttgtgttttctgcaattttttctgcaaagtttagtagttttcagtgttgaagtgtttcgcctcattggtaaagtttattcctaagtattttattctttttgatgctactgtaaatgtgattgtttcctcaattgccttttcagattggtcattgctgatgtatagaaatgtaactgacttttgtgtgttgattttgtgtcctgcaactttgctaaatttgtttattagttctagcagttttatgtgtgtgtgtggaatcattagggtt

SEQ ID NO: 513585 - DNA, 1406 bp, Homo sapiens
  misc_feature (386)..(386): n is a, c, g, or t
cctctttgttcgctgtttgccgttgctttcgcctacggtcgtggtgtttcgctgcgtctccctcatctctgttgtttctccctggtttcctgcttgcacgctcgtgcgcttcttcttcctattttccttatcgtcagtcggggtcccctgctattcgttgtcactttgtgagcgcctcttctatgttcgccggtttctcttgttggtcctccgattccccccaggcgtgtggtgtctctcggagggttttctcctttcttcctgttgttgttctcggctctcagtcgtcccttgcttcctttctccttgtttctgtgatccactggttttctcctccttgtcacagcggctgcttgcctacttgtccgcgaagcctcgtgtctatntcccgggtctgccctttgtgccttatggtatacggggtcgcggttctcttgtggtctgcttcacctttcgtcatccctaattgaaccccgcccaggttttcctacccccgtttaataccgtggtcgttcaatactgttctgtttccctctctctgcttacatgttcttaccccctcatggagaatctttgcagcttcccagcaagcaagtcacccttaggttccctgccccagcctcatctgttgatccccgtacgcctgggttcataaagtccacctgccggtgctccccactgggatagctgccatagtcccgttggcccttacgtagcaagctctatggatcgcattgcccgtgggtccctcttcaggccctgcctagacgtctacccgcccgtggaatgcgcactaggcataaccagcgttctgccacatcactccactgtaactctacctgcacattgtcccaatgtcctaccatggcaacctcacattgttcaacgtccctttctcgtgggtcgttacagtacgagtacaactagcacacaggcagtcacagcccgtggaccagaggctcgagagggctcaggaggctcaggcacccgtccatacactgagggccccgtgggtgggcctggccctgctgtctacgccaatgttatgtccagctccatgttctctccaaatataccgcttgatgtgaattatttgtataaggcataaaccgtgctctttatctgttagacaaacactgatatatcatcaactcgcggctaggtcattctgtttgccacatccctatagatccactcgggtttggcaaaactcaggcagaagtggagacccttctagacatcactgtcagccttgctacttgaaggtacacccccataggctccggaggtgtcatgtccccatcttgccccacgttgtccgtgagattaacccctccactgctgggggtgagctgtactcttcaagacctgccccctcacttataccgagtcaaaatactgtcaat

SEQ ID NO: 513586 - DNA, 353 bp, Homo sapiens
gtagctgttctcggctatgtggctatcaatttagagatgaggtagtcggatcatctgtatatagtagcatctattgatcaaaagggtgatattacaattacatcgagttcacacgcatcctgagtacatcgagccgaagatcggatatgcctgtagtgatctctaaattgcatatacacgttccttgtcgccacttcgggtatactgagattttctcttgcatgcccttaatttaactgctgttgtcttttcctagttgtatttgttgctcatgccattcttgggcatatgtctctttataatcagactggacacgggacttcctattgatatcatcttcagaatccaaatca

SEQ ID NO: 513587 - DNA, 1141 bp, Homo sapiens
cagtgtacctaggggttttctccccagccgtcgcaacacttcatggtgtaagcgtcataccaacctacataccctccctttggcgtcaagtttagcaatcccgtggtatatatgctggtgagttcatccgcccttggatctggagaaaacattaagggcgtccgtgggacaccccatgtctctgggcttttccaaggcacctattcgctgatacgcggacgggttgccccaaaccaatgggacgcctcgtatcggggcaatttcctgggttggttcgtttacaagccgttccacaggtgtgaatgcctggcgtggctgttctaacgactggcctgggggaaccgtgcttcctgctgggagcgcttgcccccgttttttgtatcctttactggctacctcctaagtctctcctcatggaacccatcttattccccctgttccccccgtagaccctcctaggttctagcccggcttctcgtgagattccaagattgttccctctctgttggacatcccaaccctcgcactgtggaacattgtggattacgctatacgtactggcccaaccgaagaactggaatggaacgacttcatggtttcgagcgaccttctgcgccggcattccggcctcgaatacgctgtatagaaactgaactcacggaacataaggaaaggatccatacctcctgtctcaggaaagacaggtgcttaaggtaagatacgggacgggccatggggggctttgcggagagctgttgatggcgccagtggtattgaagactccgccacctcgtcaatgcggggatctgttcccagcccctctgtccgcttgcccctcagcctgggaagccttctatgcaaccaatccgctgtcgacactctcatcccgccatccgccacgcaagactagcacactgggacctctctcttgctgaatagtagggcatgaatttttacgactgcaggctctgcttctccagccccggccgatgggtggcaagctgtgttcatacctaaattttcgggaaggggacagtgaaaagaggaagtgacaggagggaaagggggagacaaaactcctactctcaacctcacaacctaacacctcccattatcagctctctctgcccccattccttaa

SEQ ID NO: 513588 - DNA, 107 bp, Homo sapiens
actttgttctgagcccttctcaggcagaggaggtcggcaggtacacgtgcctttggaaagaaggtggtggaaaaatatggaataatgagcccttctgtcgtcttctc

SEQ ID NO: 513589 - DNA, 311 bp, Homo sapiens
tctagagccttatagtcccagagaacgaaactgaagcgcaggaatcagcagacaggaagatcacggtcatgatcgccaggccggtcatgacagaatcagtgcccatcatccttggatgtcccaactctactacattccccttctcctgagaccaccggatcaagacaaggctcctctcccctctctataccgggtgaggatgtcaggttaggagattgcataatccagggagaccagcgatatcgtagtagcccctcatcacgtgcttgtagagaacctactgccagtcctccagctgtacctcaaccagt

SEQ ID NO: 513590 - DNA, 110 bp, Homo sapiens
ttgtgcatgtgaggatccagcaaggaagcccttatcacaccagatgtgggcaccttctgcttggactttccagcctccagaactgtgagaaatacatttctgttctctgt

SEQ ID NO: 513591 - DNA, 120 bp, Homo sapiens
ataatctccaccctcacggagtcgtcatcaccctggagaggacgaagacagccaaaagagagaagtggtgtcttgtagcacttactagattcacatagtatcatccttctaccagatgtg

SEQ ID NO: 513592 - DNA, 103 bp, Homo sapiens
agatttcttaaaagcagctgtgccttggaaggggacatttctcacagtgtggccccaggcctgccacactacaacagcagagctgcttggtgaggtgaacaga

SEQ ID NO: 513593 - DNA, 600 bp, Homo sapiens
  misc_feature (303)..(303): n is a, c, g, or t
  misc_feature (312)..(312): n is a, c, g, or t
  misc_feature (314)..(314): n is a, c, g, or t
  misc_feature (319)..(319): n is a, c, g, or t
gcgagacctcagaaaaagaacatgcaaagaagcgattgaacgacattgagtgacagtgacaaaatgaccatagacagacttaatgaacaatgccagtgaggagtatttcgaaagtagaacagaaatataacaatactccgccaaccatttgttcaggacgaggtcaggacttgatcgcgcaaaatcccaacattcttgggagtaacaacattgtgtcaaccatccacgaagatgtctgcactgcttgcgggaggaagatgaagaggcactgcattatttgaccagagttgaagtgacagaatntgaagatantnaatcnggttacagaatagattttgagtttgatgtaaatccttactttgaatatatagttctctcctaagtatttcatctgtatgagtgtggtgatccatctgtcgtagtcctccgttatctaatggtaatctggaaaggactttgacgtatcgttcgagtcttatcgcagaattaagcacatctggaatgatgcagcatgaggaaccagagagcttctttacctggtttactgaccattctgacgcaggtgctgatgaggtaggcgagctcatcactgactcgatt

SEQ ID NO: 513594 - DNA, 150 bp, Homo sapiens
  misc_feature (129)..(129): n is a, c, g, or t
actccttccttcctcagaaccatctctattctacaaaacccctctaccatgccagggcacgcccattccagctgaataatgggctgggcacaggggaatttttcagagctaagcctgacgtctactctnaagaatcttagaaggttccca

SEQ ID NO: 513595 - DNA, 667 bp, Homo sapiens
cgttggtctgtccgctcgaagagatattctcagaaaagtacatgagttggaaaacctgagtcttgagttcataagtagcaggttaagagaattgagacccctagactggaaaaagctcattatgggagtgaagtgcatcctttacttgccatgtcttggcaataggttatatccttataccagaaaaaacgagaataagccatcatgctttgctgggagactgtgttttactaaatttacacgagtttatgggtctggttagccagatcttggcagcaatgaaccaaagttgatgttattaatcgacgtggggctggccaggcgcagggtggtagctgcagcgtccgcgtgatacttccaactcttgtaatccagcaggggctccttcatcctgtggcagactgctttgtcccattggggctttggccccagcaacttcacttgcatccttggcgcttgtctctgaactctgtgagaaataaagacagtggcctacactacaggttgagagtagatgcaggagttgaaaggggagtgtcctgtcttatcctactgtcattcaaagccgcttttccaactgtccaggccaaatgagatccctttggtttacgtcatggcttggaacttgccgattagtgtacggtggggccataatgtcctgtacccg

SEQ ID NO: 513596 - DNA, 198 bp, Homo sapiens
tgaggttggaggactagtggggaacagatggtacttgagtctgaagcttagtggcaggcacagggcggggaggggtgtcaggcctggaccatgccaggacagaaagcaggagcagaacactatcccaagaaagacctacggagggactctgcaggcgcagggtgcagcaggaaagtttacacccccggtcttccccag

SEQ ID NO: 513597 - DNA, 372 bp, Homo sapiens
tgtagatcaggggtctccaaccccagagccatggaccagtaccggcctgtagcctgttaggacctgggctgcacggcccgagaagatgagcagtgggcagcgagctttactgcctgagctccgcctcctgtcagatcagtggtggcattagattctcaggagcatgcaccctattgtgaactgcgcatgcgaggaatctatgttgcgtgctccttttgaggatctaatgcctcatgatctgaggtggaacagtttcatcccaaaacaatccccgtgccccagtccatggaaaaattgtcttctgcaaagccggtccctggtgccatgtcatgggttccttgatccttagaacacgtatctcttcatggacct

SEQ ID NO: 513598 - DNA, 1544 bp, Homo sapiens
  misc_feature (941)..(941): n is a, c, g, or t
  misc_feature (1544)..(1544): n is a, c, g, or t
gttgattctgtcgactcacgtcaggtggggcgcctgttctgcttgacgctagggttctacacggtgtgaccacgacctcactctcgaaggagtggtgagacccagcgaggacgcattgactacaagctctcaagtgcatatgtgagctttctctgcttgcgttgctaggagcgctacgtgtttccgtcacggaccgtgcgcgaacgcgctgcacttggctcgtgttcctcatgaaggtatccaatcacttcgcagaacgaggcggctaatatgtctcgttctatctccggtagagcgcatcttgtgtcaaattttgacggagcttacttgacttggtactcgttgtctgcgcacagaggctcacgtgcgcgcgagtcgtctaagaggatacttttgacaacgcaagttgcctttaactagggctcgccttaccttctggtggataccgttagcttgatgtgatgcgcgcgcatatcacaagggaggaattctattttgcggggccttcgagcatttccttttagcggcgttcaatggatgagttgggaaagagccggagagtatgttaatccggcctttgggtgaccgaataggaaaaattgggtcagtcatagggagttattgtccatcccttcgttgaggggaacaatacggacgttccgagttgcatttctgcataccattccccaagggctgtattgtcccgctaaaggtaatatgggggagagtccatcacaaggattgttgtagacaagagtttaaaagtataataccggcctttgggaaacgcccaaattaaaacacctttgttactcggaagcaccagaggtaaatgggttagtgaaacctatagcgcgtatcctttccggaaggagggcaaagccaatgtctacgcttggggaggcgcgacagagtgcggtaccggtacgcgccagaaaggnggggtaacctattggaggacgggtagggctaattgattaagcgaccaccggacggtggtctaggcttatagtgtggaaccgaaagttctatgggcatagaatagaggcgcccagccaaattggcaatttttggagtttcatacccgaaaggggtacacgtttggaagtacctttttgaaagggagaacgctttaaaacccgcgcgggtcagattatagcgcgttcgagacccggggtgggattgtaacggcatattggatatcggcaaatgtaacaacagtcaaatacggtacgcaaacattaagacgcgatttgggcacaacagcggatactttcctataagggcaaaagttccccttttagaggaagctacacatttcgtttggagatttgtgatgccacttcggcacggcgaataaccaaaggtaaaagaggctttgtggaagccgggtgcttcttcgcgacggttagggccaacatatcattagacgaaagaagatgtgacagccaccatatatcccattgtcgccaaggatttcctcatagacacagttattaacagcttatataatccacaggagcacgcctcaaagagagaagaan

SEQ ID NO: 513599 - DNA, 370 bp, Homo sapiens
ttgtcttatccaggagacctcgtccgatggaggatgaagccaaggacgaaaaggcagagcctcaagtagggtactaaatcatgttgggcctctcccccaggcggacccggaggttggcacggttgcccatcaaaccaacatactgaataaaatgcccccaggaccctggggaccccgtccagtacaactaggaccacagatgaggatgctgtcagatctgtacgatagagtgtctgtgacggcctcagaagtccagcaggcagagagcgaggtttcagacattgaatccaggattgcagccctgagggccgcagggctcacggtgaagccctcgggaaagccccggaggaagtcaaacctcccgatattt

SEQ ID NO: 513600 - DNA, 604 bp, Homo sapiens
  misc_feature (198)..(198): n is a, c, g, or t
aagggccgtgtgttttcccccccaaacaaaggggtttttttttttcccggccccccccccccgaaaatgccttctttttataccccaatagggcctttccggtcgccaaaccccaggtggtctctaaaacaaaggatacccggtcccttttttgggggtggggtcccccgcccgagcccttgccccctccccaatttnttaaaaaaaaaaaattcaacatccgggggttgggcccctttcccctcaaccccctgggaaaaaaattttttttttccagggtttggcccccccagggggggttccccccccggggggccccttttttttaagggggccttggtggggctttttcccctcccatattgggggacccggggttccctttcccccccccggccttttcccggggccccaaaaatgggaaccccccttagctttttaaaatttttggttttaccagggaaccccttcccccaactttgggggcccccttccccccgcccttggggggggtttaagtttggggggggggtttttcccttccctaatttttgggaaaggggccccaaaatttttttaaggggggggttaatattttttttta

SEQ ID NO: 513601 - DNA, 569 bp, Homo sapiens
ctggctgcacatggagaatatatcatcagcacatcaaaaagctatccaccatgatcaagtctgcttcatccctgggatgcaagggtggtttcaacaggatgcaaatcaataaacataatccatcacattaattagaaccaatgacaaaaaccacatgattatctcaatagatgcagaaaaggcctttgacaaaattcaatagcccctcatgctaaaaactcaacaaactaagtattgatggaacttatctcaaaatagtaaaagctgtttatgacaaacccacagccaatatcatactgaatgggcaaaagctagaagcattccctttgaaaaccagcacaaggcaaggatgtcctctctcactactcctattcaatatagtattggaagttctggccggggcaatcaggcaagagaaataaataagggttattcaaataggaagataggaagtcaaattgtctctgtttgcagatgacatggttgtatatttagaaaaccccatcgtctcagcccaaaatctccttaagctgataagcaacatcagcaaagtcttagcataacaaatc

SEQ ID NO: 513602 - DNA, 546 bp, Homo sapiens
ggccagcaggcccatcgccatgggtaggcagagttcaatagtggcctcacacaagatcagtcaacggcaaagcaacggcatccagaacaagcttaatgtcagtccataactcgttagacttcacttcatgcacggtatctcttaactaatgactgtgctgtacggaggactccattaataacatggaaatctccactctgaaagcgattcaccatttctgtcagcaagtcaggccatttctgtggaaaatcttctctgccaataatgctaattgcatcacttaactgcttctgaatttgctctgggctgctaagcatcaagtgcactatgttggctttgatggccactcgatcggcttcacaaattttgttgggttcatcttcaacaattctccagttccttttaatatagttttggaatgttactgaagcacatactttgataacattatcctgggacctctccagtaatgtcaaaagcaacagtggatacttctgatttccttcaacagattccagacatttctcagctggacgtcggatggca

SEQ ID NO: 513603 - DNA, 342 bp, Homo sapiens
  misc_feature (11)..(11): n is a, c, g, or t
  misc_feature (85)..(85): n is a, c, g, or t
ggccaccatgnctggccattttttcccttcttatacagaagacaagcttaggaggtaagggaggccaggtgtggtggctcatgcntgagttccagcactttgccgacgggggcgggcagatcacgaggtcaggagatcgagaccatcctggcccaacatggtgaaaccccgtctctactaagatacaaaaaattagctggacatggtggcgcaggcctgtggtcccggctgcttgggaggctgaggcaggggaatcatttgaacctgggaggcagaggttgcagggagccgggatcgcgccactgcactccagcctggcgacagagcgggactccatctcag

SEQ ID NO: 513604 - DNA, 106 bp, Homo sapiens
  misc_feature (50)..(50): n is a, c, g, or t
atggatatgttgccatcattgacccttcattgacctcacctccatgtgtncaatgttccattatgatccaccatggcacttccatggcacgtcaggctgagcacgg

SEQ ID NO: 513605 - DNA, 99 bp, Homo sapiens
cgactttccattgtaaagggcagcatcttatacaaagagcatagctgcctttcattgtggtcatgtaattaaactgacatcattgagcacagctttgca

SEQ ID NO: 513606 - DNA, 178 bp, Homo sapiens
acccagtgcagcatggcaacagggtttgtcaggtggcatgtgtcacatgtgtggccattttcgtggttctgcaccgcagcccacatcttggacaatgtctcacgtgatggcacacagccacaggcccacaggtcatcagcttatgcaacactagtcattcaagcaacagcaaccatca

SEQ ID NO: 513607 - DNA, 343 bp, Homo sapiens
  misc_feature (64)..(64): n is a, c, g, or t
  misc_feature (77)..(77): n is a, c, g, or t
  misc_feature (342)..(342): n is a, c, g, or t
cggaaaggctccagtggttcctacttgatccaaaaaatgtcaagaattaatctaggaggccggncctggtggctcanacctgtaatcccagctctttgggaggccgaggcgggtggatcactcaaggtcaggcatttgagaccagcctggccaacatagtgaaaccccgtctctattaaaaatacaaaaattagctgggtgtggtggtatgtgcctgtagtctcagctactcaggaggctgagacaggagaatcacttgaaccctggaggtagaagttgcagtgagccaagatcatactactgcactccagcctgggcgacaagagtgaaactccaccttgnt

SEQ ID NO: 513608 - DNA, 310 bp, Homo sapiens
  misc_feature (5)..(5): n is a, c, g, or t
  misc_feature (51)..(51): n is a, c, g, or t
caggngtggatttacaagggtgtgaatggcaggaggtgagggtgatcaggnccatttagaggctgcctaccagtgttgaagaaaattgttgacttctatgagctgtagcagcagacagtgctatgcaaggagaatggctgtctcagaagtccagctcctcacatgggtttaaacgtgttgccttttccccctgatacattttgtttaaatccatggtcatcttgccatttagtggtgtggtttaattgcatatttgggttagtctgtatgtaaacatttaacataggtgtctctgcctgcgaacctatga

SEQ ID NO: 513609 - DNA, 930 bp, Homo sapiens
ggactggcggcaggctcgccgcgggcggatcccggctgcgggatagaccgagggccatggcccgctctcccggacccgccggggttgggggcgccgggagcagtctacggctcgggctctagcggggctttcgccttcggacttggggacgtgaagatcaaaacttcgctggggtgggaagcagaggatactccccgtggttatcctcagaatcaccagtgccttatttattcataaagggataataaccaaaaaagtttttgtttaaaaatctctgcaaggcaattccggggtgtagggcaaaccgctggtcaatttgtgcccagtttggacaagatttgcgtcacaggtaaggaggaagctattagcaaatgaaaagggggattgtggaccaggacagaattacattatgccgtctggtatgggaaggctgaaacaagcggggaggaaaccatgtggcgggcattaacaggaatataaccaatttgggaacccatgtggaatctgggtggggcaggatcacatttttctacaggacaaacagggagtgggataaagggtggcaggattaccttctttcttcggtggacaaaagtggttgtggtggcagaccggagtagtctttaacacaggataattaaccttcaacgaaattaggggtcttcgcaactattggaaggacttagagaaaggtgaatacgttcaagagttgtgtcccaaatattcggtcatggggaatgaatggggggtcgcccatctgggtggggttggacaatggttccacacaagaaagacgaaaaaagaatttgggggcggccgaaaatttaacaatgtgggggggcccgagagaatgaatgtatgtgttcaagaagcgctgtatgggtttcacaaaacggggcgttgaaacgggtggtgggtaagaagaagcag

SEQ ID NO: 513610 - DNA, 414 bp, Homo sapiens
gcctcagcctcccaaagtgctgggattagaggtgtgagccactgcaccaggctgttgttggcatattttaaagctagatctagacattgacactgagtgtttaattaataagaacattcttatgttcttattaattacacgcctgtaatctcaacactttgggaggctgaggtgggtggatcacgaggtcaggagtttgagaccagcctgatcaacgtggtgaaaccccggtctctattaaatatacaaaggttggccaggcatggtggcgggcgcctgtgatgctggctgcttggaaggctgaggcaggagaatcgcttgaaaccagaaagtggaggttgcagtgagccgagattgcgccactgcacttcagcctgggtaacaagagggaaactccatctcaaaaaaaaaaaa

SEQ ID NO: 513611 - DNA, 297 bp, Homo sapiens
tgggcccaacagggctgcattgcggccacacacgtgaggttgctccccaatgagatgtggatctgtgtgtgtgcacgtagcgtgggagcatccccgccttgtgttggatctgtgtccccatggaggagggaggtggggtgtctcccccaagcacagcactcaagtcttcacaggacaattacatggcggacatggacgagctttcttctcaggtggatgagaagaggaaggttagtgtgtgtcgcttgctgacaatggctggcaggtactcgtgcagtgccccttttcgggtaccga

SEQ ID NO: 513612 - DNA, 428 bp, Homo sapiens
gctctgtgtgggaactcaacctccacacagctaccatgagtgcaatgtagctctgtgtaggaactcaatctccaaacagctaccatgagtgcaatgcagctctatgtggaaactcaacctccacacagccaccatgagtgcaatgtagctctgtgtaggaactcaatctccaaacagctaccatgagtgcaatgcagctctatgtggaaactcaacctctacacagctaccatgagtgcactgtagctctgtatgggaactcaacctccacacagctaacacgagagcaatgtagctctgtataggaactcagcctccagacagttaccatgagagcagcgcagctctgtgtgggaactcaacctccacacagctaccatgagtgcaatgcagctctgtatgggaactcaacctccacacagctaccc

SEQ ID NO: 513613 - DNA, 406 bp, Homo sapiens
agatcctcatacaggatcccacgcgttaaagttaactattaagagcatcacatttgtttgggtcctgctcacagcccagaatgacaacagccaagtgtttgtgttgcaggatatggacataaatatgtaggaagcgcacatctctgtatacattcattcttgtttgagtctgtcatgaacttcctctggacatccagctgaatgctcatataattcatgtagcatactcttacctgagtgtgctttctctgactcctgaccttacgctacacttgcttgtccctatggggtggggattaggatgtgagaggttcgatccgtttctgcctcatggccaagactttgaatcgtgtctccgtttcactttgacgcggggtacctatctcgtctacctgctcgtgttcat

SEQ ID NO: 513614 - DNA, 456 bp, Homo sapiens
ttgcccctaatgtgaaatgatggggcagacataaaataacaactccagtgattttagtttaaaatgagggaacatggaggggataaaaaagtccttaacccaaaaaagtttggaaaaggagttgggcaaaatccaccaggggttttttagttaggatccccagcctggggctgaccctttgtcctgggggtttttacctttggggtttttggtttgcattttttgaaaccattattatttttcattttcctcccccttttttggggaggggtcctattgccctcaaaaagtttttgagatttatccatgttgttttgggggtcaaaagtttgttcctttagcccttccatggaaagaaggtatcccagttttttgatccctttttgtattgaaaaaaatttgaatgtttccagtttttccttttatgaaaaaaaatgctatgaacatttttgttta

SEQ ID NO: 513615 - DNA, 101 bp, Homo sapiens
gacatatgacactgtctgttagatctgtctttcttccgtattctgtgcagagaagattgttcttctgaccttgtgaaaggcaattaccatgtgttatcatg

SEQ ID NO: 513616 - DNA, 1263 bp, Homo sapiens
ggcttgactcccagcattctcatctcaccttgccatactataagatgtctggtttgtctcatggctgcaagttctggcccgccacggactgggcaccagtcagcaggcatggcattaccagcaacatcacgcagcagcaggcattcacatcttttacattcaatccattccactttcatgcaacacacctggcatgcaagcaattcaaatgcaagcacattaagccagacaaacagtcggttccagcatgattttcatcgtggctagcagccaacagcaagtgccccaatattctctgtcagtcacttctcatgcacagcacatcattcaatcctattaacgtgccatgcagctcatctcacaggcacagctgcgatcactctctggcgtttatcaatcagcatccttcagtgcaccatgtgcacccacaggccagccagatggcttctgcacaacatgggcagcatcttgcaccatgccacagcaaatgcacaatgcacacacagcccattccagcagcatgcacagttggatcatgtaggacttccattcctggcaaccttcggcatgttcgcattccaaccagcagcaacagggcacagcattgttccgaaccagagcattgcaactccacttgcacaggaaactccagcctggcattgcttgtggcttcagtatctgggcttgcagaagaacaacgaacattggacattgacggaagcagattccttctttaaggtgcttcgtgcataggatgaagatacacaaccctcagctcatgggcacacctacgggaagccccagactcagagcgcaagatctcccagatggtggtcactccaggaccccttaacaaaacccacatcacacgaaactctggagaatggataaaacggacagacacactgacacaaacaatgccaaccacccggagcactccgatcaatgcccgcagaacatacaggccatacagagcccacgggatcacgctagcaaaataccggacaccacaaacggaacagactaccaaggacgcagccacaaacaggaacaaaatgagggccacacacagcaacccacaaaccgaaaggggccgtgagaaacccaggacgaaccagcacaacgcgaaaagcaaaagcgcaagcgacacagcgcaagcagccagcgccaacacgccacaagcgacaacacacgaccacacaacacaccccagacgcccaacatgcaccgccaaaccaccagaactcagaggcgcgcgcgaag

SEQ ID NO: 513617 - DNA, 843 bp, Homo sapiens
cttcctgaaccagatagaagttcaacgagaagtatgtctggaataagagagaatagcactgagtaaagggagtcctctgggagaagtggttgaacatgggaataactagcggtgtgaggaacgactcacagatgcaagttggaattgtgcttgaaagatgctaaagaggcaaagttctttgggtatgtttcagctcctagtggccgttggactggaatcacattgctctttggggaatgaaccactctgagataagagaagataaatagcccgatttgcccccgaggaattagcacttgttcacaacttgaggaaaatgatgagaacatgactaggcatggaggcgccatgtgtagtcggttttgagccagactgggtctctctttaagcccctggaaagcctagtctggccccaggagttgctgggaaagctcctaacagaagaaagggaactatgacgagctgctgttcctaagtaacagcgaaccccctcagctgctggagcggcagctgtgccttacctctaagccgaagatcactagcatgttgaggaagcacagtggacatctgctttatgcttggacccgagtaaagatgaggaagtcgggcagtacacaggaagaggagccaggccctttgtacctatgggatggaacaggactgcaggttggctctggaccgtgcattaaagctgggtttgcaagggtgaatgcgtgaaaataagatattcccttgttcgttagactttatatcaggtgattggatgtggctttcaacatttaagataattaagggccttttcgtaaagaatagaaaatcttctaaggggtgggttcgatcata

SEQ ID NO: 513618 - DNA, 351 bp, Homo sapiens
tgtttgagcctgttgagatcgcgccgcactccagcctgggagacagaacgagactccgtctcaaaaaaaaaaatttagctgggcattggtggcagacacctgtaatcccagctaatcaagaggctgaggcaagagaatcgattgaaactgggaggtggaggttgcggtaagccaagatcaggccattgcactccagcctgggtcctgctaccttgaaggacagcatagctaaactgcgtggcccaagggacagcatgaatgcagaatatagctttcttcacttgtggcctattggcatagctgcccaaggcctccagtggccgacttcatggcttggtggtctccatctgt

SEQ ID NO: 513619 - DNA, 383 bp, Homo sapiens
aaacctttgtgggaaaaaaaaatcccctttgaaactccgacttccgtggataccccataatttaaaattatgtgaaatgttttaaatttgggaactcggaaatactggtttaaagattccgtttcttcaaagtgggaattggataaaaatgctattgcagccttaccttccaaatgatgggcccgtaaacccaggagttttccccgtttgtaaaaaaaccttgtaaaaaattgaatgttttattttaaaaaggtccttagtttcctgttaccccttttgttagtctgggttttgttgcctaacggggttaaaattgttctttaaaaaagttgatgctatgttatggaaaacctttttaataaaaggtgtgttattagccgtta

SEQ ID NO: 513620 - DNA, 414 bp, Homo sapiens
gctcgacaacgtgctggacaagtgtcaacaggtcatctcgtggctggacgccaacacctaggccgagaaggacgagtttgagcacgtcaggaaggcgctggaccaggtgtgtaaccccatcatcagcggactgtaccatagtgccggtggtcactggcctccaggattcggagctcaggcgtccaagggagggtctgggtcaggccccaccatctgaggaggtagatgagatgcctctccaagattagctgcctctctagtggatcttcgagactgtgcacatcctagtagctcggaacggcagtcctccagtgcctgtgatggcaatgagggaatttagtcgtgaagtactggacctgcagcattgccggtatctacatgcagagatgaatttatactgccatcttacgacta

SEQ ID NO: 513621 - DNA, 1181 bp, Homo sapiens
  misc_feature (1181)..(1181): n is a, c, g, or t
gccaaggagcaggctccagacgctgcttaggaaccggggacccgggagtgcccgcaccctgagctctcagctccggaggcgtcatggcagagtacggaactctccttcaggacctgaccaacaacatcacccttgaagatctggaacagctcaagtcagcctgcaagggaggacatccccagtgagaagagtgaggagatcaccacaggcagtgcctggtttagcttcctggagagccacaacaagctggacaaagacaacctctcctacattgagcacatctttgagatatctcgccgtcctgacctcctcactatggtggttgactacagaacccgtgtgctgaagatctctgaggaggaggagctggacaccaagctaacccgtattcccagtgccaagaagtacaaagacattatccggcagccctctgaagaagaaatcatcaaattggctcccccaccaaagaaggcctgaacaagggggaggaagaggaggaaggttggatcttcatcagaccactcccttccccatcctcaatgggaggggctagggcaaccccctgctccgtacccatttactaacttggtcctaacccttactatgcgcgtgtgtgtgcgtgtgcgcacgctctggctgtctgtctgtctagctcatctagttcctcctcctcatgaggggctcggcggcagcgaggggggggcttaaattcccccgattattaggggcaggtggcaccgctttcctcttgtggaccgagaattgggcattctcctccttttccccttcgtcactcttcccacatctcttggagcgcacggcctggtgtgccaaacggggagcccggcggcacaagagcctcgcgcaaacgcgtgggttcttaccagacaccacgtggggagagcacagggaaaagaggcgcagcaacacccacccggggtgcgggcgctcaacaacaccggcagacgggggtgagcttcaacatcggacccgggtaaaaacccacggggtctctcgaaacaaacagtatagaagaggcacacaaccaagaatgagcgaggagcgacagccacttaaataaaagcacgcgcctcatcacctcgaacgaagtagacatgtgatgggacccacgcgaacacaattgctaccgcgcgtgcggacacaacagcgtacctagcggn

SEQ ID NO: 513622 - DNA, 263 bp, Homo sapiens
caaaagcgcatgaatcatcttaaaacatatctagatataagctatggatatgtacaatatataaataaataacataacatagcacacagttgatgcaaatagagttagagaaaagaaacatacaagcagaataggtaggctatttagtaagcaaaacagtgtctccctcacattcatcaaatccacagccatttagcatggagcttcattcatcatttacatttatgcaatcaatcacacacataaacgcatgtaaatcatag

SEQ ID NO: 513623 - DNA, 136 bp, Homo sapiens
  misc_feature (3)..(3): n is a, c, g, or t
tgntcgtcggatagcccacaggcagtctgggtttaaaagaagcagaaggctgcggggatagatggaaggagggctggtggagttaattgtggttacatagtttcaatggtattaactaaaattaagccccctccac

SEQ ID NO: 513624 - DNA, 96 bp, Homo sapiens
gccctgtatctctgtgccagcagccaagatgaaagggagggacagggctataatgaaaaactgttttttggcagcggaacccagctctctgtcttg

SEQ ID NO: 513625 - DNA, 293 bp, Homo sapiens
  misc_feature (172)..(172): n is a, c, g, or t
tgcgaaagtatatccccatctgaggaaggctgaggtctcagaagagcgatgagaggcagggtgtgtgcattgcgctaagtgagatcatgaagtccaccagccgggatggcgtgctgtatttctctgaatccctcgtgcccacggaaagggaaggctttgtgtgaccccactncaggaggtcagagaggcggcacgcaagactttcggagcaggtgaattccaccaatcggccaccaggttctggaggacattctcccatttttactaaagcagctggataaacacgttcgcaa

SEQ ID NO: 513626 - DNA, 566 bp, Homo sapiens
tgttctagaggatcccaatcagttaacaagttaactccttgaagaagggggtgggtaaggagtccttaatgtcttacaaatcaagggggccagatggagttcgtccggctttctcagctaagcgagagttttagtcatgtggaaacaaggctaggtgattaagagagcaaaagggagagtctaaaaacagggttagtaaaaacaatgttgggcattacattcaccacccatgttttcggggaatcaaatggttgattcctcagttattaacaagggtgtcatattgagtcttaagatacgtaagtttgacagaagctatgcgtggttttataaaattaagaaacgaatttaatatacaaggcccaaaaattaaacttaatagtaggatgaggagaggtccagctaacccagtgattaaagtagttagccatgggttccagttaaacatgctttgataccaggggatgttattttctcgttcttgttggtgcctatctcgattttctcgaacttttttttactgtaccttttatgactccagattggtgtaaacgggtaccgagctc

SEQ ID NO: 513627 - DNA, 174 bp, Homo sapiens
gtgtcatggaggcctacgagcagggtcaaaagggacccctgaagctgaaaggcgtcgcagagctggggagtgaccacgcggaagaagagaaagagggacaaagacaaagcgaaactcctggagcaatgggacgagcaaaagacgaggaggagagcggccggcctggcaagcgga

SEQ ID NO: 513628 - DNA, 1473 bp, Homo sapiens
  misc_feature (87)..(87): n is a, c, g, or t
  misc_feature (163)..(163): n is a, c, g, or t
aacacagcgatcgatcctcttctagggtcatccggcgagcgatggagggcgcggtccggccagcgcagggatggagtgagtggatantcgggcggagcgcggatcgactcagatgagaagaaccttctcgagcaagtggtcgaccaaggagctccgcgacttnacaggcagtgggcagaacacagtggccaccacgcgaggacgcgtgcttacacgccttgcgcgagtctgtcgtcgccgtgcacaggcgcagcacgacgaggcctgttgaagtggcgcttggcgacgaatagtggctcaaagacaaggtatctcccctattggtagtgcgacgaagcgatgcgacacgcaagtatgtcgacatggaggtaggagacaactaccatccaactcccgtgagacaagctaacgcccacgactacggcaaaggccatcgagccaataccgcgttcgaccacgaaatcgtggcgaggaccaggatcgaatcggagaattggagagacatttcttggggacgaactcacctaacctccctttccataacctaatattggcaagacttcggcagttgggtcgggggccttccacggcaggggcaaggccagctgcgcctggcttggcgttgcccatgcaacttggttaggcgccgccgcttcttagcgaatgcgcgccattcggtactccataactgtactgaagacagtgagtggagccacgggacaatccaaatgtctctgtgacaagagccctttctatgaccacccgctaatgtggcacctgactactgcaattagacaagtcatttctgaggaggcattggtggcctgaggcgccccttgcgctggactggcaccctcattggaaccccgcctacacccagagggtggcggtctagtcccgttggccagtggggcgacagtcatccggtgggaaggactcgcgccgcgggtcaaagcccctggcaacgtaggtgtgccgcccatctgtgacacgccagcgggagtgaaattagtgcccggtgctacgcaattaggacatttggcgcgagtgccgcttaaggcggatacctaattgtgaacacccgtgtggggcgcttggaagcgccaacgcgcgaaaggcttagggcaacatttaggagagtgacccgttgcccaccttaggaaaacacaatattccctatttaaacacagacaaggttggtcgggggctttagacagtggacagtaggtcgaacccgcgatgccgcaattgtggaacccgccatgccatgtgtggaaacagtctgagtgccctccttggatagcatcccacggggagaacacagtcgttggatgaactagaacgttcccctccaaggggaagcctgtttggtattcaaaagagacacatttggtgggcgcaagggagactcggacatttccacggagatcacacttcgtcgccatgaaaagacgcctatacaaagtggtgtcc

SEQ ID NO: 513629 - DNA, 394 bp, Homo sapiens
acatttagcatcaaagctgagctagctatgcacagcaccagctctggagggcctcatttaactagatcagggacctaatcttgggcttggaattgagcttcagagcacgcaagcctggctctccagagagtgttccatacggaaccaatatgctttgaacagattttgctcgctagactcgcttaagacatccaaagttggcttttggtgactgtcactcagaatcttgactgaaaattattgccataagataatgtgagatttaaccgcatttctagcaagtcggatgcgcttgatgcacagatgcacattagctaatagttttctctatgcgtgtttgtgtggaatgttgcgggcacaggataccagcaacaaccaccagttatggataccc

SEQ ID NO: 513630 - DNA, 226 bp, Homo sapiens
atggcgcgcaaagtgatcccatcgaggcgagccagagcctgatggccaagttcaaacaggagcgtgaggacaataagtacttcctggacacccggtcatggagccagctttcataattcagcacttcgcagggaaggtgaaagatgatatcaaggacttccgagagaggaatacggactacatgcggccagacatcgaggacctgctgcggagcagtgacagctac

SEQ ID NO: 513631 - DNA, 162 bp, Homo sapiens
gaacccggcttctcaacgcgctccgcgtcatggagatcccgggagcttttcaagaaagtcaagcttgagcaataacggcagaactggggaattcagagagcaaccaatgtcacctaccaagcccatcatgtcaacgaggacaagagaggtcaagtggttggg

SEQ ID NO: 513632 - DNA, 389 bp, Homo sapiens
  misc_feature (13)..(13): n is a, c, g, or t
  misc_feature (220)..(220): n is a, c, g, or t
gtttgctgtgcgntggtccccagtgcggcccttggtttttgcagctgcctttgggaaaggtgacgggcagctgtttgatttccagaaaagctcccagaaacccccagttttgatcaagcaaacccaggatgaaagccctgtttactgtttggagttcaacagccagcaaactcagtttttggttgcgggcgatgcccagggcccagtgaaggtgtggcancttagcacagagttttcgggaacaagggccccgggaagttgaggacctggactgcctggcaacaaaggtggcggcctgaggggtcccgggaggggggggcaagcctttgttgtgccgagccttgtgtttttgacgcaagccaaatgaaaaaaagcaaagctttggggga

SEQ ID NO: 513633 - DNA, 362 bp, Homo sapiens
  misc_feature (168)..(168): n is a, c, g, or t
  misc_feature (346)..(346): n is a, c, g, or t
gataaccaaatgtggtatgtccatacagtggaatattattcagccataaagaggaatgaagttctgacacatgctacagtgtagatgaaccttggtagcattatgctaagtgaaggaagccaaacacaaaaggacacatattgtattcttccatgtatagcaaatgtntagaatgggcaaatccatagagatggaaaggagattagtggttggcaggggtcgggtgcaggggaatggggagtgcagcttcagggtacgaggtctccttttggggatgatacaaatattctggaactgggccgggcacagcagctcacggctgtaaccacagcactttgggaggctnaggagggtgatcactt

SEQ ID NO: 513634 - DNA, 165 bp, Homo sapiens
acacacacgcgagcacagcacgcacgaacacagcacacaccaaacatatatcccacacaaagcacgccacgacaccatacaccacacacacacgacacactacacaaagcacataccaaatacacacatacacacacactacacaccacacgcacaccccacaca

SEQ ID NO: 513635 - DNA, 134 bp, Homo sapiens
  misc_feature (130)..(130): n is a, c, g, or t
  misc_feature (134)..(134): n is a, c, g, or t
ctcagacaagtggtataaaaaataatttatgtgttctgaatggaatgttttcgtctccatagtccaaaagaggaaccaatttctgtcattatcattggtccactgattaatgacgatggactgcgctcancaan

SEQ ID NO: 513636 - DNA, 120 bp, Homo sapiens
gacctccgccgtgcgcatttcctcagcgtcggtgctccacgaccgaatccgggacgactgggataggcccattctcttcctatccctcaacccagacatcattaccgggtttccctctta

SEQ ID NO: 513637 - DNA, 309 bp, Homo sapiens
ctacgagctacacgttcaaccaagtagaccctgaggcgtacgcctaaccgttaccattactgcaggcacacctactcatgcacctaattggaagcgccaccgctagcaatatcaaccattaacctatccctctacacttatacatacattcacaacttctaattctatctgactatcctagaaatcgcatgtcgccttattccaaagcctacggtttcacaccttcatagtacgcctctacctgcacgataacacataatgacccaccaatcacatgcccaatggccactcgcgaacgggaggataccg

SEQ ID NO: 513638 - DNA, 288 bp, Homo sapiens
gtcctactcttagcggggctttaaatcgctttagcctgggtaggcgggttgcagtgagccgtgactgagccactgcactccagcctggcaacagagtgagacagtgtctcaaaaaaaaaaaaaagtggccactttacaattttagcatctaaaatgattaaaaaaaaaaatggtagttgaaaaaaaccatcctgctggtttactcctttttttcattaattacccacattagttttttcagaacctcctatatggcaggatctcaggagttataaagcccccccaaaa

SEQ ID NO: 513639 - DNA, 202 bp, Homo sapiens
  misc_feature (66)..(66): n is a, c, g, or t
  misc_feature (118)..(118): n is a, c, g, or t
  misc_feature (132)..(132): n is a, c, g, or t
  misc_feature (146)..(146): n is a, c, g, or t
tatgtagcgtctgatctctccattaccacgttccatattctccctggactgactcccataattaanagcctcttaattattcccttctgcctgtacttcctaatgaagtccatatttnattctgttttaagntgtcaatctgatcntgttctacctttatttacttcaagggattcccactgatttagggtaaagaccgtcg

SEQ ID NO: 513640 - DNA, 181 bp, Homo sapiens
ctagaggaccccatcaacaataggtttacgaccgtcgatgtttgatcatggacatcccgcatagtgcagccgctattaaaggttcgtttgttcaactgataaaagtcctacgtgatctgagttcagaccggagtaatccaagtcggtttctatctacttcaaattcctccctgttcgacag

SEQ ID NO: 513641 - DNA, 344 bp, Homo sapiens
ctctagaggatactatgttatccccaacacttcgggaggctgaggcgggcggatcacttgaggccgggaggtttgagaccagcttggccgatgtggtgaaaccccatctctactaaaaatacaaaaaaaaaattggccgggcgtggtggtgcacgcctgtagtcccagatacttgggtggctgaggcaggagaattgcttgggctggggaggcagaggttgcagtgagccaagatcatgccactgaactccaacctgggcgacagagtgagactccatctcaaaacaaaaaaaacggagatggatgatgaatggtgttggcgatagtgttgggcgataacatca

SEQ ID NO: 513642 - DNA, 348 bp, Homo sapiens
acagggtctcgctctgtcagccaggctggagtgcagtggtgcaatctcggctcaccgtagcctcaaactcctgggctcaggcgatcctcccgcctcggcctcccgagtggctgggactgcgggtgcatgccaccacatttggctaattttttttttttttttttgcttttggtatagatgaggtcttactatgttgcccaggctggtcttaatcttccgtgactcaaaaaatccttctgacttggccccccacataccttcttttgcataattgcttgaacttctcctttagccaacaccctctgaattcatatgtttgggtaaccctgatggtctaaattgtggagt

SEQ ID NO: 513643 - DNA, 1401 bp, Homo sapiens
ggctcgtgccgaatcggacgaggccttggagtctcatgaaatgcctgatgtgtgacgccatgtccagcaatatctggggtgggcgacgatggtcggggtgaacccatcaggcatgcatggggcgtctgtcgtcccgttcccgacagagggcgagaaccgacatatggacgggtccgcggctcgagacgcgtcctgtactcatgagcgcacggattgtgctcggcgtgtgagatcctcgactgacgtgccgttccttgtgtcatgcacccctgacaccactctgggaagctccgcactagcgtcctgtcgcgttgggacatcgtgggcccatggtccttgacagcacgacagcagtgaatcgcagggcagggacctgccgcagggggcttgggaatttcgtggttcgggggctgtgagcatgggagagaagcgccaccccggggtgtaaggccctctaaatttccgactcgtggcatgggcacggcacacgacgcgaaatggttcagaaagacgtccccgagaagaacacacaaaggggcccccaaggaggaggagccaggcataccacaggggcacaagttagctcacggggaagccattggggtggccaacggggattgacggttccgctgtgggggcgcagaccattggttgcccgcgggaacggcccccaacgaatatcgctatggttggggcgagaggatccccagagaatggcacagcaaccacaaggggaacacggcgcgcaaaataccgattgggggggagccattttcccactagccgcggagcaaaatatcgccatttgtgtcgcacactgagagcccacaccgccatttccaggttgaggctacgtcgggatcgacaccattggggcattacgggaacatgggaaaaaacgccaaaaaggatgtgaatacgtacacgttaggtggagcaaagtgtggcagcaattaccattttggggtaggggttcaagagatttaggggagcaccaaaagatgtgtgaggagcaccatggtgggatggggggtgacaccagagatgtaggaggtatgagaattgatcacaagaggaacagtgattggagtcgagggagcccccatttgggttgttgaggagcaaaattatgtcggcacgttttgggaggggacgactaccaaacaaagagggcagtgagggtttatacaaagcgacccccattttgtagagaaacaacaatagctgtttctgggcagaacaagcaagtgcattcaagggaacaggtttgagtggtgtcatttggtaagaggattcaactgtattggtggtgaagacagcactgttatgaactatttgtgaaagacgacggagcgcactcaataggtgggaagcaatgatacgaaatgagattcttgaggg

SEQ ID NO: 513644 - DNA, 202 bp, Homo sapiens
tgctgggtgatctagaggatcccgtacgcaggtgaagaagcacagaccaacctggccggtgagcagcaggaggcaaggaggcgctgcccatgccgcgcctgagaaggtcaaggtggaggtgaagaagtttgtgaagatcgagcgccgggctacaaagtgaccaagcagagagactcggagatgtggcagcagagcctcctct

SEQ ID NO: 513645 - DNA, 265 bp, Homo sapiens
gaacggcagctcctgcctgtaatcccagcactttgggaggccgaagcaggaggatctcctgagcctaggagttcaagacctgcctgggcgatatagggagaccccatttctacaaaaaatttaaaaattagcagggtgtggtggtgcgtgcctctagtcccagctactcgggaggcttgggtgggaggattacctcaactgggaggtgaaggttcagttagctgagatcacaacactcactccatttaggtgagagaccttcttt

SEQ ID NO: 513646 - DNA, 425 bp, Homo sapiens
ggagcagctctgataaagatttacaaatctacccttctttgatttcctccttcccagttgctgagacaggcatgtctccccctgtgatgagcacctagtgttcctgaggacactctcaatgctaaaccacgccctgccaagagccagtacgtgacaactgggcagtctccacctcatccctgggtgtgattcttgcgaaactttttggttctgggaccactcagaaaactctccagggaaacgatcacaaaagctgactctgggcaggcagaacactgctcactcccagccagaaacccacgggctgatgtttcttttcacaaacatccccagcctacaagactggccaggggatccacctccatctgactgcccagggccgcacttggcaaaacacggaggcagagaaactcaggctagagttc

SEQ ID NO: 513647 - DNA, 207 bp, Homo sapiens
caacattttggaaggttgacgcatttgcttgagcccaggagctcaaggctgcattgatccatgatcacaccactgcattccagcctggacaacagagggagaccctgactttaaaaaaaaaaaattttttttttaatggaaaaaaaagagcctaggagccattggtagattttagggaaaagttacgtcctgccctactgccagcac

SEQ ID NO: 513648 - DNA, 1236 bp, Homo sapiens
ggccagccatctccaacagcatgtgccatgccgtccgacatgccctctccaccaatgcaatgatgtgtgaatgaatgtgcatgtgatgatgatgacacaatgctgtgcaaatgtgatgctggctgatgaatgatgctgtgtgccaatgtactctgtgcgtgccgaagaatggcatgtgttggcgttggatgaatgtgatgtgagaagtgccaatgggctgctgctgtggatgaatgcatgctccatgtgatgctgcctgtgctgcctgtgcttgggagtgatgcaacggtctttaaatgcctgatgcacacgcctgtgcaaggcccttgtgatggacactggcgaggctgtgcatgagatgctctgatgaaataacaatggattgcgcttattgaatgcagtgccagtccaattcgtgtccagttgaaaagaatgaactgttgggcctgaaattcctgtggatgcatgcggcttgggtccgttggtgcaggtggtgcccttggcaacccaacatgcgtcgtccatgggaacataatgaaccaagttgtgtgagcagtgttgctcctggtgtctgggcagggttaaaccttgcctccagagaccaactgtgggactcataataagagtcaacagaggcgggcgtcttcaagaggtcctactctgccacggcatcttggaacttcccccacagttaggagaagtcgcaatgccttgcaagcttgaggcgccatggcgagaaggcatgcaattccgtgggattcggtcttgagtggacggcccaggtactactccgttaccttttgactcgggagtcgccaagacgcggggtcacaattgaccccgcaaccgtgccggggaaccagggatagggtgggcttgatgaaccccctttgggagcaagtgccccaacggttgtgtgtcctgggccaagtgggtccaaggcatttgatgctgacgggtacgtggaaagccggaaacagcagctcattccttcatgcagtgctgttcccgtgtgttccctgcgtactgtgcctctggccagggcccataagcgcctgtgaaggagtaaccctgaaggcggttggaacggttgtgtccccagcgtgttaggtccggggagcgcggaagcgccaaagactggtgaaccacgaatagttgcacccgagagagagactcgggtaccaacgtgctaatgcagtgagcgggaagacgggtgaaaggctaccgggagaccaa

SEQ ID NO: 513649 - DNA, 281 bp, Homo sapiens
gagctcggtaccactgcatccaacgccgcgccacgtcctgctggtgacagacgagcgcggctgccatgtttgtgagtcgccaaaggtcgttcactgacgcagtaacattgtcaatgctcattacatgttatgagaatagggtctctcttcagctctgaagcgaatctgttctctactttacagatcacttcaatgtgaacgtgtaccaccacccctctggtgcgtcacattgtttaggacgcctgctgtgctctatcactgggtgtgctgtcagggtctga

SEQ ID NO: 513650 - DNA, 126 bp, Homo sapiens
gagcctcctctgtctcccccacctgaagcatcacctttttctccactggaggagacgcccttgtttccaccggatgagtcacccccatctcctgcacttgagacgcctatatcccgaccacctgaa

SEQ ID NO: 513651 - DNA, 437 bp, Homo sapiens
  misc_feature (62)..(62): n is a, c, g, or t
  misc_feature (229)..(229): n is a, c, g, or t
gttgccttgggcaaggaaggtgacaagaacgtgctccccacgctaagcttgggtgcccggcnccccgtgttccacgagaaggattatgacagcctggcgcaacccggttttttcgaccgcttcatccgttggatttgcaagcccccccgcccgggccccccagttgagggttgtgagcccaccccgtccatggtgttaagcgggcccgggtcccacacggccagcaccnttgttcactgggaagacgcctggggcttgcacttttccagctcctcccagggggtcccggaagccccggcccccgcccagccccaggtctccccaggccctccgaaggttggcgggcctccctccccctgaagccatcccaaggttcttgacctaccgggcccctgagctttggagcaagccctgacccaataaaggctttgacccca

SEQ ID NO: 513652 - DNA, 1215 bp, Homo sapiens
  misc_feature (294)..(294): n is a, c, g, or t
gcacaagcgttcccactcaccctcaggctctgagtcagaagaagaggagcgggccccacacatctcgtccgcgccccccgaaggcgtgaggaggcggaactcccatcgagatggtcatggcgtcgtgcaggcccgtcgtgtccgtcgacgtctggagttgccagttgacacaggtgggggctgcgtgcgcgcttgtgtaggtacgagggctcctcgctgtcctcccgatctatgcttggcagcgcagcatcactgagcctgtcgagaaagactcatggaaatccaaataagagnagaagagctaaggagggagaaagtacatgcaagatcgtacactagtgtcctgcaagagatggagaaccagcaccgctgtagcgcagagacacgctggagccaatgggaagacgccgagtgaagaagagaagcaaggaatcgaggagcacagggatcatggggacgtctcgcaagcaagggcaagagacgtgcccctgaagccggttaccccagcgccttggcgccacgtcacagagaggagaaagactaggcgtgtggactagcgtcgaggagaaggtgcagcgtgagtgtagggttgagctgggagaggcggagcgtgggacagtcctgacagtgagctggctgcatctaacactgatgcccaatgagctgtttctcctgtgctcgggctctgtggtgtaggccatggggtccctgggccatcgctcatgcgtgctgtcgctcggaactatcttcgctgtagatctggatcgtggggggtccacttattggctaaaaggttaaccgcaatccaccagtacaccatttgttgggggacctaatcaagggtatgctctagcgtgttccaatgggtcccctactccctggaactagtcgccagtccttggcctcagacccaggacagagaatgggggtatatggcaaggtgcgaggtgggctgatgccctttcgaatgacccttgtcatcaccaggggctcgcagggaatcagtccacgggctgttgtgacgccaaccgtggcttggacaaggggccggggtcacaaccggctagaataggtgccggtaccgcagtgaactgggcctatgagaccaccaatttttcctcccccaggacaagcggggatggacagctatgtcgttacatcacgagtatttcccgcacaaatagaaattaataaacaaaccaagacaatagtaaa

SEQ ID NO: 513653 - DNA, 214 bp, Homo sapiens
cgctagcggcattaagtgaacgcaacaacatgtagaatgaacaacaacaaaaatctgagaataaccacataaaaaagagaggaagaacagcttcactgtgcctgtatcacccttctcccgaggccaccgctgttctctgccaagaggaagcttctcagctacagagagttctcctccaggaaagggagagccgttcacttaatgccgctagcgc

SEQ ID NO: 513654 - DNA, 264 bp, Homo sapiens
  misc_feature (167)..(167): n is a, c, g, or t
gggtgatctcatatactctggatataacctttgtcagatatatagttgcaaatattttctcccattctgcaggctgtcttttcactccgtctcaaaaaaataataaataaacaaaagaatttgaattactctagccattatagaaaacagtatagaggtccctcaanaaaattaaaaacaaaactgccatatgatcccacaatcccacgcctggttatatatctgaaggaagtaaaatcagtatgttgcagagatatctgcact

SEQ ID NO: 513655 - DNA, 475 bp, Homo sapiens
gcgaggctgcccaaaaagcagtcagggcaatggcagcgctgactgatcacccctacgcctctctgaccctcccagatgatgcagctagtgactgtctctttctgcgtcctgggttgcctggtgccacacctttcctcctgcaccgcggaggtggggacctgcccaacagccaggaggctctgcagaagctctctgatgtcaccctggtacctgtgtcctgctcagaactggagaaggctggagctggcctcagctccctctgcctgtgctcagcacacgcccccactgctgagggcctggatttggggatcccactggttaggaatagagctgtatagtgggtagaatcagctaatagaggctgggtagttgtggggagatgccccaggatagggaaggacttagtgtggaaaagaatagaagccattgggtgagtcctctctgtcaaaaccaataaaataaaattgacctttta

SEQ ID NO: 513656 - DNA, 165 bp, Homo sapiens
  misc_feature (146)..(146): n is a, c, g, or t
ctgaggacccgttgtcatcccccttcgtcagagataagtctacttcttccatgcgtgatgtgtcgtcatctcctatcaaggggtggcatttcttcagttacagcagcactggtatcaatcaagcagtaggggtcatctttcatcanatacccaagaccaagtttt

SEQ ID NO: 513657 - DNA, 281 bp, Homo sapiens
tggtgtgtcagtagcttcatcacttgtgattccctggtcttctggcgagccgagtcaggcggttcacaaggtcaagagttcgagaccagactgatcaattatggtgaacccgtgtctctactagaaatacgaaattagcgggagctggttgtcacacggctgtagtcccagccacttggtaggctgagtcaggagaatcagttgaacccaggaggcggagagttgcggtgagccgagatttgcgccactgtattccagcctggtgacagagtgagacttcg

SEQ ID NO: 513658 - DNA, 593 bp, Homo sapiens
cagggtttcaccatgttggcccagctggtcctgagctgacctcaggtgatccaactgcctcggcctcccaggtgctgggattataggtgtgagctaccacaccgggacatcatcatattttcaagtttaaccaacattatagcatgtatcagtactttattcctttttatggctaaataatattccattgtatggatatcatattttgtttatccggtatctgttgatgatttgggttgtttccttcttttggctattgtgaataatgcttcagtgaacatttgtgtacaaatatttgtttgaatacctgttttcaatttttttgggtgtacacctaggaatggaattgctgcgtttgttgttgtgtagttgtatgttgtcgttgtatattgagatggagtttcactctgttgcccgggctggagtgcagtagggtgatctcggatcaccaaaagtatctgcttcccaggatacgggtgaatactacactgccatcaagaatcaccgaagtaggctgaggataaaggacatgcagccaccacacccggaataaaaacagagaaaaacagtagagatgggaaaccaccaagaag

SEQ ID NO: 513659 - DNA, 311 bp, Homo sapiens
cctcctcatgtgcttgcccacctcctctgtgctgtcggacagcacagatgaggtcctttaccttagctctcaggaaggagctggtggcatgtgatcttggtactggagtgggtgaaagaactccgggctcccgagctcttgaggagggtggtcctgagatggtttgggaccagagaagaccggaggttgaggttggggaatccacccctcctctgtgctgtccacctcctctgtgctgtccacctcctctgtgctgtccacccctgtgctgtccacctcctctgtgctgtccacctcctctgtgctgtcca

SEQ ID NO: 513660 - DNA, 517 bp, Homo sapiens
  misc_feature (11)..(11): n is a, c, g, or t
  misc_feature (31)..(31): n is a, c, g, or t
acgatgaaacntacaaaaaacaaacaaaaangaattcaacaacatcatgacagttagtgtaactttgcaccaaggagaaggggaagtcccagaactttcttccggcttcacaaagaagtcgcacacaggcctttcaggagagaggccacactggaaatgttcaggacaggacattccagtggcagagaccgctccgagtgccagagttagcacgtggcaggtcccacctcagaagtccagctgtgtagaaagctcctttcagcaaaggacaggcccaagcatagtttaacaacatcagaaaagacagcaagacgggctcctccgaattctctgctccaggtggagggggaccctgtgagtgcgcttggtgacccctgtggagatgcggacagcaggggccactcactgtcctccagcagctggtcactaagtaggctggaggctggaagttcctgttaaccttctagaaaggtgggcctccctgaacttgcaggttcctgaaaagaaaataatgttt

SEQ ID NO: 513661 - DNA, 478 bp, Homo sapiens
gagagatagatgagggacctacggtggcatgtttggtattggacccccgcagagtagctctatggactagatctcatcaactctgtgctgtgtacactgcctggccagagatagctgtattcaccctggactaccatgctaagacaaacagctcagcttctcagcctcttaagcctctgctggctagtttagttctgtaggctggatttgcagggcgcttggatgactctgcccagtgcttccggcactcacagacctgcgtcacaagcctggctttcctgccagtgtgactgcactgccatctcaagtcatctccaaatatgtgcatcttaactcgcgatccacattgcaagatgcttaggaaccagggcccatgctttgtttgtgtccagattcccccagggatacctagcttgtaagagggtacttattagtggttaatgccagtagcctggcttaagaaataaattctctctga

SEQ ID NO: 513662 - DNA, 214 bp, Homo sapiens
ttaactgcaggcttatacttgaagccaggattgtttaagatcatctccacctgcagatggctgatgctgcaggcgccaatagctttcaccagcccttcattcaccagctcttccatggccgcccacgtgtccagaaagctggcgccacatgggaaccacattgcccgactcatccaatgggaaaaattccttcccaggcttaaagccacgtcgc

SEQ ID NO: 513663 - DNA, 123 bp, Homo sapiens
ccctgggttgctgttatttgtgtttagctcggggagggccccctaagggggcgaactgacctcaggcattttttgtaactgtaaaggggcctgccattaaacgtgtcccctgttgtggcgcca

SEQ ID NO: 513664 - DNA, 240 bp, Homo sapiens
  misc_feature (162)..(162): n is a, c, g, or t
tgcgaatgtggcagacctcacttgggtcgggggtgtggagtggaccacaatgttgtgctgggggatgggggggtctctctttgtcgattgtgcagtgcacaagatttgtgacacatgtatatatcagactcctattgcggactgatcagtgggagaggaggncccattaccagcggaaactctgagatgtgtatttcgcctgctgtatttgtaatccactcgtggtggtggctttttttt

SEQ ID NO: 513665 - DNA, 171 bp, Homo sapiens
cacctcaaccagcatagttccatccttaaactgagttcatcaacatcatcaagaggacactatctcctgtgagtcacccccatggtccagagaatctagcccatgatagggtagtcctttacttattgctaacccgtaacctctcagtccaccttttctgtcctaagtcag

SEQ ID NO: 513666 - DNA, 457 bp, Homo sapiens
gtcaacgacgtgggtttgatactgatgaaaaacaccacttaaaggaggcattgctatatcagcgacaataagcaaaagcttgaagggtatgttattctctcaatactacttctccacttcgcaggcatatctattcaggagggcatcttgaaagaggagcagggtcacccacgacttcttatatctcctgcagtgcactggccaagtgtgtgtgtattgatatgcttgaagcccctagggttctcaacatgccaaatcacaaaggggttcaatttgtggactgcaacattgcccccaagcaagactgtcatccagtccctaaaagacttgaagcctggcattgctttggtctacctcatggatcaaagtcctttcaggcatctgtttccagaatagaaaggtttcatccatattgaaaatttgttctggcaagtgattttcctccagactcagctta

SEQ ID NO: 513667 - DNA, 631 bp, Homo sapiens
  misc_feature (125)..(125): n is a, c, g, or t
ggaccggtcagctaggacgcagctcatagcgcagtagtagggaacgacagcacgttatccagccgctcaatccgccctgaacgatcccggcaaaggcgcagccggttgtcatacgcatcgctganggttgtcagcacaccgtcgcgaaagtggtagaaacgcgaggcctgggccagcaccagttcgtcaggcgccgaacccaagtagatcgccgcctcggccaggctattggtgatcgccggtcgagcagaagtcggcaagggcagggtagtcgagcggttctcatggtcagtccacaccaccaaatcgcccgacaccaccagccgatgagccagcgcatgactccagccaaaccccaacccacactcgacttccaccgcactggtgcggtacagccgcgtccactcaaacggcaagattccatccagcgcaccatcggtgagggtcagcaattcctcgccggtgaccatcgacaccgggcagccgttggtaacggtcttgtccgctggcgccgccgcatcccccttcggattcgacgccaccgccggcacatcatccacacgctctttctgcgtcagcactacgttctgccgcgctcgccagcgcatcgcgtccgtagcggccggggatc

SEQ ID NO: 513668 - DNA, 786 bp, Homo sapiens
catggtggctcacgcctgtaatcccagcactttgggaggccaagacaagtggatcgcctgaggtcaggagttcgagaccagactggccaacatggcaaaaccccatgtctactaaaaatacaaaaattagctgggcttggtggtacatgcctgtaatcccagctattcgggaggctaaggtaggagaattgcttgaactcgggaggcagaggttgcagtgaaccgagatcgcgtcactgcactccagcttgagtgacagagcaaaactccgtctcaaaaaaaaaaaaaaaattttttttataagctacttaggaaccttgtggggtggtcagggagggaaaaatggcgcgacaagacagggctatctatatttggcaacaggccccaaataaaaaataccctcaaaacaccggacgtaactggtcacaatttcctctattctacttccatctcataaacaacttggacactcttctggacatttttcccggtttatggaacaacgctatctggtctaaagattccagacagatgtacttctagggtccatattgaccggaaaccacttcctggttaggaacacataccgggaaaacccctattatgtagcaaaaatccggtctcagcgcattgtgtgggagaccatcccaggggcgctgattactcaagcgtccaggtggcgcagaaagatgttccctcaaccaaggggcaccccaaaggaattctaaaattgtccctttagaagggaaacgaccgtggttccctccaagcacttgtcacctgttg

SEQ ID NO: 513669 - DNA, 259 bp, Homo sapiens
acacaggctcgagcgccgatccggttaaccagagaagacatcttgcttgttgggtacagctactgtgtcccagcaattgggccctggaagccttacagtttagtgatgagagacgtgtattctctaaggaatgtgttagaaggattgttagtgattaagccaaagtgagggccttggattcctcacagggtctgattctgtcctcttgcggaatagttagcccgcacaccaccaccttcctcttcagctgtcctccccg

SEQ ID NO: 513670 - DNA, 110 bp, Homo sapiens
ataatcgtgacactgcatcctattttcaaaaaaaaaaaagaataagatggaagggaggaaggaaaaaaaaaccggtttaaaaccttcctctggacctggttcctttcctc

SEQ ID NO: 513671 - DNA, 103 bp, Homo sapiens
tacagccggatgttcacgtctcatctacggtacacaatcatatactatttccctgtcttgacccctattcaagcaactagaggccagcacttgggcaccttat

SEQ ID NO: 513672 - DNA, 211 bp, Homo sapiens
ccaccagaaagggaaggtgctaagttccctattagtggacggctccagaagcaatcaactttggatgtttcactattaagtctgatgtgtggtcctttggaatcctcctatacgaaattgtcacctatgggaaaattccctacccagggagaactaatgccgacgtgatgaccgccctgtcccagggctacaggatgccctttctggtagg

SEQ ID NO: 513673 - DNA, 150 bp, Homo sapiens
gcaaccacgagacggccttccaaggcaatgcttcggaaactggacatcaaaaacgcagacgatgtgaaatcgtttgtctcgaggtgatggatccatggtttttcagccgacggcgtaaacaaaactgggggcaggattgtgactctccat

SEQ ID NO: 513674 - DNA, 645 bp, Homo sapiens
tagcggtccggatgggcatttcaaaacacaatcatgccttccaacagtccccaagtcttactcattccagcattacccaaaagtccaagtccaatgtctcatctgagacaagttatgttccttctgcctatgagcctgtaaaatcaaaagctagtcacttcctagatgcaatggggatacaggcatagggtaaatacacccatttcaaatgggaaaaatgggccaaaacaaagggactgcaggccccatacaagtctaaaatccaatagggcagtcattaaacctcagagttccgaaatgatctcctttgactccatgtctcatatccaagacatgctgatgcaagaggtgggtttccacaaccttgggcagctttgcccctgtggctttgcagggtgcagcctccctgctgatggctttcacaagtaggtgttgcgtgtttgtggcttttccaggtgcatggtgcaagccatcagtagatctgtcattctggggtctggaggatggtggccctcttctcacagctccactaggcaatgccccagtggggactctgtgtgggggctccaaccccacatttcccttctgcactgccctagcagagattctccataagggctcaaccctgaagcaacttctgctgta

SEQ ID NO: 513675 - DNA, 218 bp, Homo sapiens
ccaaaccgggactgatttagatgtaattttaaatttctattctatttttcgcagcagttggttagaggaggaggagcctttagcctctcataaactgacctctctacttctcgtgtatttttagatgattgatgatgtggaagggcttgcttgtctgctactgaaacctttacctgcggtttttggaactgctttggaagagaaagaatgacttactg

SEQ ID NO: 513676 - DNA, 111 bp, Homo sapiens
  misc_feature (69)..(70): n is a, c, g, or t
cttacaggagcttcgaggactggatgacataggacttgaaggtgacatgctgttccacagtcactcccnngccttccgtgtgcccccacttgcccacttccagagacttcc

SEQ ID NO: 513677 - DNA, 1699 bp, Homo sapiens
aagcagtggtatcaacgccagagtgcccaattacggccgggacttctagaggccgaggcggggccgacaatgttgatgtgaatgacgtggacactatgctggtgtcgcagagggacgaactcctgagacacacgagcaagcagcgcgaggacacagtgacgcacagcagaaagaagagcaccggaccgccccactcgaagcagcaaccgcgaaccaggatcgcccaccccggcagacgcccgagggcccaaccaacccgggcactcacatcaccccagggccgtacccaacaccggacaccccgacacactccaagagacaactgcaaccccgacacaccagcacacacaagcgcacaacagtttacagccacgaacggcacgcgaggcccacaaccagagggggaaccacgagaacaacagctaaacacagaaagcgacacgagggcgacggacgcgcagcccaacacccaatgagcgtacggcgacggagcagcgcgaacgcacaggcgccacagacccccgccgacgcagacaacaacaagacaagagaaagggcaaaaggcacgaccacgaaaaagcgaaggagagcgcggccacggaaagaggagcgacggacagagcaagaggaacagagaacgagaccgcgacgcagccctcggcgacggcagaagagcaaacgagcgcacgacgacggcagaacgagaagagggacacgacgcggaggacggcgagagggccgcagagcacaaaaccgaggacggagagaggcggggcaggcaagcccaacagcaggggagaacgacgcgccagcgacacgacagcagatcaacgcggcacccaggcgcacacgcgagatgcgcgtacagaagaagcgctacaaaaggaaacgacgcgtggcagcagcgaaccaagacacgagaagagcaggggcacaggacagaccgacacagcaaccagaaggacggcagggcggcacctgacgacccgcagcgccgcgctgagacgcagagcgacccgcacaccaccgagcacgaccagaggcaaaacgaggaagccgaagacgcacagacaacgagcggacgcactcgaagaggaacgcggagcgtccgaagcaagaggaaaggacagcggccgccgacaagacgaggctgcgaaacacacagcaagagggaagaggcgaagcgagacggtctgcgaaccgagcgacagcgacaggcggaaggaggccaagctcagaaacagataggcagacacagaagacatgaaagagaccacgaggcgacgccacaagaagagacgagagagcacacagccaagcagaggcgacgacgatgatacatctataaacaatacataatgcgtgaccagaccagacagagcagagagagcacagatacaccaggtggagcgcacaacatagagcgcgcacggagccgggcgtagcagcacgaacagcacgtatagccaccctccaagagatggcagcaccagctcaacacgcagaaaccgaccgaacacacaacagaggcacagacaagcagaagaacaccgaacgaaggcagcaacaagagcagccagagcagtgcgcagaaaagcacgagaacagaatagagaaacaatgagcccaacgtgacaagcagccggagacagagcagcaacgacggcgcagcagcacgcaccggggagctgcagcaaga

SEQ ID NO: 513678 - DNA, 301 bp, Homo sapiens
aggagccatagatgtagtctatctatcagtacagttacatatccatgaactgatatctgggataccctatccagtaaaatctgcgtgactctcgctcagctgagagagctggacagactccatcgtagcctcttcagttgcagtccccttatccccctcccttaagggaatacctagtgcaagctgactccaagcacatccagtaatgcacttacagataagatatagaggcaagctgtaccagcagctcctggggacgtgctcagtggatggatacccaagcccctgcatttatctctta

SEQ ID NO: 513679 - DNA, 264 bp, Homo sapiens
gcaccatggcggttggcaagacaagcgcccttacgaaaggcggcaaaagggagccaagaaggaagttggttgatccatttcttagaaagattggtattatttaagcacctctatgttcaatataggaatattggaagacgctcgtcaccaggaccaggaaccaaattgcatctgatgtctcagggtcgtgtgtttagtagtctgctgatttgcagattgatgagttgcatttagaaattcagcgtattactagatgttcagggt

SEQ ID NO: 513680 - DNA, 347 bp, Homo sapiens
cctgttgtgggccagctgccctcctagtttgtgcgggtatgggctatgctggagtggtaaataggctccgaaaaatcctgcgaagaagaaaatttctgaggtaataaataggattatcccgtatcgaaggccttttatcggacaggtagtgtgtggtggccttggtatgtgctttctcgtgttacattgcgtccctccttggtatatagttcgtgtgtttgttagtaagcctagtatgaggagcgctttttgagtgccagtgaaatcaccctggctaggccggaggtcattcggtaggctcatagggcccctgttaggggtcctgggctgggttttactctattatt

SEQ ID NO: 513681 - DNA, 104 bp, Homo sapiens
cgatcccgactttttactgtaatggcccagatggttgttacgtccctgctgaagtgtgcaggctcacaccgagttgataagagtgtttactagacttaggtgcc

SEQ ID NO: 513682 - DNA, 297 bp, Homo sapiens
aacctttattaagggcaggtgtcctagtccggggggcggtgagtcaagggtaaaactcaaccatattttttttttccccttatatatatgaatcttaaaacagaaatacacataaaacaagattacatatggatcagcggatgaaaatatcacgaccaaagctcacaggaacgcaacccggtatttctcctaaggagcaagggtccagtatggggctaagtcaggggctcacaggggattttacaggatcggggccactggcacctccagcctaaggcaacaggggtaccggagctc

SEQ ID NO: 513683 - DNA, 968 bp, Homo sapiens
cacgcgtcgaggctcctatgagtggtatcacgtccgggattcttgtgactgccgtgtgcccttttccaggctgcatgtctgccctgggtccacctgcagtggacactcaggcctctaagcccccagtgagcacataccataggcagcaagaagcctgagcatgcccccaggaccagccatcccccaaggccttgtcccctgcctcggcccaggcctggtctctgaaggagtctgagaagatggcgcgtcagagaagtggatgggtacacggcacagcctggcaccatctccctggagatggagcggcagaaaccagatgaccagagccggcaggagcacgagcgggtaggccgccgtcgagggaggcagcggagcaggagcgcctctctccaccgagcttatcaccagcaggctatccaacgcatcccatctggcggactcctcttctcctctctcttctcctacactgggtccgtctataccaggggtacctctgactggctgatctcccgtcagtgccacgcaactcctcacgccgcaacaagtaggtcttaccgtaggaacactggcaccttagactaagagaatgccgaaacgaaccgcacaaaggaccacaaaacagaaccacgataatctcaatcggaaccatcagtctgacgcatgacgaagatcgcgtcacacacgcgcactagtcattgacaacacaacacccaacaaggcggacggctactattgcctcatacacctcgccgcatcgacacgacccaacgtgcaggacaatctgcccgcaccgccccgatcgccaagaccaaataggacccagcgaacacaagggaacgccgaaaaagcggcggcccccgagcaatccgcccccctagcagcacgagagaacaggcaccaacaccaggcgcacaaaccacaggaagaacagcgccggccaccaaaatggagaaagagaaaaagtgaag

SEQ ID NO: 513684 - DNA, 1615 bp, Homo sapiens
agcggagtgcctgtgggctgcccagcacgaatgctgagtgccgtgcgtgctgtgttgtgccctgtgtgccatgggcatcctggtgtgctggctctgagtgcccctggtgctgatggccttcctgtgctgctggctgactggccttgagtgtgctggtgtgctgtgtgtcctgctgctggcctgctgttacatgccatgtttgtgctgtgagatctgggctagcagagcatgcgtagctgtgctgtagagtattattgaagtgcaagattggcctggagctgcatgctgtgtggcccctggtgttgatgctggatcaaagacatgatcctggctcgcagaacagccaccctgaagaaactgttgtgatgcttgtggcagcttgtgcgtagacattcgttgtagtgcccccatctaccaaggccttcaaagctgtgcgtgcgcaaccatgaaaccgtcagtgggcagatatttgatgtgactgattgctgttccttgacaaggacagcgaaagttgagtggtatacagccacccatggctgcatttgagggttcacagtgacagaacacaagatgcgtctgcgagcgatttaaccctagcagcccttggagattgggaagaaccctccgtctgacaatgggacgacaagggatcccttgggggattaattgcttgaagtgacgccactgcgtaatcatctagtgattattgttcatagtgaagttccttggtgacaacgtggtcgggaagaacgcgttggaaattcacggtaattgtccatggtcccctggaagggcgcacagacggccaaaggacgaccgaaagcaaaaaggtatttcaattggcttaacaaatatattgaaccggaaggctgggccaattttgaccttttccgttgacaccaaaataaacacgaataattattggtatgccaacacagggggaaacccgtggaacagacgcagagagcgaaagcaaagtaccgatccaaataccagcgaagaaagacgctgacctataggagagcccacccgagataacagatcagaacaagtcagagagccgacacattatgagggcacataacacgcaaaagaagacataaggatgacattcaggagagatgagcaaaccacactacgaatggcacacagaaagggggatacagcaaaaaacacaacaaccaacaagttgtatgagattggtggagacaaacgagacacaggggagtgtacaccaaaagcaaaggcgagagccacggaagcaccctaacgaaggggtcacgggagcaacacatggcaagagagccaaaacacaaagggccagaggcgggaaacaccaaggaccacggagaaaaaacaatacggggagaggacgaaaagagagagcaaaacgagacatcaacaaccgaagaaaccggggaagacaacagacaaagaagacacaaaacgacaaagaaagaaagcacaaaaaagcaagagagcaaacacccaacgagcaacgagaggaaggagaccgcgagacaacggctggcacagcaacgacaacgacaacgcacacaacagaagaggagatagaaacacagagggacgcagccagctgagtacagagacgaaa

SEQ ID NO: 513685 - DNA, 399 bp, Homo sapiens
gccggtccactatggttggacgacggtggagaagctcattagcgccacgaggtcatttggaaaagtctagcagtcaacctggcgatgataggttgctctgggccctggaacgggcggactacattggtgcagttactgggaagtgcgcagacagcaagaggaagaggagaggaagaggcggccgccttctcccgagccgagcacgaaggtttcagaggaagccgagtcccagcagcagtgggatacttcaaaaggagaacaagtttcccaaaacggtttgccagctgaacagggatctccacggatggcagaaacggtggacacaagcgaaatggtcaacggcgctacagaacaaaggacgagctctaaagagtccagccccatcccctccccgacctc

SEQ ID NO: 513686 - DNA, 201 bp, Homo sapiens
ttgtctggatactcggcgtgtgcagcaacaacttcgtccatcgcgcactgcaacaacttcgtccatcagacttgcaacaacttcgtccattctgacttttctgcgaatataggtactcggcgtgtgcagtatgggttttcggcgtgtgcatgcacacgccgaagatccaaacgccgcaagtcctgatggacgaagttgttg

SEQ ID NO: 513687 - DNA, 392 bp, Homo sapiens
aacttaaaaaagaaaaaactttgccagttttaaggacatattttgattctttcaggatttttaacccctttttaaacaaagtttttgataggaccccctattattggggttgttttaagccattattgatttttgaaattcaagcatttacaatggagcaaatttgatttttttttttttttctttttttggcatcattaacatttcatttgaaaagcatattgtttttgaaggactttgtttttagcataaatgttgggcattttattttagggtttggatgaaaacatttgggttgtttagctttcatttgctttggaaatttaaaaatggacctttattttccagtaagcctacattttgtattgcccaataaatttattttaagccga

SEQ ID NO: 513688 - DNA, 496 bp, Homo sapiens
catatccagcagcgtgacgtagtgtacggggttgctgcccgacaggttgatatggtcgctctcagcgatcctctgggcctccttgttggaatatgccaggatggcctcgcgctccctcatactggcgtccggcagggtggacttcaactgctcctgggctgagatcaggccctcaatctcctcgatggtatggacaatgaacatgtcctggaggtcctccatggcgctctccatccagttgttgaacggggccgcgcgccttagcgtattccaggtgctgctggtcgatggcctccagctgcttctctgtattctccagggcttccctgcgactatatgtcagagagccgagggagtcccactggtcacagatctcctcgcaccgggtgttgacattgtgggagtcgtaatactccagctcgttcagctcctggggcaatggcggcgatctgcctccacggcggtccctcgtgcgcagcctggtcgctctcgaagg

SEQ ID NO: 513689 - DNA, 897 bp, Homo sapiens
  misc_feature (1)..(1): n is a, c, g, or t
ncttacggagggaagagatgagcgctcggcgcaagaagaatggcagacagagtgtggtcacaaggtcgttttgtgtggcgccgctcttctcagggaaagagccccttatatcaccctcctttaagggcctgattttccccggtgcccgtggcacctggggattacagagagatgttgtaattgccggaccaaatttgggttggtccaaaccatgaaggttgctcaatagtgccccaaaggtcccctaccacgagtggcaaagttttgggcaaaaacggtatttgcccatgtgttgtgcgcaatcgatacgagaaggccttgtcccctcttgccaaacagcccccttattgtttacgcccttccccccagtgttgccccccagattcaccatcgtgttccgaacccctttttttaaaccatttgccacagtcaacacatcattgaccaatggctcctactcccggataatattatgccccccccctccaacaattcaaagcacatcagtgagggcttgctccaactataagggcaaccaccctttggtgtaaccccccattacaaacatggttttcttatgggacacacccacagaagtctttaaaccaggaccatcaacatctgcgtcaataatcacccccccccaatatgcttctaaaggtatccctttccccagaccgcggttcaatccccgagtccctcccccatatatgttgtgccattcaccgagttgccctgtcacagcaaagacaattttcttttatgaaatctctggcttcctgaataattcagtcagcccctcaaaacattccttctagccccaactttcccccaaaccccaccccaaggcaaaaagttctcccccaaccaaaaaccaactttcccccaaaaataaca

SEQ ID NO: 513690 - DNA, 228 bp, Homo sapiens
gatcacttgagcccaggagttcaaggctgcagagagccatgatcttgtcactatatttcagcctgggcaacaaagccaaaactggtcttaaaaaacaaaacaaaacaaaactttttttaaaggtttattgctgttttgtttttcagcaaaccaaagctagtcaggctgacgtagcattttacacctcttataacctacagcttatacttcttcctctgtcaacaattg

SEQ ID NO: 513691 - DNA, 476 bp, Homo sapiens
agaggaactcatgctatgaccaatcattacaatagatcaatgatagactggataaagaaaattggcacatgttcaccgtgaaatgctatgcggccatggaaagggatgagttcatatcctttgcagggacatggatgaagctggaaaccatcattctcggcaaactaacaagggaacagaaaagcaaacactgcatgttctcactcttaagtgggagctgaacaatgagaacacgtggacacagggaggggaacatcacacagtggggcctgctggtgggtaggggtctaggggagggatagcattgggagaaatacctaatgtagatgacgggtcgatgggtgcagcaaaccaccatgacacgtgtatacctatgtaacgaacctgcatgttctgcacatgtaggccagaacttaaagtgtaataagaaaattaagaaaaagttaagtatgtcatagatacgtaagatattgtag

SEQ ID NO: 513692 - DNA, 515 bp, Homo sapiens
cagtgaggaatacaccaacaaacccaacatgaggactattatattttatagtatacgataaatttttagagacaggatctcatttagctgcccagactgttaatgcagtggtacaatctatggctcactatagcttctcagctcctgggctcttagcaaccctcctaccttagcctcccaagtagctggggccagagatgtgcaccaccacatttggctaattttttctttttttctttttgatacagagtctcagtctgtcacccaagctgcagtgcaatggttcaatcatggctcactgcagcctcaaaccttcccaggttcaggtgatcttcccacctcagcctcctgagtagctgggactacagctgctcacaactcacccagttaacttctgtattttttgtagagatggggtctcaccatgttgcccaggctggtctcaaagtcctaggcaacatggtgagaccccatctctacaaaaaaatacagaagttagctgggattacaggcac

SEQ ID NO: 513693 - DNA, 1428 bp, Homo sapiens
  misc_feature (991)..(991): n is a, c, g, or t
  misc_feature (1004)..(1004): n is a, c, g, or t
  misc_feature (1014)..(1014): n is a, c, g, or t
  misc_feature (1194)..(1195): n is a, c, g, or t
  misc_feature (1227)..(1227): n is a, c, g, or t
  misc_feature (1373)..(1373): n is a, c, g, or t
tacctaccacctgttccctcccacaacatgtgggaatccaaaatgagatttggctggggacacagctaaaccctcttctcagctacccttttctctctcgatctgtgagtaataaacctacttctgtgatttcccatgctttgttctgtggcctccatgggtctgagctgacctacactggaacctcactctccacctggccagggtctctgagagtggctcttgtcagaaatacacaggacacaggtcaggcaacagtcaccaggcatctcctagtctcaacagatattctgtgagagggaggcctggtcgtggtatgcacacctggccactgctggggtaaggaagtgtcctgtgaaaggcacatgttaagcatccacaaccccctgaccagaaccccagaaaggcagggctccaattgacagtcactctccagagacaaacctcaagccctaactggaggaaaataaaacaatgtaaaaatttgaatttatcttactatttcaatgatccagtaaagacattctatgcctgtacaccacatattttcttcgattgtggatttattttagatagaattttaggtctggctttcactttagcctggtccctacctcaagcataaggtaaagattttccatgggttcttttctggtactactacctgccagtgtggggtcatgtcctagtctatcttgagggaatccccctgttcattattgtcagagtgagactgttaagtcttgatttccctggacaacttcactgcatgacttttaatatgattttttaatataccctttactggacaataaattatatagttatctgagtaagagatatggtcaggaagaagcattgcctcattcagcttttctctttggtgaactcgcatatgttctcctcacccgccagtcacctctaaaccgtattgttccaagacaacaaacagaactcgagtgtgtatctttcaccaccggatttctatttnctccataaagctncatgcttaanagggtttctgttagcattttctctgtttattttcccataaaatatcacaggcctttttcatatggaattatgggtgatttccttcaatttgcatcatatcaagttgaggttcatgttgatgaaaagtaaaacatacattgaaaatatcagtaatgatgttttcccctcctttttagcacnngtgcttgtgatacaagcacattttaatacaantgtagtctcatgctttgatcattcctatgatgaaaataacatttttagataaaatatctgagttttatgaggcctttagtatgtgatgtgatagaatatcagaagaccatacttttttctagttttctgtgcaattctatcattgnttcatctttactcctaccagagtaattttccaaaatagatatcttgacattcttc

SEQ ID NO: 513694 - DNA, 114 bp, Homo sapiens
agcgatacacgcactacacgatgcactacagcactaatactacagctagtggttacctgatgcttctggaagttcagtaattcattgggtccaatagcgtgatttccttggtga

SEQ ID NO: 513695 - DNA, 270 bp, Homo sapiens
ataagcatttcgtcactctgcattcatacattcaaaaacaaacacccactggccaggtgcggtgactcacacctgtaatcccagcactttgcagaggccgaaggtgggcggatcacttgaggtcaggagtgcaagaccagcctggacaacatggcgaaaccccatctctactaaaaatgcaaaaattagttgggtgtggtggcaggcccctgcactcccagctactcaggaggttgaggcaggagaatcacttaagccagggaggcagag

SEQ ID NO: 513696 - DNA, 544 bp, Homo sapiens
  misc_feature (335)..(335): n is a, c, g, or t
  misc_feature (403)..(403): n is a, c, g, or t
  misc_feature (416)..(416): n is a, c, g, or t
  misc_feature (423)..(423): n is a, c, g, or t
  misc_feature (425)..(425): n is a, c, g, or t
  misc_feature (431)..(431): n is a, c, g, or t
  misc_feature (511)..(511): n is a, c, g, or t
  misc_feature (540)..(540): n is a, c, g, or t
caggtttaaaagctgaaaataaacttgcatcaaaagcaaaaacctaactgaagctctgccatctgcccccagagacatctttgctttcatttccttgtcccaaggagaagacaatatagaacggaatttcagcaattctaattttaacttttctaagctcaaatatatccctttagaatcttgggggaaaggatggctgtatccttaagcactttaaatactacttttacaattgctcgattgcttcacatttctgccagactctggaaaagatgatggggttgtaaaaaatttttaaactttagataagtaaagtttcatggcttccttcaagnccaattcttcccagaggtaatcactctaatagttaataatttcctggcagattcactctatatttacntatatatgacacncccaatncnttttgncaatttatttacccagatgggacatgcttgccactaacttatttcacaacattaactatgtgcttacaggcctctatgtnggaatgattctatatattttctgtggganggtt

SEQ ID NO: 513697 - DNA, 872 bp, Homo sapiens
  misc_feature (24)..(24): n is a, c, g, or t
  misc_feature (87)..(87): n is a, c, g, or t
  misc_feature (89)..(89): n is a, c, g, or t
  misc_feature (91)..(91): n is a, c, g, or t
  misc_feature (93)..(93): n is a, c, g, or t
  misc_feature (98)..(98): n is a, c, g, or t
  misc_feature (100)..(100): n is a, c, g, or t
  misc_feature (103)..(103): n is a, c, g, or t
  misc_feature (109)..(109): n is a, c, g, or t
  misc_feature (119)..(119): n is a, c, g, or t
  misc_feature (130)..(130): n is a, c, g, or t
  misc_feature (142)..(142): n is a, c, g, or t
  misc_feature (172)..(172): n is a, c, g, or t
  misc_feature (174)..(174): n is a, c, g, or t
  misc_feature (201)..(201): n is a, c, g, or t
  misc_feature (211)..(211): n is a, c, g, or t
  misc_feature (222)..(222): n is a, c, g, or t
  misc_feature (226)..(226): n is a, c, g, or t
  misc_feature (246)..(246): n is a, c, g, or t
  misc_feature (249)..(250): n is a, c, g, or t
  misc_feature (256)..(258): n is a, c, g, or t
  misc_feature (262)..(262): n is a, c, g, or t
  misc_feature (270)..(270): n is a, c, g, or t
  misc_feature (280)..(280): n is a, c, g, or t
  misc_feature (298)..(298): n is a, c, g, or t
  misc_feature (303)..(303): n is a, c, g, or t
  misc_feature (308)..(310): n is a, c, g, or t
  misc_feature (315)..(316): n is a, c, g, or t
  misc_feature (318)..(318): n is a, c, g, or t
  misc_feature (358)..(361): n is a, c, g, or t
  misc_feature (367)..(367): n is a, c, g, or t
  misc_feature (371)..(372): n is a, c, g, or t
  misc_feature (377)..(377): n is a, c, g, or t
  misc_feature (382)..(382): n is a, c, g, or t
  misc_feature (392)..(392): n is a, c, g, or t
  misc_feature (401)..(402): n is a, c, g, or t
  misc_feature (412)..(412): n is a, c, g, or t
  misc_feature (414)..(414): n is a, c, g, or t
  misc_feature (443)..(443): n is a, c, g, or t
  misc_feature (455)..(455): n is a, c, g, or t
  misc_feature (543)..(543): n is a, c, g, or t
  misc_feature (663)..(663): n is a, c, g, or t
  misc_feature (677)..(677): n is a, c, g, or t
  misc_feature (753)..(753): n is a, c, g, or t
  misc_feature (857)..(857): n is a, c, g, or t
aatttttttcaaaaatcttatatngttattcttacccacccaaaaaaatggcattctctttggctcaaaccacaacaaaaacaattnantnanttctntntgntttttnaaaaaaaacnttttctcacangtctacattctntttaaaacaccactataaacacctggaaangnaaactaaacgtagacaaaacaaataanatttttttgntgctgcacgtnaatncactttgtgcatgctaattnagnngtatannntctntccctctntccctctatntttcaagctatataaaantaaanaaatnnnataanntnagcgctattttacagaatattgtttttttttttttttttnnnntgctanatgnngattnttttngggcaaaggnaccgttttnnttcccaatantntccatgggtgtcctgttgctgtgagcttnctgttctaactnctcggccctggccatttccaagacttcccggaggaggtggaaggtgagatccagggagatgggaggctcctcggaccgcctttctctntccggtgcctcctggtggccgccgagggcattcctagcgccgcgctccgcgaaaaccgcggggctgtgcgagcgagcgccgaggcagcagcagctgctgcagcaacacgcggaaaaagtnggcggtcgcctgtnccggcgaagggcggctgccgctgccgccggcgaggagcgaggaggcgggcgaaaggggagcggccgggctcttgtngaggttccccaggcggaggaagttctcctctcccatgcggagaggaccggccgagcctgcggctgctggggctgctcggactgcggcggcggctggaagaaatncaagggctgaaggtg

SEQ ID NO: 513698 - DNA, 1497 bp, Homo sapiens
  misc_feature (1143)..(1143): n is a, c, g, or t
  misc_feature (1497)..(1497): n is a, c, g, or t
cccgaggctgctgtcagaggtatacttcccattactgcttcacacagatccgcctgcttctaaacaggataaggtactagtatcgcttggcgtccttgaggagaccacactagcctaggtggcagattggacattcctcaactaacatcatggcttcttgataagtacgctattcggttcactgcatcccgatgcgtatacattcccgcaaatgcccttgagcgccacgtggccatgttggagttgacgtcgaatgattgaatggatgagaggactagagcctgcctctcatttctacgctctatgaataatgattacagttattgtccctgtgcgtttcctgtatacttgccagtggcaagcgaagccgagcgagtatacccgagtcatttcactaccatactgaactactgaatcccttattaagcggtggacttccatatagtttccgtcaatgggaacagctgacaaatacaccctgttgccaatcatactccgttgcgagttgacccccacctttgtcctcttaaatgtgggagtaaaggtgattaatagtccccgatcaggtctaaactttctttagccctagtccattgtcggcgtacgatgttaggttccaccaaaacgggccaccgcgaagacaccgcaattgtttatatcccgaccccaattgataagggaccttaccaaccgcagggcctctcaagaacggctgcggcacacttgtagggggccagaccattatttagcgccaataccacttcctatggagaccttgttggcttgggaatagtccgggacacaatgaggttacgcacttgggcaccatacagttgtttctctttctcgtttgccgcttaacttttggccgctgccatttaccacgccgaacattccacatatgaatgccctttaaaaagaaaggggggagacgcccaacatagcgagcattaggcaccgccgggacaccaaaaaacccaacggtcagggctatacacttggacgcactgtgttacactttggtggccctcgggaggccggagagacacacctcctttgtggcgcacgacggctttgaacttaaacagccgcttaactctcatctgtgccgttgtggcgagcacaaaggtgcaccagacatanacgaggctaccctttcaaaagttttcgacctcaaagggagccgtctgaaaaattctgcaacaaatcgcaaaactgtgcacgtatccccacgcccatttggcgggcagagttggcacccattctgacggagttatcccagagctagaaagggtcacatctgggatggttcgattgcccaacattaagggaactgttatgagccgttttaggaacgaaccctcttcctacaggcaaacaacacatgcggatgtcactcatcgtgcactcattcatgactgggcactatctcctcctgactcctggagcactcatctcacgacgacgacagggctacgccgtccaccacggcatccn

SEQ ID NO: 513699 - DNA, 446 bp, Homo sapiens
acccccatttccctttgttttgaataggggtttccctcccaatgtgttttttttgggttggggtttttacctccgggggttttttttgggataaatgggatttccttttttcttttaagccccttttttttttttttcccaagccgggtttttgggttttttgggtttttaccttttggaacttaatccggaatcccggccttgaaattcccctttttggattccttggggccggaaaccatttttgccttgttaatccccaatggttttttttttggggtttttaaattccgttctttttgccattttggggttttttgaggcccctttttttttttttcccccaaaaattattttattggccttttccaggatttttttttttttttcccctctttatccggggttttattttttttgggttaattaaaactttttttttttta

SEQ ID NO: 513700 - DNA, 118 bp, Homo sapiens
  misc_feature (13)..(13): n is a, c, g, or t
  misc_feature (19)..(19): n is a, c, g, or t
  misc_feature (41)..(41): n is a, c, g, or t
  misc_feature (72)..(72): n is a, c, g, or t
  misc_feature (82)..(82): n is a, c, g, or t
gaagctatagagnggttgnaggccctgggcttcccagagancctggtcatccaggcctatttcgcgtgtganaaaaatgagnacttggctgccaacttcctcctgagtcagaactttg

SEQ ID NO: 513701 - DNA, 103 bp, Homo sapiens
tgagctgctccaaacagcctacgttgaattatggattttctaacatatccaaaagttaactgtatgacaatagcaaaaagaacagaagataggaaaatggaga

SEQ ID NO: 513702 - DNA, 185 bp, Homo sapiens
catcctgatggctgactctagaggataaacgtttgccacgcagggtggagaggtcttcggccagggtattgaccgggcctaccaaagccttgcggtcgttttccttgaccttgtcgtaggtcatgaagccgccgtcaggggttttgtacttggccaggatcttgttcaccgtggcgaagttcttg

SEQ ID NO: 513703 - DNA, 398 bp, Homo sapiens
tgcagtggcgcgatctcagctcactgcaacttccgcctcctgggtccaagtgattctcgtgcctcagcctcccaagtacctgggaccacaggggtgcaccaacacacctggctaattttggtatatatatatatatatatttagtagagatggggtttcgccatgttggccaggctggtcttgaactcccgacctcaggtgatctgcctgtctcagcctcctaaagtgctgggattataggtgtgagccactgcgcctggcctaagtttttaaaaagttaaagaagaatggcatagtgcattattgaggctcgtttaacgagatcaagagcagaaagtgtttgcagacccatgcatagcccaaagtcctgaagagaaaggcatagttaagtggttcga

SEQ ID NO: 513704 - DNA, 1867 bp, Homo sapiens
  misc_feature (577)..(577): n is a, c, g, or t
  misc_feature (636)..(636): n is a, c, g, or t
  misc_feature (679)..(679): n is a, c, g, or t
  misc_feature (770)..(770): n is a, c, g, or t
  misc_feature (969)..(969): n is a, c, g, or t
  misc_feature (1230)..(1230): n is a, c, g, or t
  misc_feature (1500)..(1500): n is a, c, g, or t
  misc_feature (1621)..(1621): n is a, c, g, or t
gattgtgcctgttggctatgagttagcttgctgctttgtcatgtcatcttgattttagctgtcgtctttgacgtagtctgtcttagtctttgtctggctgcgtgctggagcatgttggagtgtgaccgttcggtgtgactacatgcgtccttagtatgaggtgtggtctggcggacttgcttgtgggtgtggctggtcggcttgttctgttgacttgtgtgacggctagcccatcaacacacctactgtggttgatgtctgctacatcgctgttgcgttgttgtgtgtgtgttttttacttgtgctgtgtgtgtaggctgacgtgctgtgtatgtgtctttgtgaagtgtgttgtgtaatcgttatggttgtacgattgtttaattgttattgtgtgttgtgttatattgggggtttagtgtatgagtagtatagttgaggattgtagagtgtgatgatagagtaggtcgatgcgtggctggtagtggtgtcggtgtgctgtagtcgctggtgtctgtgtgttagtgggtagtcgcgtctagcgctcgtggttcgtgtcgtgtttgtttgtgggccnccaggctcaaaattgtgtaatagcccacagtgtgcccccccgttgttatttgggtggtnttcgtagaagagcaacgcagcactaagtgtccgccggaagttnttttataggggggggcagaccacaccagcttatgttgtagggacacctccttcttctgatagagtggggggctcccccgacccaacaaggnggttttgggtcaccccccgagatatatagtgccacatcgggccgttttttggggtattaaaaacctcggtccctggcgccccacacggttgttacccgttattttttcacccgcggggtcctctttaataaaggggtttgtcgcctcgagtggggcctctcttgtggtggtggtgtcgcgaaattttttcttcggcgcnacacctcgtagagggggggagggcgcctgcttatcctcatcagtcgtcgctcgctcggcggctttttgtgggtcgctcgcacaacagcgcaccaaaaaggtctgttcttttaataggtgggagctctcctctccttgtgtataaaaggttgtcctcccacgacgcagaaatattgtttttcgcgcgcagtgatgatctctctcatcacacacgcgcatcacacatctctcgaattgtgcgcgcgcgcgcgcggagaaaatnatatagcgcgccttttttgcgccacagatctccgcgtcgcgccacacttataaagagggtgtttgtgcgcgccgagaaagaatatatgtcgctctacaatagtgtgtggtgtgttagagagagaaaaacccacgagccttttgtagctctctctctccacaacagagaggcgcgcgtggagtgagaatctctctcttgtagagagagatagagaggttggagacacgctgttgagatctaccgcacttatatgcacgagatttcgcaccngcccacgcgtataccacgatgagtcccacgcagactcgggtttttgtagacacacagcacacagaaagagagatttataaagagagatgtgagaaaatataccgcccacgcgtctctatancccacatggtcttgtgagcacacacacagcctccctgaaagaaccctggaggcggacctgaaagaaagaattctgggcccacataagaagggctgcgtcacacttttggggccctttgtgtcccagaggcccccaccccccaagaacccctggcccccctggcccccccgctgggggtgtcccagaaagaaaataagatctgttaggccttttcttgtttaataaaattagggttaaataccctta

SEQ ID NO: 513705 - DNA, 670 bp, Homo sapiens
cgacggagatactagtactactatgactatcaaccagtagattataggtacggacacagcataccggtggtactactacttaccatgcctaccagtaccgaccctaccgtatatatcctactacacgacatatgacatatcgctacctagggtaccaatacatatactactggcacatactacactagacaatacataggagcactctagcactagcaacacagtatattaaggtagcgtataagaattcacatatctttggcccaaactcaaagctcattagacaggcctactcgcaatggtatttgaccggtgtcaggcacgactttctatttaacgctatctctgtgacccgtttagagtaagctgaccatgtgccccgggctacacacacccatggctcataggggctaccaagagtatctagggtaagccccttggactatgtgtcctccttccagattagccgatccccttaagcccacagttccgtaccatcacctttggtggcagacctcatgatcgttcaactctcataccggcaaacactcgtgctgtcaccttggacacctttgtattggctcccgcttacacgtcgtcgtacagacagtcgggccctcgtcttggaagggcccaccaaccacgtttatacccattatcccccagctca

SEQ ID NO: 513706 - DNA, 799 bp, Homo sapiens
tttgacttgagccagctgcacaggggcctggacgctcgggctgaagtgactcgtaacgacgttgcaccaagcctcatgagtgtcccccggtatcttccccgacctgcgagtcccgatgaaatggaaatttgagtgatgaaaatctgaaagcggttgatactgaccccacagccccgccttatgattctctgctcgtgttggactatgaaggaagcggttccgaagctgcggtagtctgagctccctgaactcctcagagtcagacaaagaccaggacgtatgactacttgaacgaatggggcaatcgcttcaagaagctggctgacatgtacggaggcggttgaggacgacctagggggactcgagagaggcgggccccagatcccatgtgctgtggaacatggcatgaaatcacgttgctggtggtttcttcagactcccttcccttgaagatgacgtttcctggggaaacagagatagagactggtgagtgatgcagcttagtatagctttatactctctccactttagtagctctaactaagttcgggttagaaagagttttccgactgatgtatctttaaaggctgctcgttgtgttttcccaattcactccttttacatgggcggagattgtccaaaaggataccccagaattttgattatgcgcatgcaggaacatcttgtgggcttcagaaggttcccccagatacctggcaggattttcctcgagcggaacttgggttccactttacaaacagaaaggcgggaagcgtcccgctacctaaattcggggggg

SEQ ID NO: 513707 - DNA, 530 bp, Homo sapiens
ctccagatatgcagagacccgcacaagattatcagacatgattatctgatgaagattttaaagcaaccatcataaccatgcttcaataagtaatcataatttctcttgaaataaatggggaaaaaaacagaaaattgtatcaaagaagtgcaagttatagaaaagaataaaatggaactcatagaactgaaaaatatgataaccaaattttttaaatctcactagatgaactcaagaatacagcatagatgaaataatagaatcagtgaacttgatgacagattgctatggtctaaatgtttgtatgtcctccaaaatgtatatgttggatcctaatcaccaaggtgattatattagaaagtaggggctctgggagatgattaagtcatgagcagttcaccctcatgaatgagatttatgcccttacaaaagaggtcccagagacctgtcttgctccttccagtatgttagaacatagcaagaaggcaccatctatgaaccagaaagcaagacctcaacagaaacaaatc

SEQ ID NO: 513708 - DNA, 139 bp, Homo sapiens
acatcgggtgaggcctatcttacggatcctttctctactctgtggggctgcactctcggtattatcctccatgcttgcaactatacgcaccagccttcataggctatgtcctcccgtgcggccaactatcattctgagg

SEQ ID NO: 513709 - DNA, 224 bp, Homo sapiens
ttagcggcgcccttttttttattttttattctttgacatggggctagctctctcacacaagctggagggcagtggcttgatcgtggctcacagcagcctcaacctcctgggaccatgaagctgattctcctacctcagcctcccaagtagctgggtctacaggcaagcgccaccatgtccagctaattttctttttctctctggtagggaagaggtcagcgtgg

SEQ ID NO: 513710 - DNA, 118 bp, Homo sapiens
tgctattggctagcaaatacttttttatttttctatttataagtgaaagagataaaccaagatttatgtctgacgaatctccctgaactgccttatttataggggcctcatttagaaa

SEQ ID NO: 513711 - DNA, 921 bp, Homo sapiens
cggcgtcaagtggggcaatcgctggtggaggtggcggagagcaaggtggcagccgggagcccatcagaggaaaagtccgaggcgctggaaccctgcgtccaggcgtgacggtcatcccgaaaggccggacccagtttcatccttttatcctgtaatctgtcaccatgaccctgacaaaaggttccttcacctactccagtggggaggaatatcgtggcgagtggaaggagggccgcaggcatgcgccccgggtcaactgatgctctgcacgcactggtggcacctacctgggtcatatttgagaatgggctctttacatggcttacggggctattgaccttctcagcatggcttcaaggctatgaggggcgagctatgcccagggcaagcttcaactggcgtcggagatcttcatccgactatgacaaccatgacctttgagcggggaattcacacaaatggcacgagtagatggtcaggcctgctgacttttccctgatggttctcatggaaatcccccgaccattgacaggtctctacagacgaacaaacaagctgctgcgacgtgagcaagtgtcctggccattggtccagcaggggcccagaaggcgcctccgaaggtaaggccaagaaatttcacatggcctggacagacgcaattggagcaacaagcttggataaagaacaggagaaaaggccagtggcccagcaagcgaagcaacacaagagagggaccaccaggagactaaaaaacgaccaatgagctagcgcaccggaaactaggaaacagaaagaccatggacatagccacccgcacacctcggcaaaccaacacacggggccccccgaacaagcgcaagactagcgccaccagaaccaccggaagaacaccgagcggagtcacgctagcagacgtaccat

SEQ ID NO: 513712 - DNA, 234 bp, Homo sapiens
agtcatggaaattggcagctcgtttatatcaccattttctgatgaaatgaacccaaacaaaggtcttaacaataccctacctgcgacaaatatagcaaatagagctataatagccttaagcaaagctatccctagagctgatactaaagaaattttactatcgctagcaaatagcggtacaataactagcagtggcacaactgcgagatcttgtaataacaaaatggctaggga

SEQ ID NO: 513713 - DNA, 254 bp, Homo sapiens
cgtttatcgttgcaccaattatgtggattcacataactgagtggcaagatagtataggactcctttccgattggcctaaaaccattagtatctactaatgggacgctgaaattttatatttttgggtggagacaaggtttcaccagtgttggccaggctggtctgcacgctccgtgacttcaaggtgatccgtgcctcccacaagtgctgggtcttacacgccgtgaggccatgcaattttacactctagaaac

SEQ ID NO: 513714 - DNA, 259 bp, Homo sapiens
cggcacatgcttataccttgtttactatttcacatggaaccgaaatattcttccaggtagaaaacaatgcgacgaatatgtttatgacggttgatggtacaccaggagagttagtctccgcaggacagacaccaggcgaactggatatactaccgagaacttcctccgcgatcccccgagcgcctcgggagcaactgggagctgctgcaaactaggcgtttggcgtacttacttatctcctgcttcttcagagtgccta

SEQ ID NO: 513715 - DNA, 592 bp, Homo sapiens
acggtcggaatccgggtcgacccacgcgtcgccagatcatactgaaccaagctgccacttcacttcagcagaccacttgatcacgcacaggaagttcagatcagaaaatgcaggctggcgctaccgcctgttgggttctcgcgccgtgctgcccgccaaggcccggccggcggcgaggagcacggtggtggcccgtgtccctgccactaggaggagcgtccgtgcggctgccgccgccgtcgtcgtggcggagcctacgcaggtcgactacagctcaagattctcggtgttcccgatggaggcctgcgacctgctcggcggcgacgcgtgcatcggggagatgtacccggaggccaagctcgccgcggcggcgccggaggcgagcaggaggggtgcacggggtggagagggactacctgtcctacgacgatccaaaaacggtgttcccgggcgaggcgtgcgacgacctcggcggcgagttctgcgaggcgccgtacctggatggcgtcttccaggcagctggcgcaacgcctgaatcctggcagatccatccatgtctgtccagaaacgaattggtctcacagtgagccag

SEQ ID NO: 513716 - DNA, 706 bp, Homo sapiens
  misc_feature (473)..(473): n is a, c, g, or t
agctccaggcttctgggggtccggggcacccagtgtgtctgttggtgttgggaatggcgggatccgaggaaaaccagttttgtacagaggctcacaggacacctgcatgcccaaggcactccaccgatatgtgatcaactctggatccagcagtacatgaatgtgccctttcctgccaatatagatattcgtgatactgtaaagtataaagaagtaatgaaacaatatggacattggatccaatggcggctatagtgacctcaacgtctaatcatcatttgcatagcaagatttgatctaggtgatgaaatttattgagaaggccctagaacaatgttcaaattatgtgttgattgacacacctgtgacagagttgtaggtattcagctggttcagcattcatggagacagttcaatcactggaagcccattgcatcctcatttccaacaagttgtcatcatatgctagatgngaacactatgcgagaaaagtaccgaaccacaggtgacctttcatgtccaaccatgcgtctatgctctgacgagcagttctttatagcgaaaagcgaagactgtccttgtcagttgtggtcgatgaataaatagtgatcatcgattgtaccatgagtcttgtgctagttggcaatggcatgcgagggattttctggaggggtattccaaggatggcctgtggaaatcatggaga

SEQ ID NO: 513717 - DNA, 1589 bp, Homo sapiens
  misc_feature (358)..(358): n is a, c, g, or t
gtgttcttctcgtgcatactatgactaagagtgagttacatatggacgctatgttctgtgtcttccgcggttagttaactttaatacgggtacaatactctccacaaatcgctcccgcgtaacccatttgcatgtccatggcatattgactgagtacggcaggatcgtcctttaaggttacctttgcaatgaaacggaaccacactctagtgtggtcctcaaagtccattgtacttgctcgacgcattgtgagaccagtatactaatcttattaagacacggacatagacgtagatgagcagtctaggtatcaataacattttcatagatggcacctggtgaaaaaagcattactgcntgggacaacctcaggtgcaccatttgactcgtcccatctgtacaataccacatgtcttgatatgatctcagatgtgtttcatcaatcacttcactagagtaaacttacttgacgccaagtgagaggactgtgatgtcttgccaagctttaagcctgcaatgcactactgtgagaatgcaccaatttcacacaattcgcatggaggccgtatttccaactttcacgtggagtaaaactcttttctactttaacatcacatgaaattcccaacgcggccaaggctccttatccaggaggaaagccctactgtgcatgttccttgttgttcgggttataacttggaattccccccaatgggggattgcgaccctataccaagaagcgttcattccaacttgccgattaggagctacttctcatataatagatttttaaggagccttaaccctataaccccgatttggcagcctcggtgggtacaccacgaaggaatttcctccccttcttgtccgctaattgttgggaccatttgtgcccagtatcccaattggcatataaagcaaactgggaagccttcaacttcaacggcgggggtataaagactagctggagtgggaataggccatcgggctgtcgagggagaaacaggcttacagtgagcgcgccaaacttgccgagttgtgtcacgccaatattttttctcccgtttctgaaacacaccccccaactgttggagctcgcgcacaatatggccggtggaactactggaatcacctcctagagagggagagagtcccctgagcgcacagatataggacacataagaacacaacagcaatgtcttgccttttctctataaaggagacagcgccgaagccaacggggccgcccaatttcccacgcgcgggcaactcgtggcaggttacccacgacccacggaaagcacccaggggctcacccaacaccaggtgggtgtgcaacacggtctcgcaagccgcgaacaacagtagtgtcacactctgggcagcacaccagcaaaccacccctggacgacgacgcaggcccatccactcaccgcaaaaccagttgcgaaccgacccactccctgcaccgactagacgccgatctccccacgacagtaccagccaatcacgcaccagcgcgacacacagccgtccacacacacacaccgacaacatcaacatcgcgcgcagacgaaaccacaacgaca

SEQ ID NO: 513718 - DNA, 218 bp, Homo sapiens
ttcggagattcgatatcagcctggccaacatggagaggccccatctctactacaaatataaagaattaatggggcatgatggcatgcactctttcatcccagcttactctgcatagctgaggcaggaggcatcacttgaatcccggtaagtggaggttgccgtgcacctgagatcgcgccacatgtactccgagacgtggccgatatcagcgaagacc

SEQ ID NO: 513719 - DNA, 310 bp, Homo sapiens
tgcaggaaaggtcactggcctctatgtcacatgtggggcagggtgggaccgtcaacgtcggtcacgaccaaagcagtctctgtgtgatggacagtggcactcggtggcagtcaccataacacaacacatcctgtacctggactgggacacggacagtagctacacatgctggacagatccccttcccatctgccaggactcaagagccaatacacctttggcggggctccagccaatttgatgagactgaggatcccgtgtgtggaaatcattctttggttggctgaggaatattcatgtcattcacatc

SEQ ID NO: 513720 - DNA, 664 bp, Homo sapiens
ggatcactttccaagggagcgatactaaggcagactgagcttttgaaagatgggaggtcaggaggtggaagcgagaggagatcccatctcacagaactacacttccacgtaaatgcaggaccagcacttttccatgtgtcctgccctcttgagaggtcattctctcatcgtcctaagaagcctgtatcaggataagttgcggaagggttctgtgggaagataggcagcaggttgagagcagagacacttgccgacagggtggagcagatttgctcacggggtatcacatggtcttgcagtttggagctcttcgaccgagttggtgggagttctatgtaatgtgcggtgcaactgaacctgaaatagtgtagatagggacaaaagaccagtttatagggtggggttgatgatccaactgtgtgaagaagcagtttagctagcatctgtctccccaacagtccccatcccgggaggggcttatgttacaacggtgatcaagtgaaggaaaaacctgagcctatctggctgggatggtggaattaagcacaaggtcacattctctgtgatcacatgagagggaaggtgatgacttaaatggcagggggtggggatgatctggggagaggctgaaaagcaaaaaaagatagtcttccatgtaagtatg

SEQ ID NO: 513721 - DNA, 1837 bp, Homo sapiens
  misc_feature (180)..(180): n is a, c, g, or t
  misc_feature (746)..(746): n is a, c, g, or t
  misc_feature (1837)..(1837): n is a, c, g, or t
gaacgccaatgctgtacaggcactgcgatggttcaataatactacctcagcgtaccagtagaccgtgtgagactgatatctatcgcactgagagtttctcagaattcagctgtagcacgcagaggctgggaatactatctatggggacaactatgctccaaatggatacaagccgcagtntgatgtatgctcatactgtggtcttagttatccgagggacgcaatatacgcgtgagatgagtggactgtccaaatgatgatgtgccattatgatgtgtgtggtattcctggagctcacctttacatcattgtgagtctcagtgtgtgtcccgtgaagtcagtggggatgagatgacatgagcgtgagtacaacagagtgaggtttatggtggtgggggcagtctccgaacatattcaaaaaggtacggccttcatatcgtaccgtgaatttggaaggaaaacccgcatcatcacccactgaaagctgatccaggaaaatggcgtggggttacgatagatttgggacagaccgcataaatttgttcgcgtcttagtactatctcaaatgctatgtagagaaagagcaggtctattagtgttgccatatggtcgatcgttatttgtggcgcaatttcacgtgtctgtccacgtatgggccttagttgtgcatttggtaaatacttctccaattgacaccatctgggttgtggcaaggaccctgtccagtgttagagcgccttccgganaatccaaaacttatagaacgtgtgggtccagggacaattcaatataccagttggcggccacagagggacactttaggcggctctataggcaaatgcgcaggggggaaaaacccccgccattgggtccgtccattaacgttcaccttgggataattggcaccctttagaaaaaccaagcacagggaaaggaacatagggccattgcaaatcaatggacgttcaacgttgaacccttaactttagttccaggccacacaacgttggaaaagtggagagtaaaaaccaattaaaggtttaagccatagaaagtccttaagtggggtttgccaggcgaagggagacactttgggaggtttgggcagggcgtttggcccacatatggttccagaggaaccctaattttttcctaggagtttggggctgtttatatgaaaaacccaggggaagtggtttgtcactggtttaccaaagcccacaattaaattcttaattggggcaaagccattgcccttgtatatatggggcccgaaacttatttgagatcacaacgctcccggactggtgttcacccaacaagacgaaatgatccctccaagaaacacacgagacaagaaggaaagatccaacacaccgcgtgcctaaataaggtgggttcttagacacctatcacccggggtcagttatagttggaagaacacactcacggggggcgacacatggggagtcacccccacaaatacctttataaggggcaggagttaggggacaacccaggcggacatacaccgggtatttatggggagcagcgacgaggatagctactgtggaagacaacacagactggtgtgagtaatcaaaacaagaggtacataacggcgtgggaggaaacaacagcagatcgtggagagataccaaacaagagggggggtgcagcacaacaactcatgaaacagagaggattatcgctaggtagtcagaagagagctacgtacgtacacaacagcagagctgaagatgaggacacatacggtcgtgtccgtcttgctactcacacgcacgtcttgcagtcgcgccaagtagagtgggcaggn

SEQ ID NO: 513722 - DNA, 1429 bp, Homo sapiens
ggtgataacctccaggagtccctggtcggatagtaggagagctagtcgagggggaggatgaaagaggcttccggagcagtgttcaggaacagtgtctatacgagagactgatcgaaacatgatcatacgagatttcatgcattacgttcatccatcttgacgtttcactcatcactctaacagcgacacatctcgaagaagagcccatcgcgctaggaagaccgatgagaaatgacgaaaatcactctgaacgagtctcgggggaaaacatcggtgaatcctgagccagatcatcagaagacagtctcgcgaagctaggcagcagtccacttgtgccaacatgcgaacgatccaagtaagacgcttgggggcccacgactagagagagcttggcggagggaaggaggacctgagtgggacagccgcccgactccggaaggagcggggatagcaagaattattgtgccaggcgcacgatctaaacagtcagcacgtctacagctcggatgccaaggcctagacagcgcttggtagagacggcaggtgcgaaaagggccgacccggccggagaggagaccaaggacgaacgggttgacgaaggtaacaggaagctgcagaggcctgctaacggggctaggaaggccctgggccagagtttggacgacgacggaagtctgccgtggccgggctcgtgcccggaaggcttgcaggactgggtacgcgccctactttccaagtcagggaaggggcacaggccatccggccatgcacacaggcgaacacctcgagcggcgaaacgtcccccccaaacggccacgaaaaagggaccgagaggcaattaggggcagatcagcacagcacgggggggaggaggaaacagggtttgaggattttggtttgcactcgccatatggttggaactcgggaaacggtctcgcccttaccgcggggactacctcttcaaaaaggacggttcccctgtcactaaggcacaagggtaggaagggggcaggcgacctcgaagtacagactgaataacagacatgtggaaggtgcttcactacccgccggcatcacggcattagcaaccatccgagggattaactcacaagagactacggggcgtatatcgcgcaacaagtacaggcgacaaaacaagggggttccggcacggccgacgacccgggtggggcaacgacaaacgacatcttccgatgcgcggattgacagctgcgagacaacggtccgaccacgttgtcgctaagagcacagcccgaggacacgaccagcccaccacgaacgtagagcaaacggaacaacttcatctatctaatgacacgcccaaccgatattggcagcacacaagtggttgcgcaggcgggccgcgccacacgaggcagcagtgcggcagcaacacacagtggagcgg

SEQ ID NO: 513723 - DNA, 1542 bp, Homo sapiens
attcactcgtacgggtggcgccatgcctagtccttgtcgttctcgcttctctctcctcgcttcttgtctagtgttgtctccatgccgcttggtcggtatgttgttctgtgccgctctgtatgttctctcattcaggttcatttctcgtgtcgcttgctctttctgtttttgtttggtgtctctttttctctttgtgtgtttctcttgattcttgtgtttctatacttatggatgccctttgttttccttgtctgttgtccttgttttgtgtggcttatcgtttcgtctatgtgtttgtttgttgaatgcgcttttgtgtgtgttggttcctatgtattgttgatcatttgtgtagttcctctggtgtgtttactctattgtgttttttctgttgccgtttgttgtgtactagtcttcttttattaggtttctgtttcttccttttgtttatgtgttggttttgtgctccttttgccattgtgtgtgttatgataggaatgggtgttggtgatattttgtttcttgttgatgtgttgattatgatggtgtgttggatatctctgattgatattgttgttggttttcgttgattgatgtggggtgtgtgttcatggtgggttggtgtatgtaggtaatgttatgtgtagtgagtggtgtgggatgtttagtgctatttttgttagtgagtgtgatggatattgattatggttttcctctccgttttatattatgtgtccctaatcctggtcccgtttctcacataatcaggcatgcctcttttagattaccatcgcgggctactataggattgtgcattgataattctcgatatagtgtgctggtccccgtcgtgcgtaatgtggctgtcgctagttcattgttctcattctatggtgttctctcttggattttggggtatgttttgtgttcgtgttttccatgttgtccatgtccgttctggattgcttgttatgtggtggtgtctgtgtttgctctctttttgtttcgttatgtacctgtgttatgttttctctttgtttgttttctcttgtcttgtgtatagtgctcgctgtttgtccgtttccattgtgctttgtgtcgtgtctgttctctatcttatgtgcctatcttacatctagtcccttgttgttcctggttgtcctagtatttggtgtggtttattgtttatctaatgtactgctttgtgtcattcacctctgttctatgtttgttaatatcctagtgtggctattccttgcgtaggtgctatgtgtctgttggaccgatactgtatgctaggtagctacctcacgtgtgctattgtgacactctcttatagttctggcacctgtgtatagcccttgtaaacacccgtaagccaccaggttccccgtttacctctagagacgtctatttttgtgtctttttaatcggggtaggggggagggggtggttgtagctccattattcttttttattaaaaaataccacttaccaccatggaggctcaccttgtctcccagccacaatgtacaaagcgta

SEQ ID NO: 513724 - DNA, 428 bp, Homo sapiens
gacagaaagttccaagtgctctgcaagtcttgtgagggagattagtaaaagtgattcccaaggaaatgtaaaaaagggaatatagatatttgccttttcctagtgtctgctatgcaccagcagtggggtgtacagacctgtgtttgaacccaaagaggtagtgcctgcatcagaactcagcttagccactgtgggttttctctgaactgggaaggaaggacttaggatggactggtgctcctgggacaccggaatctgtcatctacaaggccagagcttgctagcaggtcctagagcctcaatattgcagtttccaaggggagagcctagagtccaagaaggaggcttactagaagagtccaatccagttggtgccccttggaaatctctttaagaaacagggaagaaaaggagatacaaagaggagg

SEQ ID NO: 513725 - DNA, 936 bp, Homo sapiens
attcggagtcatgctcaagccccgtgagtaaacatctatggctatcgccgttccttgtgctagtccctatgaggcataggtataagcaagctccatctgactacgataaacagagcctaaaatcgtcattgcatactcttcaatcagacaatagccctcggagtggcggccattgtcatccaaaccactgaagcttacaccggcgcggtcatgctcataatcgccacgggattaatcctcattatatttctgcctagcaaatctcaaaggtacgaatgccctgcacagtcgcgtcataatcctctctcaaggacgttcgaggtctatccacactaatagcattttggatgacgttctagcaggcctcgtgaacgctcgcctttacccccgactatgaaggctaactggagaacctctcggtgcatagtaaccaagctctcctgatcgaatatcacgtctcctacttacaggactcatcatactagtcacaagccctatactcgcctctaatattgaccagcaatcacaatggggcgcactcacgacgagataagcaaggataaagccctcattcagaggagagaagcctcgtgttcatacaccgtatccccccattggtcgtcgtaatcctaaatcccgacattagtaccgagtttgcctcttaccaaaacgtaggacacagatcagtagatactgttcggtccggccgccacagaaatgttttagcacacatttgtggggggcccagtggaagtggagtggccaggggcctaagaacggcacgaagggggctcccaaaaaagcggggaccgcctttgaacagcgggttgggatggactcacggaacagcatcccgcggagagaatgaggagcgggagctagacatcacgcgcgagtcgtggacacacaaggaggtattagcctgcttctctggcc

SEQ ID NO: 513726 - DNA, 105 bp, Homo sapiens
  misc_feature (40)..(40): n is a, c, g, or t
gggtacttcacaccttacctagtcagagtgcttatatatnagcttattttggtatgattgagactaaagactgatcatgcgtgtatgtaaggacaacattctttt

SEQ ID NO: 513727 - DNA, 132 bp, Homo sapiens
gagtgaggttgagggagatggccaatatattagtgcctagcacaatgctcaattgtgtttttccttgttttagatttgccagatttagcaaatacaaatacagaacacctaatttaatttgagtttcagact

SEQ ID NO: 513728 - DNA, 798 bp, Homo sapiens
agccctactcctgccctgtgtgtgggttgcggttcaagagaaaagaccgcatgtcctaccatgtgcggtcccatgatgggtccgtgggcaagccttacatctgccacagctgtggcaaaggcttctccagcgcctgatcagcttgtaagcggacatatcaacgcaggatgtcacacttctgcagtcggcctcacaaagatgatcagacctgacaattgcttcttttgccacccgagaccgtctgtcgctcccaccctggcctgtcactgaagacataggttgccctgaccatgctgctgtgggcaagtacttgcgggcatgacatacagtggtcagaccacctgtaagtaatgcacacgcgaggggcccacgcaacttctgcggtatctgtagaccgagaaaggccagaaatgctcacatcaggatccgatcgagagctctgactcctatggtgacctctcagatgccagcgacctgaagacgccagagaagcagagtagccaatggctcttactccagcgacatggcagtccccaaaaaaaaaaaaaacaaaaaaacccggggcctcaaaagccggagagcgagagaaaaggagggtctcgccaagggcgcaagtggtcaaaaggcgtgttcccgtgacccaacataccatgacaccaaaggggacagctagccaggcgccccaaaagaggagcacggaataacacgaaatgcccagtaaccggataggaacaccaagagacaaccagaaaaataccccaaaaagaaggaaaaaaacaaaaaacaaaacaaagcaac

SEQ ID NO: 513729 - DNA, 160 bp, Homo sapiens
agacagcgaagtcggtgaagatggtgagaaagacacaaaggctgaccagacagagacaggaacctaatatgcttcttgaatctgacgatgagctacttgtaaatgaagaagaagcagcagcactgctagacagtggcagttcagtaggcgctttagcctg

SEQ ID NO: 513730 - DNA, 193 bp, Homo sapiens
acctcgcttagtgctctttggcgcgaatcttattccttccagcggattttcaagggacgtcgggagcgcaccggacgctacagaggtgtagcgctctgccagccattaaaccctagctccggacaaaccgttttcagggtgagagactgttaagtagaaaagataactctacccagggcgcactaagcgaggt

SEQ ID NO: 513731 - DNA, 185 bp, Homo sapiens
gggattgtataaaagctgtttaatcagtgttcatggacaaagaaggagagaaaggagtcaacaatgtgatgtgagaaaaaagagctgacagtgtgagaagaagagaacaccaatgaatgtgagtgagagaaatggagctgatgtggagtgggtacctgatgctctgaattctgtaattcatgtgt

SEQ ID NO: 513732 - DNA, 102 bp, Homo sapiens
gtagccaggccgcgcactgggaaaaaaccacggccttgggcaccttgtacccggtgacgttggcacgcatgtgctccatcacctggtctttggtcagggtgg

SEQ ID NO: 513733 - DNA, 121 bp, Homo sapiens
atgcctgggagagtaattcgacacgaggagctgactggatcgccgagcgcgagtgagggagccgagccgcccgccgccgccgtcttcgcctaccctccacgaacaggagtccgggcaaaac

SEQ ID NO: 513734 - DNA, 102 bp, Homo sapiens
atgtccggtgatgtctgggaggcaggacagttaggtaagggaagcacaaaagttgaagatgaggcactgccatcaaagctgtgcccggtacatgcaaggggt

SEQ ID NO: 513735 - DNA, 379 bp, Homo sapiens
  misc_feature (104)..(104): n is a, c, g, or t
  misc_feature (239)..(239): n is a, c, g, or t
  misc_feature (244)..(244): n is a, c, g, or t
  misc_feature (310)..(310): n is a, c, g, or t
gacaacgagctcgggcctcacccggatggcggctgctacgcgcggctgccggccctggggctcgctcctaggactgaaaagaaaaaacgctgcgcggtcgccgnctgggacctggcttccctgcgctgttccttgggcgccttttgcgaatgcgacttccggcccgacttgccggaaggatctgaagagctgggtccaagggaacctcactgcctgtggccgctccctcttcctcttcnatganatggacaagatgcccccaggcctgatggaagtcctgcggcctttcctgggctcctcctgggtggtntacgggaccatttaccgcaaagccatcttcatcttcctcaaatggcttcctcaactcgggcctcatgga

SEQ ID NO: 513736 - DNA, 259 bp, Homo sapiens
gtagggcggatggtgtcgggtgatggtcgttctaggaggatccccggtgtacgcgcaaccggcaggtctagagtgagtgatcgatgaaggatggatggatgatgatgatgacgaggaagctgaagaaaaagcgccagtgaagaaatctatacgagagactccagccaaaaaggcacaaaaggtcaaagtcagaagtggaaaaggactcagaaaccagtcatcaagcgaccaaggatcaaagggacaaggaagtccgttc

SEQ ID NO: 513737 - DNA, 1709 bp, Homo sapiens
  misc_feature (811)..(811): n is a, c, g, or t
  misc_feature (963)..(963): n is a, c, g, or t
  misc_feature (1104)..(1104): n is a, c, g, or t
tttcttatacgacattagtgcagtaggagtgagtacgtactctctggtctctggtcatgtttagttgatgcgtgaaacgtgtgtacgctcggctgtcatattatatctagttggcgtgggttgtcgtgttctagtctctctctgcttgtcagtcgtgtatggtgtagatatatgatctagttgtcgatctctacatgtgcacggggtgtgtggattacctgttgttggtgttagtggtgctcggactcattgtgacggcatctgtggtcgtcgccgccgcttgtttttcacctgctgggcgcaatattatagtcactcgcgcgggtgctaaactctcgtgggtgttgttcctcgcgccgttgctgtttggcgtgtgtactctagcctgcccctttgttgtatgtggggtgtcttcattcgttcgggtcgcagaaatgtgtgcttttttttgtgtgtgttttactccactccaatttttgtagtgggagtgttgggtgagcaagagagcggggcgggcgtatatggtgttgtgtgtttatactctgctcgcctccttctgttgttatgtgtcgcgcggtaccaaagtgttaagtaacccaatggaagcgcccttgtgagtgggtgtaattcaagaagcagcaacagatggacccggaatttttaaagggggtgcaccacacattaattgatgggaaacctttctgggataagggggaatcccccacaagaagagtgtgttgggtaaaccccaaaaaaaatctccccagggccttttggttataaaaagcggcatcgcggccccacgttaaancctaatttatatccggggtgtctcttaataagggttattttcgcaggggcacctctgtgtgttggcgccgaaaaatttctggggcactcagaagggcgcacagtgaaaaggggctcatctctttttgttggataaaattttgggggtttttntttttctcgagatggagaaggtgattcacgctcacagcacggggcccacacgccgtgtttgccacaacacacacttctcgccacggctgtgtctctcgagaaagtctctctatacacaccaacgcccacatgggctctcgntggggacacacaaggactcgaggctcggggctctttctctcgggagacctttcaccacgaggcacacgcgagagtgtttcgcgggagtgtccacaggctctttcttggtgtctttcacagaacacacacacagagttgagaagagacaccctctcgtgtgtggggagaccacagccggttattctctcacgccccctcggaatggtgtaaatttcacgttcacgccctccacgaaggttagaaactttagtaacacatgtgaataaaggacacactgagttccaccacttcgccggagacacccaaggttcgcccacgggcgcttaatggggagttttttacaatccgctcaagagtccaccacaatttgaggagcttatatcgagaacccctgaagaaagaatgggacacacgagacccttgatgaataattcaccacaccacttcacggagaacctgttttgaatgtaattaataggcacggaaagtgtttttgctaaccgtgaaacctttacctagatcagccatcagcctgtcaactccagttaacaagttaaggaccgaagtgtttcaaatggatctccagtaaaggatctttggagccc

SEQ ID NO: 513738 - DNA, 376 bp, Homo sapiens
gacttaaacaggttgacaagtctccaggtgtgttatgggcctccaggtgtgtgacaagtctccaggttgtgatgggctcaggtttacagtctccaggtgtgtgatgggccctccaggtgtgtgacaagtcctccaggtgtgtgatgggccctccaggtgtgtgacaagtcctccaggtgtgtgatggatcctccaggtgtgacaagtcctccaggtgtgtgatgggccctccaggtgtgtgacaagtcctccaggtgtgtgatggatcctccaggtgtgacaagtcctccaggtgtgtgatgagtcctccaggtgtgtgacgggccctccaggtgtgtgacgggctctgcaggtgtgcgaaggaccctccaggtgt

SEQ ID NO: 513739 - DNA, 1290 bp, Homo sapiens
  misc_feature (271)..(271): n is a, c, g, or t
  misc_feature (399)..(399): n is a, c, g, or t
  misc_feature (1290)..(1290): n is a, c, g, or t
tgtggcagattccattaactatagtggtaagaaatagaagccagtgtgtctatcagacacggcaactctcattctaggcgctgtcgtatgcaatactgcaagatggctaccgaccacgatactcataccctctgagttttggcatcaatagtgacatggctgggctagcataggcggaaaacactcaagtccagagacctggccatatctatatacgaagtcacaccttatgaccttacagtgaaccttggccggattcattttaacgctntgaatcgacattctacactcacttgggtacactccagcttgaaggggtaccttttatcctttggttcaaaggtataaaccacgatagctggggggcttgtagaccccgagaaggcagattgtgcgctntctaagagacttataacgcacatggcgatagcttgtgaatgttgtgcggtggggagacgcaagattggtggtcgatgggagttcagttgttacgcgcatagtgagactttgaacgagagttcactcaaggcaaaggcacaaccttcagatgactatctcatttgacttagcaatgaatttggcttggtgtcctatgcgctaaaatccgaccctatggaaaatgggcaagcatgaaaaaccccgaattattggaggacctaagacttccagagagattagtgccaacgagccaagtaattgacaagaacggaagcttccccattttggtgttacaacattttccgcgtaagaacttcgttagaccaactctcattaaggagtttttccaatgggaatgggtcattccggtgtgccaactacaggggctggcactctgtagaatagacgtggaggaacggaaaaaaagtccattttaagagcggtactcgctgtggcggtatataattcgactggttatttctacaacataacgtgctcttatctccagttgttacccccttacaattgaggacacaaagggggtagttcccgggttcaactatttcatagacgtcttggggtataatactcgtctacaccccaacttcctgggatcattgtggtccaccctagtaggatctagtataaaatacttggggggggcgtcgagtaacattacttctaagtagttccatagttcccaccaggtgtctcgcaaagagcctccacgattatttgcaccctccaaccaggtgcaaacacccgatggagaagaaatagcgaagaccaagttgggttgcgcgacgacatgcactggccgcttacaagaaaagagttgcatagacgccagcn

SEQ ID NO: 513740 - DNA, 428 bp, Homo sapiens
atgtggctgtcttcgagttcccgctgttgctggttcagagtgtcatctactcccacaattggaccaggacctagcgcagtagcttagccatctgcgggtccagatccaacagtaattgactattgaaggcttgcgggcccacagtggtgtatgtggttagtgtctatgctcagaatccaatgcggagagagtctcgtcctctggttcagactgtagtaaccactattcctgctccaactgacctgaacgttcactcaggtcacgacccacgaagcctaagcgcccagtggacaccacccaatgttcagctcactggatatcgagtgcgggtgagccccaaggagaagaccgtaccaatgaaagaaatcaacgcttgctcctgacagctcatccgtggttgtatcaggacttatggtggccaccaaata

SEQ ID NO: 513741 - DNA, 106 bp, Homo sapiens
gtatgtggtaggagtgtatgcacgtcctcgggctaggattatggttcggctgagtactcgtacatagttcagtgttggctaggcagaatagtatggcaggatgtta

SEQ ID NO: 513742 - DNA, 153 bp, Homo sapiens
ggtgtttcctttgtcttttttccctttgttcacgaggcttcgagagcgactggctgcgcaccaggaccgcgtggagcagatcgccgccattgcccaggagctcaacgagctggattactacgactcccacaatgtcaacaccagacaaaggga

SEQ ID NO: 513743 - DNA, 211 bp, Homo sapiens
agcctcaggaggcctcattgaaaaggtgcttttgagacccggttttccgacccgggcccctgatttataccggattccggaagccgttaggcctcataaaccccgaagttggacttggagtggggaatggtgggagtaggggtcatccggcccgaggcctgccctggcacacgggtttcccccgggtatggaaaaacacatgttttgggca

SEQ ID NO: 513744 - DNA, 792 bp, Homo sapiens
  misc_feature (602)..(602): n is a, c, g, or t
caacaatctccagcaggaacgcgctgcgcaccacatattgagttcgccaccttgagcccccaggttaaatttgcctccgcctatttgtgggatttggcggtaaaatctccccagaaacccttgcctgtttccatttaacgaaccccttagggaattcccccgggcacaaactcgccagggtcgagcttggtagcctcttcccctacagtccttacgagcctgaagtgagactggtgaacttaacccagtgcaacaaggtgctgtgccacactcctctctagtttcctttcactacaccggcaaatctgaaagaaagcagcatccccagtcactgcttatagataaactcccatcttcctgtgacagagcacctggggaaagggatgctgtgggcacagtttcagcagacttaaactttccccttgccgcctctgaagagacagtagatccttgacaaggaggttcttccagcacagcactcgactctgctaagggacacattgcctcctcaagtggtccctcgcccccctgtctcttgcttgggaagacctctcaaaagggttgacataaccctcatacagggaagctctggctggcatcanggtgcccctctgggatgaagcttccagaggaaggagcaggcggcaatctttgctgttctgcagccttccctggtgatactcaggtaaacaaggtctggagtggacctccagcaaactgcagcaaacctgcagaagaggggcctgactgttagaagaaaaactaacaaacagaaagcaataacatcaaaaa

SEQ ID NO: 513745 - DNA, 103 bp, Homo sapiens
caccctatacaccgtactatacccctgactataccaccaattgcaaaggaagaaggagcttgatgccaggaacagattttgcagttggtggggtggtatagct

SEQ ID NO: 513746 - DNA, 706 bp, Homo sapiens
ccgtgagtggggctgggccctggcctcctagagcggggctgcgttgtctggggcggtagctgggggggcgctctccccggtgcccgggatgggagcagcccgaccgctccggtgccgggggcaggacaggagggggccgtggaaattgtcgggggtgcgcgggtgtgagggtccctgggccttgaggcagtgtgaggtcgcaattgaaggtgagagcttggtcgagggatgagggtgacgctcgttgcttgcactcttcctgaattggctcgcccgtggccacggccgtactcgcttggcaaggacttcgcacgttcctgtgcactgacgcggtgaacagaggcccaagccaattaagattgcccccttgagggatggccccattggaagggcccactggaatggccccgggtggggggcctccttggagaatgaggtgggggcccgggtggtgggccaagcagtgcttcaccccagcgattgaggatcggggagacaaccctcggtttggcaggggacaggccactttccgctttccggggagacgtgccatagcccggtgagcgctgccttcgggactatcggcgcattgccacactacatttggacgcagtggcggattgcccgtgataggacagcgggaagaacggtacttgcccctaacggggttaaccaacctggctccaaacagggccagcgacgggag

SEQ ID NO: 513747 - DNA, 283 bp, Homo sapiens
actaaggtttttaggtttgggggcaagaggatgaagttcccttcctcctccttttacaacatgaaattacaaatggttcttttgtaattttataagacctaaccttggaaaataaacacgtgaaaatattaagactatcactttgaccgatcgatagggatgatcttgttgtagatgatatacaaagcaaacgtatgacccagccccaattgagaaatcaatgagatggaattttgtcaataatgcccaggttggcgacagtgtgagatcttgtctccttaga

SEQ ID NO: 513748 - DNA, 837 bp, Homo sapiens
  misc_feature (36)..(36): n is a, c, g, or t
  misc_feature (58)..(58): n is a, c, g, or t
  misc_feature (72)..(72): n is a, c, g, or t
  misc_feature (88)..(88): n is a, c, g, or t
  misc_feature (92)..(92): n is a, c, g, or t
  misc_feature (102)..(102): n is a, c, g, or t
  misc_feature (142)..(142): n is a, c, g, or t
  misc_feature (178)..(178): n is a, c, g, or t
  misc_feature (227)..(227): n is a, c, g, or t
  misc_feature (231)..(231): n is a, c, g, or t
  misc_feature (264)..(264): n is a, c, g, or t
  misc_feature (374)..(374): n is a, c, g, or t
  misc_feature (390)..(390): n is a, c, g, or t
  misc_feature (392)..(392): n is a, c, g, or t
  misc_feature (476)..(476): n is a, c, g, or t
  misc_feature (588)..(588): n is a, c, g, or t
  misc_feature (738)..(738): n is a, c, g, or t
  misc_feature (814)..(814): n is a, c, g, or t
tctcatttaacttttttaatgggtctcaaaattctntgaaaaatttttggtcaagttntttccattaaaaantactgattttaaaaantaanaacttaaaantgccacacgcaaaaaaaaaaaccaaagtggtccacaaaanattctcctttccttctgaaggttttacgatgcattnttatcattaaccagttttttactactaaacttaaatggccaattgaaanaaanagttctgagaccgttcttccaccactgattaanagtgggggggcaggtattagggataatattcatttagccttctgagctttctgggcagacttggtgaccttgccagccccagcagccttcttgtccactgctttgatganacccaccgcaactgtntntttcatatcacgaacagcaaagcgacccaaaggtggatagtctgagaagctctcaacacacatgggcttgccaggaaccatatnaacaatggcagcctcaccagacttcaagaatttagggccatcttccagctttttaccagaacggcgatcaatcttttccttcagctcagcaaacttgcatgcaatgtgagcngtgtggcaatccaatacaggggcatagccggcgcttatttggcctggatggttcaggataatcacctgagcagtgaagccagccgcttccattggtgggtcatttttgctgttaccagcaacgttgccacgacgaacatccttgacaganacattcttgacattgaagcccacattgtccccaggaagagcttcactcaaagcttcattggtgcatttcgacagantttacttccgttgtaacgttgac

SEQ ID NO: 513749 - DNA, 107 bp, Homo sapiens
  misc_feature (92)..(92): n is a, c, g, or t
tgaggatcctgtggtcagtgatctccaaagtagctggggtcttgtgggacaaagttattgatgtaacactgaacctctgggttggcatggtngcaggcagtatattt

SEQ ID NO: 513750 - DNA, 359 bp, Homo sapiens
actacatacgtgcacgcacacacaggcacacacacacacacagatagtgcacccacacacaggcacacacacaggcacacatgcatacaaaagtacacacatacaaatgtacacatataacatacgtagcacacacacatatacccacacacgcgtgaacatacaaataataaacccacacttttaatgcacacacacgatgtaaacccacacaacgtgcacacacgtgcacccacaccacatgcgcacacacacaggcacacacaaatgcgcacccacccacacacgcacacacacacgcatcagctcaatgtgtgcccgagggctgcgagaggtaaaatatctctgaggcccaggga

SEQ ID NO: 513751 - DNA, 108 bp, Homo sapiens
  misc_feature (20)..(20): n is a, c, g, or t
  misc_feature (80)..(80): n is a, c, g, or t
ggcccagcagagtgatcagnaggttgaggcgaagaagaagatctgaatgagctggccttgcgaggcccaggacaaggatnccaggcaggttggtcatggccacacctg

SEQ ID NO: 513752 - DNA, 193 bp, Homo sapiens
ggtctcctggctgcctcctaactgcacttcctggtagcccctctgcacccctctctcctcacgtgtcctgttggtcagtgactccccagaaccggctgggtgtgttgtggcacaattctgaccgcccattgcgctagccctgcatcaggctgtctttttggttgcaggtgctgtgagcaggactattcgccaa

SEQ ID NO: 513753 - DNA, 1114 bp, Homo sapiens
  misc_feature (298)..(298): n is a, c, g, or t
gagcaggcgatggcgcctgcgacgcggaagactataagccccagcgggcgacgaccgaactgcccccggtgaacaccgtggcccctgagcctcttgtcccgcgccacgagtgtatcctccacggaggctaggatggtctgcgtcggggtgctgggagctggcgtgtgagcgggcagcgtatggtgcctgcgtagctccccgggcggccacttccgtcctgtcgcccgtgcgtggacccacgcaggaaatggcgcgtcgccatccgctagacccgcgaaaaacgagtatcgaatttttnctcgactgtgcgcagcggggaacgtcctggatagaatcctctgtttccaagtaggcaagctccggcgcttccctagccctgtacctggaagcctctgggagggctgcagagtaaagttgctcgcactctgcgactccgacggatggcatcgaggcctgtggagtaggtccctctgttccgatcaggtgcgcacgcttggcctctccagtgcttgccgggtgccgggaggcctggcctcccccagggtccgccagcttctgctggttgtctctgtgctttcaccttaacagctctggcaagcagaggctcccgtgcccggagagagaagctgtcagtcacatgcacctcaatatttgcccatgctggctggcggaagagttccgtggtagcagaagagtgctctcctatgctcgtaatgtccgggctaaatattccctgagtggtggtccctctcgtgattctgtctgagatccatcacggtgctgctcatctacgtagaaagtgaggttctggacgctgccggcttcagcttggattggcaacacgctgattttggaagtacgaaggcgggctgtcgtgtgttgttggccctgatcttcgcttggtcttggatcgctcaatttcgtccagtgacacgttgggaacacaaaagggctctgggaaacaacggtccggaaagcataattggagtccctaataagtacatttccaccctttgtttcccggggtctcagaaaaccttatttcccaacggtgaaagtcaacattggctgcattgaacacctggtctttcgaggcctgtgtggacacccgttc

SEQ ID NO: 513754 - DNA, 168 bp, Homo sapiens
ccagtagtcgccctcgggttccggttcctgcggcttgggctcgctggccatgcgggtcagcagcggcggcaccgcgttcatgcggatgtagagctcggtgtggtcttcggcctggccggggatgatcagcggcgtgcgcgcctcgtcgatcaggatcgagtccgcttc

SEQ ID NO: 513755 - DNA, 454 bp, Homo sapiens
  misc_feature (26)..(26): n is a, c, g, or t
  misc_feature (35)..(35): n is a, c, g, or t
  misc_feature (108)..(108): n is a, c, g, or t
  misc_feature (189)..(189): n is a, c, g, or t
  misc_feature (239)..(239): n is a, c, g, or t
aacaaaactttgtggggtttaattanaacccccangcttgccctcccaaaaaatacagttccttttaagtgaacccagaataactgcccaaattgcatgtgttcttgnctttcccaggtgaagcctttttgttccttaagattgaagaaacctatgaaggatctgcagccaggtcatggtggctcaggncctataatcctcagcactttgggaaatccgaggtgggtggatcgcttgancccaggagtttgagaccagcctgggcaacataatgaaaccctatctttacaaaaaaatacaaaaattagctgggcgtggtggtgcacacctgtagtcccagctactcgggaggctgaaatgggaggattgcttgagcctggcaggtcaaggctgcgatgggacatggtcatgccactggacgccagcctgggccacagagggagaccctgtctca

SEQ ID NO: 513756 - DNA, 970 bp, Homo sapiens
ggttcctctcaggagatccctgagcgatgggtgtgagggaggtctgttgaattctacttggcctctattgatctcaggcctgcatagaggtgagagcatttatgatcatgttgtccatagtcagaggattgcgatagacttctagtttatgtacctcaaatcgtctagggcgcatacggagatatagttgagaccatcacctaggtacatggcgacgcgggcgtccctgttattccaaggaaccggtggcctgtgctagttggccacgcacaggtgggatgatggccatcagagtaggggtgcacttcacgcgagctcgcgggagttgagatggcggccaggttgacttggtccttcaggcaatgatactttaggtaccgggtggcctctgccgtttttcaggcaatgaaactctagtgacgggtactctgatagggagctggctagcacgtaagtcacagacaccacactcaactctcctgcagatctagtattcttggaaacatgtcaaaagaatgggcctaatcttccgagtaacccactacccttcagacctcagaggcccactaaacttttaatgacacccagaattacctggatgtcagctggtggcccggccggggtgggtaccaatgctgctggtcctttcgggaatcactccaaggtgtggataagcgccatggctgtgggcctcggtattgtacacccacgaagatcgaccaggtggagacaggtacgacccaacagctcaatgcccatgttcacactctgaccccaaggcagcaaaagaccgagctggggccaagaacagcggatgagggagcgacacgacacccggacggcggcaaccctggcaggaccgccggagaaaccggcccacggacgcgcaaaccccaccgcgtgcacgactggccgcacccgcccgacgcgacgtcgactggacaaagcgacacacaaaccactgaacaca

SEQ ID NO: 513757 - DNA, 508 bp, Homo sapiens
tttataactaaagcagaagtagatccagtcaaatatctaacgtaacacaggagcgtggaagacaatggtatcaatcggaccatctctgccgaatttaagttcccacgcgacctatagatagccggttaactttctttttgcccccaggcaatgaggcctagaagaggtcaaggttagaaaggttaagcatttgatcactacaggtacttgtcgtacctagagaaggaacccatcctggggttggtggagttggtattgctactcgttttgatagttctcatttacagagaaagaaaaataagccaaagccagaaagcaatccaagccttacagttgtccaatacctcagggccagtgggctagaattttcttttccctcagcccataatcacttagagttagccatacaacaaacagcctgacaatctgaccagcatttccattgatataaaatgtaagcattccttcattctgtagttaggaactccaacttcagccttatctccaa

SEQ ID NO: 513758 - DNA, 1262 bp, Homo sapiens
agctgtaagctgtgacgcggtagggcaggccctgatgtggtgtagttcgctggggtttccatagcctcagtctccatgctactcctttgactctttaccaatcaggggttcatgcctaggggtcccctgttggatggtacggcatgcccaagatgctttgggcagagagatgcatcagaagaatcctagaaccgtccctccgaatgtgcgagatgacctgtctgaggtccgtgctgagaagaatgtggcggcggcagatctgtccctgcgtggtctgggtatcttcaactatgtttcaagagcaaagttcatgacctgatgcccacctacataggtccctaatctgggacggcactgtgttgccgactagatgccttacaatgcgtacaattatatgtagggtaattaatagccttccgggactttatggcacttctttcccttgtaaactaagtgagacttctaacggaccgcgctgtcccgcacaagatacagggcgcattatcgatcatttgtccctattgtccaaggacagagggtcacaccagggcatgaaggctccctacttttgttccataggcttccgattaagacaacaaatcattttcgaatgcattacgcgcagttccggtacgtctgtggtgccaacccttggtactaccgtgagattcctaggggcctggtacatgaaccaaggttggttgtaatcacaatccttttgggtcacataaacatcagcaatacccaaactttgccaactagttaaggcaacgagttaccttggcccttgaaatcctagaactaagtcaccgtccacatgggggcatgcaaagttccgtacactgagcagtgccacgtagaaaactctcacataatgccagcataagggtcacacagagaatccgtggaccaaattcttccaagatgtagtaatcaggcgataggactgggatataccactattacacacagttgtgtaggctccctaacagtgttacagacaagagcagcacaaccttttgggccagagtaccagttggccggacgacattattggcttaataagggcattggcacggtactcttgtgggacatttgcaccccttatttggtctctataaagaacgaacaaccaaacggcttagtgtataaagcggccccctctacccgtagttgtgagtactcgatcgacacacaggatatgtggcggaccacactaacgtgatctaaaacacgtattccactgcggaggacaagacatt

SEQ ID NO: 513759 - DNA, 102 bp, Homo sapiens
  misc_feature (47)..(47): n is a, c, g, or t
  misc_feature (51)..(52): n is a, c, g, or t
  misc_feature (57)..(57): n is a, c, g, or t
  misc_feature (62)..(63): n is a, c, g, or t
  misc_feature (65)..(65): n is a, c, g, or t
  misc_feature (102)..(102): n is a, c, g, or t
gtgctggggtgtttatggcaagtcactttgacagacattattgtggnaaannttgtntgacnnantgtttcaacaaaccagaagacaagtaactgtatgagn

SEQ ID NO: 513760 - DNA, 911 bp, Homo sapiens
ccacctcacacagcttctgataccttggaggactcttcccctttgctgtacctgtcatcatggctcaccgatttccagccctcaccccagagcagaagaaggagctctctgaaattgcccagcgcattgttgccaatgggaagggcatcctggctgcagatgaatctgtgggtaccatgggaaaccgcctgcaaaggataaaggtggagaacaccgaagagaaccgaacgcagttccgagaactcctctttagtgtggacaattccattagccagagcatcggcggagtgatccttttccacgagaccctctaccagaaggacagccagggaaatctgttcagaaacgttctcaaggagaagggaattgtggtgggcatcaagttgaacccaggaagctttcatgaagcgggctatggctaactgccaggcggcccaaggacagtacgttcacacaggctcttcaggtgctgctgccacccagtcgctcttcacagcctcctacacctattagatactgtcaccaccagccaggctccagttctcctaaatattttggagacctgaatggctcagtcaaccctggaaattagataacatttgattgaacttctgaaaacacaacacatgtgaatcataaacacaagagaaaagccaaatcagctttgaaacccaagaatgagcatgtcacccaatagtctctcaacacttccagttccctatgttccagaacattcatccaagaaaagaacaggccacgactgagaaaagcaactcagaagcagaggatggagaagggcattttaataaacatagttaccaggggttggttatagaagaggcacagcaacagaaaaagaaataaaacgtgtatgaaccttccgttggtacagtttcactttcctgctcttg

SEQ ID NO: 513761 - DNA, 307 bp, Homo sapiens
aatcacgcaccgacctgaccacacgaacagcaatgacacgcgagatggaaaagaactccttcaagtatgcctgagatcttggataaactgaaagctgagcgtgaacacagtatcaccatcgatatctcccggcggaaatccgagaccaacaatactatatgactatcattgacgccccaagacacaaagactttatcaaaaacattattacaggcacatctcaggctgactgcgctgccctgatcgccgtcgctgacgtcgacgaatatgaagctggtatctacaagcatgtacagacccgagagta

SEQ ID NO: 513762 - DNA, 1551 bp, Homo sapiens
ccacctcacacagcttctgataccttggaggactcttcccctttgctgtacctgtcatcatggctcaccgatttccagccctcaccccagagcagaagaaggagctctctgaaattgcccagcgcattgttgccaatgggaagggcatcctggctgcagatgaatctgtgggtaccatgggaaaccgcctgcaaaggataaaggtggagaacaccgaagagaaccgaacgcagttccgagaactcctctttagtgtggacaattccattagccagagcatcggcggagtgatccttttccacgagaccctctaccagaaggacagccagggaaatctgttcagaaacgttctcaaggagaagggaattgtggtgggcatcaagttggaccaaggaggtgccccgcttgcaggaacaaacaaggaaaccaccattcaagggcttgatggcctctctgaacgctgtgctcagtacaagaaagatggagttgactttgggaagtggcgtgctgtgttgaggattgctgaccagtgtccttccagccttgctatccaagaaaatgccaatgctctggctcgctatgccagcatctgtcagcagaatgggctggtccctattgttgagccagaggtgcttcctgacggagaccatgacctggagcactgccagtatgtttctgagaaggtcctggctgctgtctacaaggctctcaatgatcatcatgtttacctagaaggcaccttgctaaagccaaacatggtgactgctggacatgcctgcacgaagaagtatacaccagagcaggtggctatggcaatgtcacagctctccacagaactgttcctgcagctgttcctggtatctgctttttgtctggaggtatgagtgaggaggatgctacacttaacctcaatgctatcaaccgttgccctctaccaaggccctggaaactaagcttttcatatggaagagccctccaggccagtgcattggctgcctggggtggcaaggctgcaaacaagaaggcaacccaggaagctttcatgaagcgggctatggctaactgccaggcggcccaaggacagtacgttcacacaggctcttcaggtgctgctgccacccagtcgctcttcacagcctcctacacctattagatactgtcaccaccagccaggctccagttctcctaaatattttggagacctgaatggctcagtcaaccctggaaattagataacatttgattgaacttctgaaaacacaacacatgtgaatcataaacacaagagaaaagccaaatcagctttgaaacccaagaatgagcatgtcacccaatagtctctcaacacttccagttccctatgttccagaacattcatccaagaaaagaacaggccacgactgagaaaagcaactcagaagcagaggatggagaagggcattttaataaacatagttaccaggggttggttatagaagaggcacagcaacagaaaaagaaataaaacgtgtatgaaccttccgttggtacagtttcactttcctgctcttg

SEQ ID NO: 513763 - DNA, 279 bp, Homo sapiens
ggaagagcactgaaatgtaggtagcataacaggtgacctcttatctctcatgaaagtacatacctattagcaggctctgtaaatattgacatacttagcttttaatacattctataagtaaatttatagatttcagaataacttaaaaaatttaatgagtaagagcaggggtgcatgtgtcgaaccactcatactcaaaagtattaggtcactttacacacacaacgtgcataatgtcatgatttaatagaaatctataagcattcagttactacttta

SEQ ID NO: 513764 - DNA, 373 bp, Homo sapiens
  misc_feature (68)..(68): n is a, c, g, or t
gaaactacacccatgcagatatatgcactctttctgagaaggagagccaactcaagaaccaacctgcncttgttgagctcgtaacacacaagcgtagagaagtgctgcaagcctcactataagaagacttgctttgccgagaagggtaaaaaacttgttgttgcaagtcaagctgctttaggcttataccttcacatttaaaagcttctcagcctcccttgagaataagagaaagaaaatgaagtctcaaaagcttattcatctgtctttttcgtgggtgtaaagccaccaccctgtctaaaaaaccataaatttctttaatcatttcgcctcttttctctgtgcctcaattaataaaaaatggaaagtatct

SEQ ID NO: 513765 - DNA, 335 bp, Homo sapiens
tcgagctcggtcctcccttccacagctgctgggaggctgaggcaggagaatcgctgaaactgggaggtgagctgagatagagccactgcactccaacctgggtgacaaagcgatactctgtctcaaaaaaaaaagaaaaaaaaaagaaaaaaaagaatatcccattaaataataaaaatattaccttggtggattttaaagatttatccctgtgaaaggtttacaatttctgtaatttataattaaaccggaattcaaagattaccgtgttaataatttgtgtggtgagccttaagaaaagagactagttatacctccctttatatttggtattt

SEQ ID NO: 513766 - DNA, 199 bp, Homo sapiens
gcacgagaaaaatccaaaaattagccaggacatggtggctcgtgcctgtaatctgagctactcgggaggctgaggcatgggagtctaagacagaagaatagaagaattgcttaaacccgggaggcagaggctgcaatgagctgagatcgtgccactgcactccagcctgggcaacaggctttttctgtgagactgcgtt

SEQ ID NO: 513767 - DNA, 209 bp, Homo sapiens
gtatagtaataatgcactgagttctgcggcattttccgacgttcattctgcatttagagagagaaaaaacactgttgacagtccaagtaatggatgttccgctgcatgtaatggcgccatttcagtcagacccacaaccccgtatgggtgggtaggcatttcatacaatgttctctatctcgacgccaacagtccaggcagttgtgaca

SEQ ID NO: 513768 - DNA, 439 bp, Homo sapiens
ccgaaaaacaagaggaaaaaaaggctcacacctgtgatcccaacactttggggagctgaggcaggaggatggcttgagcccaggagttcaagaccagcctgggcaacacagcaagaccctgtctctactgaaaatgaagatacaaaaattagtcgggcatggtggcacacgcctgcagtcccacctacctaggagagacaggtggggaggattgcttgagcctcccgagtagctgggaccacaggcgcccaccaccatgcccggctaatttttttgtatttttagtagagatggggtttcactatgctcgccaggctggtctcgaactcctgacctcgtgatctgcccacctcggcctcctgaagtgctgagaccacagccgtgagccaccgcgccttgccagacatgaccctgtctctagaaaacaaaacaaaaccgg

SEQ ID NO: 513769 - DNA, 985 bp, Homo sapiens
accctcgaatgcagacgagctatctaagaacagctaaaagagcatacccgtctagtctagcactagatagatggggaagatttactacgtgtagagggcgacaatacctatcctgaggcctgggagatagcgtggttgtccaaggatagaatcttagtgcaacttgaagagtttgcccacagaagcctctaaatccccttgtgaagtttaagctgttagtccaaagaggaacagctctttggacactaggaacataaaccttgtagagagagtaaaaaatttaacacccatagtaggcctaaaagcaggcaccgaattagagaagagcgttcaagcgtcaagcaccgcactagcctagaaaaagtcccaaagcatataactgaactcctcacacccaattggaccaattctatcaccctatagaagaactaatgttagtataagtaacatgaaaacattctcctccggcataagcctgcgtcagattaaaacactgaactgacaagttaacagcccaatatctacaatcaaccaacaagtcattattaccctcactgtcaacccaacacaggcatgctcataaggaaaggttaaaaaaagtaaaaggaactcggcaaatcttaccccgcctgttagcaaaaacatcacctctagcatcaccagtattagaggcacggctgcccagtgacacatgtttaacggcgcggtacctaaacgtgcaaaggtagcataatcacttggtccttaattagggactgtattgattgggtcaccgagggtccaggtggctcttactttaaccagtgcaatgactggccgtgagaagggggctaaccagacggcagcgaagaccaaggggctacatacataaggcaccggcacctaaaaaccccagtgccaaaaccaacgtggtaaacacgggggggagacccggagaacaaccccgggcacataagagaaaccacagaggccatcctgcacaaca

SEQ ID NO: 513770 - DNA, 155 bp, Homo sapiens
gtcaccatgggcaacgcggcaccaagggcctgcggaaatgacggaaaatcgcttctgtatgttaatagcaatatatgacctctgctttcatgtattcgatttcaaccggcgagcggctgtaggtcaggtagtcgcgcttggtcatgcccacgccg

SEQ ID NO: 513771 - DNA, 860 bp, Homo sapiens
  misc_feature (52)..(52): n is a, c, g, or t
  misc_feature (88)..(88): n is a, c, g, or t
  misc_feature (102)..(102): n is a, c, g, or t
  misc_feature (124)..(124): n is a, c, g, or t
  misc_feature (147)..(149): n is a, c, g, or t
  misc_feature (153)..(153): n is a, c, g, or t
  misc_feature (190)..(190): n is a, c, g, or t
  misc_feature (199)..(199): n is a, c, g, or t
  misc_feature (215)..(215): n is a, c, g, or t
  misc_feature (239)..(239): n is a, c, g, or t
  misc_feature (242)..(242): n is a, c, g, or t
  misc_feature (254)..(254): n is a, c, g, or t
  misc_feature (350)..(350): n is a, c, g, or t
  misc_feature (360)..(360): n is a, c, g, or t
  misc_feature (380)..(380): n is a, c, g, or t
  misc_feature (424)..(424): n is a, c, g, or t
  misc_feature (445)..(445): n is a, c, g, or t
  misc_feature (487)..(487): n is a, c, g, or t
  misc_feature (499)..(499): n is a, c, g, or t
  misc_feature (501)..(501): n is a, c, g, or t
  misc_feature (508)..(511): n is a, c, g, or t
  misc_feature (515)..(515): n is a, c, g, or t
  misc_feature (528)..(528): n is a, c, g, or t
  misc_feature (540)..(540): n is a, c, g, or t
  misc_feature (569)..(569): n is a, c, g, or t
  misc_feature (571)..(571): n is a, c, g, or t
  misc_feature (688)..(688): n is a, c, g, or t
  misc_feature (860)..(860): n is a, c, g, or t
aggaaagcacccgttttaaccctcatatctttctcagggctcactgcgggcnggccatatctggagcaggtctgtcgagtggcttggnacataggcttttgnggtgaaacgtttaaaaacattncttgaattaggattacgcagagnnnactngattctgagtgggcgcaactatcgctgagaccctganatttcaggnaataaacatggttcanaactcaaactgttcatcaaaatanttncgcaggtcagcnaccactgcagagccatcactgctcagaggaattgggtcagcaatgactgatctcatcatctcttcattagcacataagcggttcaccttggggtangcgaggggtntctgcgggggtgcgggaganttgtctccaacacggaggggtgtgggagagttctctatcttggncttctcaacctctgtgaagantggtccaaggcgtgggagaggggcctttgggccaccagtgtntttgggcttatnancccgttnnnnagcntgttctttccgcnttggcaggtggntcactcttaagctttccacttgttggggnanctcattaaccaacacaagtttaaagaacctttcctgctgttagttgggtatgtggtggtagaagcagctttatgaacatgctgatcatgctgctctgagagagatgattctgttgantttcctccatttttccggaagattcctatctgggtacagtatccaacattctcagctccagctggtggttccccgacaccagtaaactccacagagtaatcatagcgatttgccacatataaagcccaggtctgaaactccattctggtccactcaaatttatgatctgaan

SEQ ID NO: 513772 - DNA, 674 bp, Homo sapiens
gtttaacgggcgcggtaccctaaccgtgcgaaggtagcataatcacttgttccttaaatagggacctgtatgaatggctccacgagggttcagctgtctcttactgtttagccagtgaagattgagctgcccgtgaacgaggcgggcatgacatcaggcaatgacgagaagaccctatggagctgtaatttattagatgcgaaaacaggacctaacaaaaccacaggtcctaaactaacaaacctgcattaaaaatgtcggtggggcgacctcggagcaggaatccagactccgagacagtatgatgctaagactttcaccagtcaagagcgaactactatactcgaatgtgatcctaagtaacttgactcaacggaactagagttaccctagggataacagcgcggatcctattctagagtccatatcaacaagagggttgacggacctcgattgtgggatcaggaacatcccgatggtgcagccgctatataagaggttcgttcgttcgacgattaatagtcctacgtgatctgagtgtcagaccggagtactccaggtcggttgtctatctacttcaaatgcctccctgtacgagaggaccccgagaaataaaggccgactgcacaaaggccctcccccgtcatgatttgatctgcatagtattataccaa

SEQ ID NO: 513773 - DNA, 284 bp, Homo sapiens
acttatctgttcagcttgtggctcagcctacatcagatactttcctttctggtttctgttaatgagtagaaccactacatatatgggtcaaggacaaaaaagctcatgcttctcctctctgtgggagaagcaaggtaaaccaggccaggcaattagtctccatgacgcgcggtctacttctggaggagtcctggaggcatttaagcatcagccaccagagtagtggggaaagacatagggccagtgtcagctgcaatatacaaaaaaaatgcaacccaacacta

SEQ ID NO: 513774 - DNA, 1191 bp, Homo sapiens
gttctgacacgaattagtattattgcccagaattttcccaatgtcttacaaaaacattctttggaggagcacccctgtgggatcctatcttcaagggtaatagataatttaaaatgccttatcaccaaccccaaaactcccccaatatccagagctcttttttgaagaaaaaaatccccagacatttttaaaagggagtccccagatttttgagaaatatccctgagaagggacacccattaatttattgcccccccgttcccaatttatgggaaaatttgtttaaaaggactttttacgcccaggtagccacccccgccacggttttattaccccccgtttggtatgcaacaagcggcgccaaagggtttcatcctggtatccgccccaagtaagcttccacgggtaccccccaaatggaagaaaaggttttccacgagaaaatggaccaccacattcttgggtcttctggcaccacaagttttccactggggagacccctcataatgtaataaagggacctcttaggaggcacagcactccctaaattggggcccaccgctgcaccgcttttggcccaatagtggcccaccgccctcgttctctggtttctttaaagcccacctgagagtttcactataaactcttctgtgccctaatacctcggcactacaaagggccacatgttaggcgcacataattaaaatgagaaaagtggagatattataagaatagcttttccccacattccccccctaatttcacacactttgaggttctgacacacacctcgtgtaggtttttctctggttgttgctcaagactacccactaatgaagtcttagagaaatagccccaaacgagttattcctcttatactcgtgaatatttaaataactcttaaatattcgccattgtcccagatatcttggatttaaactcggtttgttctctatatttctttctccatcctttaacgggaaaaaaaatcccgttattttctatactttggtaatatctaagatgttttggagggattttaaaactgaatattttattctggctataacccgtttatttggagaaagtatggatttttaatagtaaatccatttaaaaaggaccaaagtataaatttcccgtgattttcactgctgtccagtagaaaagtaataaacatttccaatttta

SEQ ID NO: 513775 - DNA, 525 bp, Homo sapiens
ggaccaaaagggggggccccccccggggggcgcccccttaaaaaaaaggggcccccccgggcgccgggaattggccccggggttattttaaaaattcccccccccctttttttttttaacccaaagcttaaaatttggtttttttcggtaaaaaaacccctttcccccctttaattggtcttaaggccccccccttgggttttgaaaggttggaaccgtttttaaaaaaaaagaagggcaaggggggtttcaaaaattcccccctttgaaggaaaccaaaaggtatccccttcccttttggaaaagctttggaatttaggaaaaatttttcccaaggaaaaatgggtatttttattaagtaaaaggggttaaaaaataaaataggcttatttcccccccctaaaaagacccccggttttggtttggcttcttaaaattaaggccaggctttaaaaggaaattaatcaggggttaaaaaaaggggattggaaaaaaagggggtaaaaaggaaaaggccaaaaagga

SEQ ID NO: 513776 - DNA, 338 bp, Homo sapiens
aaaccatctctaaataaaaatacaaaaattaggtgggtgtggtggtgggtgctgtaatcccagctacttgggaggctgaggcaggggaatcgttgaacctgggagatggaggttgtgcctggacaagagagcaagactgtctcaaaaaaatagtatagtatagtaaatacataagcagtaacacagtcatgtcttatcaatatcaagtattatgtactgtatataatggtatgggctagacttttatacaactggtagtgcagcaggcttgtttacaccagcaatcaccataaacacttgagtaattcatttcactaacacaccatgatgcagctcag

SEQ ID NO: 513777 - DNA, 156 bp, Homo sapiens
atgcttgttcagtttacagtaaaaatatttattgagtgcttgttgcatacaggcacaatcttaggcaccggcaaatacagacaatagaccaaagtccctgcccttgaggagctttcattttgatggagagaaaacataataaacaagcaaaatgca

SEQ ID NO: 513778 - DNA, 981 bp, Homo sapiens
ggcggcgccgggcgcggagtgccacctgattcactgcacttggaacagatgatgtgggctctttccagaagtcaaatccttcctggaggatgaagatctgccagtctgaggatctggtggacaaggaaaaagagcctcaagctttgaaggccattcccatgttagaaccagagctgatgtgacaatgtggccatcctgtggccccaggcaacaatgacctttctgaagtgaccaggctgacaggggaagcaatacttcggtgtgattcctcttcaccccgttcactcagggttggcgccaattcacgaactcattggcttcaacgtgacagcctaagaacctcccagttgggagagccaaaattcttccttgcctacagccctttctggagtaaggcttgggacctacaggggttcctaacaggatggtgtcgcgtccagaagaagacggtcagggcacgcaaggcgaatttgtgggccaagggccttcttgacctctagattttccaccttcgggagggtgtgccgagcccaccttttcttggagacaccctggtaccggtacgggcttctttcctgggagcgcaattcttccaagtcattctggtggtgctggcaataattcgaacccaattccaaaagttccacgaggcgggaggtggaaacagctctggagccaagaaaggtgaggtgacgaggacgcccaagggtgctgtccttctggggacaagcgggccagaaaggagaccaggagaagggaaagagacggcgaagcactgcgctgcagcgaggcttggacagcctcgggaccactgggccccgcatcagaacggactgggggggcagccaagaggaaataaaggacgacaggtagggagccacactctggtgagaaacggcaaccgggctaggtgggcacaggacaacattgaagcgtggacggaagggtggaaccactgtgcgggcagccagaagcacaatc

SEQ ID NO: 513779 - DNA, 1158 bp, Homo sapiens
  misc_feature (662)..(662): n is a, c, g, or t
gcttgtccataagggaatttgccgtgagaaacacaagtgtcatgaaaactacccctaaaagccatataatgggaaaggagaaatacgactctaactatcggaggaattgtctgctcgattgggacaacgatagatgtcggaggacacgtcgcatccacgtgactaggggcatgcgtgattctattctgtgtcgggggagtaacgtgctctatgtactcgatgagaacaaacttgtgaagaatggagcgctagcttgaagatactgggagataacggagtcattccctatgcaaagggtagtgctcatgtgcgttcctattggcgtatgatagatctgagaacgtcttcggaatgcgtggaagccgttagaggtaatacagccaatgtggagtaattcttctctatgattgcgaaatacttctgagaacccaagtcaaggctacctaatagtgacttaatcaatagatttggcgccctagtggcatcgcaagaagtacttataatcgaagagatagcatagaatgtacaaggggaacaattctcgaggtgcctgaccgtagtagcgtgtcctttgcattgtagttagactagtcgtggggtccgtggggggtgaaatattggagaccacctggtgctatcttcgcaaccacgaaaatggtgtngcttgtacccccggaagaaagctatgggccccgtatctggcttgttacacaactaggaggtgatgaaaaacaacgtaaatttgttcgtgaggttaactcaaaatatggcattgccacttggaggcccaccccttaacagccaggaagacaaatattgacggaacacacttcgtctgacagcgaaaggtccgggcaccttgaaccatttaaggaaccatctggggttaggaaccccccgagaacaagtatgccattttggtgcccaaagtttcctggtttggcgaagttggttgaacaaaaattgcctgtgggacgccaaaagtggcgtaaggaatttgcccttgggtcccaaaggggaatgggacaacaggtcgagcggcgctacacggatggtgatcattggccaggttggaaaacacagggctgcttgagaggggcctggaactggggttccttaccacgcaagtccggtccaagtgacacagccttgttgctg

SEQ ID NO: 513780 - DNA, 1682 bp, Homo sapiens
  misc_feature (1681)..(1681): n is a, c, g, or t
gagttgaccctccacagccgtccgtcatgactcgaccgtgtgatgcccctcgctgtcgcacgccgtgctgccgcctgcatcagatgcccgctgggcagataggatggctgtcactgtgcttgagcctgttgtggcagccggcgtgagggacgtgatctcacgttgccgggggcctcccatttgtcatgtgtggcgcctcgctggtaggtggacccgcatgtgacctgcatggagctggcgaaggacgacgacgttgtgggagcaacgctcgaccgagttcgtagtgcttggccctcgctatgtctgccaatcgtcatagcaactcctcatccgctgcagcgtccactttgcaactggggacagaagctcccaactgatttgtccctttagaaatttgcctatgtttttcatcatttattgcaattcatctatcacagttcgacgagtgcttggagatctcgaggctggtaaggaccaacactgattgaggtggcacatttgccagggattggaacttggccaaacccgagcctctaacatccacgagggaaagctttggcccttgggggaccttctcaggattgtttcctccgttggatgtccatcccaccggagaggatggaagtcaaaaggagaagcgcgccagccatggacagaagcccattccatttctgactttgtaactcctacattggttcacataacttggggggattccctttccattgattacaacaccaatggactcccccccatggttggttggctagtcaatggaaaactgaaaagtgtttttgggaatccccaaaggtgttcaaccaatggttatcaaggtagggaaccactttgtcggtaagcgaaaatatagcggcaaggaacgttttactgaattaaaaatgcaattcattcgcatttttgggggaccttattattcaattttccacctggcttaataatagagggcaatgacagggaggttagaaacgcagagacttttactcttttattaaaaagaacctttgcgcttaatttttaacataaattaaaagcgtttcgcacgaaataagcacatttcatagaccaagtcttaagaggagctcacggactgttgtccagtggttgaccaccacggttgcttacataaaactaagcccaggtcaccaggaacgttcaagttggcctccacattttatcaacgtgggaagcgtttacccttggacatcgataggctatagaaggaaagcaaccatgcaggtgggtgggataaacactcaattgcttttaccacgtgcaatccctcttggttaagatcaccataggttcggaccaccgccgaggtggacaacactatagggaccgtatctgtaagaaacagccgagcaaactagtgtagacccacaagcgcgagggagcctccttgtcgctactgcagtcatggacgacggataatactacttaccatgaataagacatatagacaggagcgagcaatcataactgcagatttccgaaaagagggagaacggaacgccgcaggaagctgtagttatcatgaacagcaggagaatacgacaataataacatcctacagaggatgaggcggatccaccagtctgaatgagatagagcggcgtgcatggacagacccacagagcgttgtctgccgctcaccacatcatcng

SEQ ID NO: 513781 - DNA, 251 bp, Homo sapiens
agtcatagaagagctagaggttttatgatatttttttaccgtcttttttttttggcctaggaggccagcctgccctaaaatatcaaccatttccctttttggctcctccccttaaaatttatttgtttccagcccatttaatggagaggcggaggtttttaattaggcggaatttccttttaatttttaaataatggtttatatttccaatccaaaaaggtccaaaataaagttacattttacggggggcc

SEQ ID NO: 513782 - DNA, 129 bp, Homo sapiens
atgtcggagttgtctttctgatgtcagcacgtgttggagtcttcttctggtggatttgtggtctcatggcttcaggagtgaagctgcagactttcacagtgagtttccacctcttaaggcagcgcgtct

SEQ ID NO: 513783 - DNA, 1047 bp, Homo sapiens
cagctcggctactggcacacaacgcaggcgacctgggtctacgactaacgcgcttctcgctcctcctgaagtgctcttcgcgtccaacgcttgttcccgacgctgtaccaatggcttccagtaacactgctgctcgactgcgcgtctggctagccctcctgcatattctacttgcttcaacacacggcaggaacctgactagctcacgaccgctgctctacttgcctgacacggacgcacccctggcgctactcgctgcgcacgcaagcacctgctgccaaccacgaccctgcacgcaccaaccgcctgacccgacttggccacagactgcagcaatatgctcacttcactccgggcccccggccaacactctccccccaaaacctccaacaaactcactacgcggcgcacaccaccgcatcctgcccctttctgcagccgaacgctggactcacccaagccctgacctccgccccgaccagcctcagctggcgcacgcaaaactacccggcccagccacaccccaatgccccccaatccgcgcagcttacccagccgccttactccaactacgcacagccaacagcaatctccgctgcgctctgtgggctgtgcatcccatactgcgaactggcccaccccaaaggccaataactaccccgaaaatcggatcctctcctttgcatccccgtggcttaaccacgctctccctcacctccggcgcactttcgcgctctattgcacccgcgacaacaacgcccaccagcccaagcgaaggtcaattctaaatccagacccaatcatttaccacaccctacttgagcggccacggaccccaccgactggcccagggcgaacacgaagccgagggaacaaatcctggcgagaacacaccaacggccacagcgccgcggccatacgccagcacaccaccctcggaaacaaaagcacccacggctctgacaccacaccacttcactccccaaccgatcacccgaaacccgccatagccccccacgcgccggcatacctggaccaggcgcacag

SEQ ID NO: 513784 - DNA, 665 bp, Homo sapiens
  misc_feature (174)..(174): n is a, c, g, or t
  misc_feature (189)..(189): n is a, c, g, or t
ccgggtgggccccagcgcttccaattaagccagtgaagggatattccgctttcccgtttttcccttttcttttgggccctggggggtttattttccaacatgtttaaaaggggccctcccagtaccccaaagggggggtggtcctggtttcttgttggggacatccgccccaangacaggcccatttangaaggtgccgacaaagccctgaaacccttccaggaggggtttaagccagtggagaccttttcagagttcctcgatgtggccggttttttatcaaaaatccccgatccaaagaggttcctgaagggcctgttgaattcagtcccctggcccccccccaacaattgggggggggaaaaaaaaggtgggttgccttcccccctttgttttccctccttggggattaagttccccccgggggaggggggattgttaccccccccccccctttttcattttttttggggggggtggggggttttagggttcctgtttttttttggggggggggggcccccgctatggggttgtttgtaacccaagccctcaaaggggcctggaaaaacctagaaggccatgaggttgtcccggccacgctttaaatttgaaggggggccttctttttgaaaaaaaccaggtggtctttacccaccctttga

SEQ ID NO: 513785 - DNA, 574 bp, Homo sapiens
  misc_feature (230)..(232): n is a, c, g, or t
  misc_feature (451)..(451): n is a, c, g, or t
  misc_feature (515)..(515): n is a, c, g, or t
  misc_feature (555)..(555): n is a, c, g, or t
tggggttatgggtggagcaggaccacttccaggaacggcttcactgccgccctcgtactacctgagctcccaggcatacagacagcaacgctggcagagcacaggcaaggacggtttctgtggcaggaacctcggcgggtggcaggaggagctagcgggcacccacctctctcccaagggccacggcgtccgaggctgggggctgcttcctgcctgaaggctccgctccnnngtgctgggctatcctgagatgcttccccagctcagccacctgcttccgcagctccaaaacctccaggtgtacctggtccacctcacggggaagctcacgctggagagcggccggctccaggggttcccgcagcaccttctgtctgagtcgtgtcaccagcaggtttaggagctgcactctgtccccgagcttcctgagtgccagtccagaggatactgngccagcttggacagatcctcctgcttgaccagcttggacagaccctccggcttgaccagcttgngcagaccctccagtcgtctctgtcgaggtgcggacgctgngctgagactcagcatgagg

SEQ ID NO: 513786 - DNA, 326 bp, Homo sapiens
  misc_feature (27)..(27): n is a, c, g, or t
aaaatctggcaatgttttcccggtganaaaaggtagggaattgagaaacatgaagggggccgggtgtggtggctcatgccctataaaccccagcactttgggaggccgaagcagggagatcatgaggtcaggagtttgagatcagtctggtcaatatggtgaaaccccgtttctactaaaaatataaaaattagctgggtgtggtggtgcgcgcccgtagtcccagttactccagaggctgaggcaggagaatcgcctgaacccaggaggcggaggtttcagtgagccaagatcccaccactgcactccagtctaagagacaaagc

SEQ ID NO: 513787 - DNA, 1610 bp, Homo sapiens
ggaagatatcaaatgctggaaaaggggaagaggtaggtcgggaacttctcaggaaaatggagagaaagagaaacgagcaagagcgtgtatcttgagtataataccacgaggacatagcgatacttctgaacaaagcccactagtctgtggcttctcaccaaggacctcctacatggtctgagtgccaggtcgaagcatcaggatcggaattcataccagtaatccaatggcatggacacgcatgtgatttactactggatatgtttcacaagacagaataggactttcatcacgtgttagacttcgacgacaggatgtacataggcgattgtgacatagaattgtttgcatagatgggcatgatggatgtatgtatggacgaaggatctgtacaactcacggacacacgacagaggcgcgcaacgctacattatgggctcaggactctcttatagagggatatactcgacacagtagaggtttggtggtgaacacgataactctaacatcgtttggagttagctcaggactaataagtgagaacttgcaccaactaaaaggacgcaatcgcccatcacagtgaaacgcatagaaaacgcatgtgatgattgtaggcggatagggtgatgtttggagacgagaaatcaagctactacaacgagcttgtttcaaatctaaaacggaggaacacttttgggacataaggtggacaaatctggcagggacctagcaagggtctaagcaaattcaggctaaggggaaaaggtgagtcttggtccttagaggtagaatgggggtaggaacacaaccaacatggcgttgagaaagtgtattgagcgcaagcaaatatattacttgtggccataggggggtttgataccgagacagtcagtagaagggcgcattttgcaggaacaaggggcatccgaaagaaacgtggtccaagaaggccaaacattctaacttaaacgtgcggcacaaagaggtaacaccttgtgtaattcgtacaagtaacgggtggaacccaggtcggaatatccggtggcctcaagcgtataaactactaaacaccgcctcctgttcgtcactcgagaagccccacgtgacactggggcattgaataccattatatggatagacattggcaccatgctgatgagaacggcacacacgctaccacggaacgcagtagtcagcggatgcccgatcccacggacatcggcccaacgacatagagcaacagcccctaccaccccaacacaaaacacggcgttacagtagcgtaggcccatggatgattagatccagcaacacgccacggggccaccttaaagagcctgacgaccccacacgggaacgggactcgcaccccggccacccaggtaacacacctgggcaacgggtacagcccaccacaccagcagagtgaccacgacaacgtgaccggcacaagacagtcacaccagagacgcacaagaagcgagaaggcaatctccacggcacaccacacacaaaaggtcgaaccgcacaccagccacacgacggcacaaccagcgcccgcagccacaacaccagaacaccacggaccgaccacacacaaaggcaaaaga

SEQ ID NO: 513788 - DNA, 254 bp, Homo sapiens
cttcacacaagctatatatttacaaaggcgagacagacacaggagcagtacatgctgcgagcacagaggccagcatctcctcttttccttatgccagtgtgtagcccggtgccaccgcgttggctggtccatctccctcctcagtcctctgccacagggctgctccactgctcccctcagtgaaactcctcagccaggcgctctgagaccaaccacagtccactgaaggcttgaccacgcctactcgagacagc

SEQ ID NO: 513789 - DNA, 456 bp, Homo sapiens
aaccttttaaaaaaggaatggccaaaaatggagggcctttttcccgtaatctcatcactacgaagggactttcaccttaactgagatccctactgaaaagaagattttcagaaaaatatagctcactagacaaagatgcaaatatactctcgaccctatttgtctcgttatggtacatcgtagttaattgaaatttcagcacttttaactccgattctccatttctcataacttcctttatagtatctaagagagtgcctagtcatacttcacctatttaggctgctaccccctatcttcgtttacctctcgctcgttttcactgtttgtggggccgagtcttgcagctgtgaccttggccgcagtgcaagtggtgcaatctcggctcactgcaacatccacctccaaggttcacatgattctcctgcctagacctcactacctcgggcctggttc

SEQ ID NO: 513790 - DNA, 1811 bp, Homo sapiens
aacgttctgtgggtaggggtcgtctcgctagcgtcgggtggataggtggagtgcgcttgtggtgtgtctgcccgccgcggcgcagttgttgttggttgtgcaccccgcgtgtggtgtgcgtatgtagaatttagaggtggttgttagacccacgtgttgggtgtgtcgttcactcgctgttggttggtgtgcgagaagagtttgttggtcagcatgcttggtagttgttcgggggagatttggtccccacaccgggggggtagttttttgttgcacccccacgagacacgttgtgtgtcgagtggtgtgtgccccgcaaggcggggctttttaaaggggggtgcagcacaccacaggagggagtggaaagtgggggggggaaacatagggtgtgtgtgggtgttgcacccaacgaacaccggggaggacgctcgctgccttttaggtcactccctcttgttgtgggtggctccttgcataaaaagtttgtttgtttgaaaaaagaaaacgtgtttctttctctgtgagaatgaagtcccgccgcgatgttattgtagaagcctgttgtgcccaccattttgtgggggggggggataataaatgtgatggaggtccctttctttggccttcggggaggagagccttcttttttttcaccgacggggggacggacgattgtttttgtgttgggtgttataaaaaaagagggggtgaaaaaacagattttttattaaagggacttcgccagctattttcaaccgcgtggtggtggtaggatgttgcaacacgtcgtgttgtgggggcgaccccccttgtggggaagcacccccgacaacgaagtggtggaagtataagatcctgccagaacatcgtcgttaatgatgatgttatacgacatttcgttgtggtgttgttgttggtaagcgtcgtcgtggttgctccggcgccgccgagcttctctgcgtaggtgggagtagccccacagcgtgttgtaggaaaatattgtcgtcggtgaggaacatcgtcgccccgctttgtcgtcgtgttttgtgttgttgtgggtcaccctcgcgctgtgtagaatatatgagcacttggtttcttattatttccgccccaccggaggagagaggtgcgccccaccaggggtagtcacccagctgtgagaaagagtggggagatatatacgctctctctctcgcacacttgcggggggtgatatactctctctccgcggagagagagtgttggttcacaccacgcagagcgcacggggagacacagcgctagagtgacacacaggcacacctttatcacacagcgctcgtctcacagccacgcgcgccccctctgaggacgcgctggagagctcacacatgtcacgcagtctttctcgcagcgagatacacacacacacatgtgtgtatacgcgctctctgcgcagaatgttcacacaccactctcacgcgggctctcgagagtgcttcgcgcccgcttcacacacacaagagagtcttttcacacaccagcgggagagagattgttaaggaaggggagagagaagttgccccacacacctcgcttcctccacgtgttccacgccctcgagcccacctctcccactccctctttggcctctctgagccctctttgttccacacccggggagacctcaacccctcattttgccggtcctccacagctcactttttcaccctcaccccccctcctcctcccttggctttataattataggctataattttgtgaaggaagaaatgtaaattaaattaagtgaagtcctttgccca

SEQ ID NO: 513791 - DNA, 501 bp, Homo sapiens
  misc_feature (501)..(501): n is a, c, g, or t
tttcatagtatcttcttctacccgttgcagacgataaattatttgtgccaattcgagaattgctgttaggctgttatcctcccttccttggggctaagaattacaagactcatggcactggcgtaaagttgttgtttatctaatcactgatgaaatattttcacacttgaaaatccccaaatgctttacaatgaatgaagtgttaatttggtgaccaggtggtagccattaaccatgttgcaaaaattctagacagtaaaaccctgtggtttttagaaacagaagggaaattaaaaaaatggagtcctggttagccctttcaaggattagggaattgggtttttttttttttcccctttttaaaaactaaaaaaatctcaatttttattaaaaggaaatttaaaaaaggttattgggccaataatttaaactggcatcttgaaaaaaacaaaaaggttcctccatgtaaaaactgaattcccacgaaaaatttccaacccn

SEQ ID NO: 513792 - DNA, 132 bp, Homo sapiens
cttatgtgctggcataaactggacaagtgagtaaccttattaagcagataactgaaaagagcactactgttgttatccaacgataacctactgggtacccaaatcttatgagcaactcctgtcaactaaatg

SEQ ID NO: 513793 - DNA, 343 bp, Homo sapiens
tcccaagtaactgaaaacatgctaaaatctggtcttttagcatctgaagtattttcgtggaaacaaattgagcctatctggaacctctgttaacatttttcaggccagcaagacactgcttcctttttttgtgtgtgcaatcaacaaaacctgatggaggatactttggcagaagggggttctggaaaaacaaataggctcatataaaaattagggatatcttgttgaagaataggtaaagagatatagcatgaaacatcacagagtagtcctggtaaagatgcagattgtacgtgtgatatgtgtggtgggggtggtgtgggaatgattggttgcgttgctc

SEQ ID NO: 513794 - DNA, 104 bp, Homo sapiens
aacaccattcccacatgtggtaatcaacgtggagacggtgacttacaaaagtgtcaagttcaacgtatgggatgtgggcggcaggacaagatccggccgctctg

SEQ ID NO: 513795 - DNA, 218 bp, Homo sapiens
acggagctgtgctgtggttttgaggatgagcttgccgtcggcgtccgaaggcttgtggacgtaccagagcacgggaagtgcgagttctggctggtctgggacttgacagagcagttcagctggatgggcctgttttctaccagggtgagggtcctcttggatttgctcacctgcaactttgtcactgccaaggaaaagagggagcgtcagcagcattg

SEQ ID NO: 513796 - DNA, 438 bp, Homo sapiens
aggcctggtgaaagtaagtcgtgcatccctgcacgtaaagaatcaactctgttctaaaggccgcaggtttctctttttctgtagcagctaaacaagcactagcctcaagataagcagcattgaaacaaccgcagctcctccccctgccgaccctggccccacacccctgctccaccagccgtaactagagctttccttggacaagagactcgtttcagtaacttttccctgataagagaccctgaccatagacgggttctggctggtttacagagattgcaccctcatgtgccttcatgtcctgaaagtactttttgaggtataccacctaattgtaatacgcttacatgctgccttcaccccaaggtgaacatgggtcatatgtaacatgcatgtttatccagcacacgtgtccgaataaacatgcatgtatattcg

SEQ ID NO: 513797 - DNA, 638 bp, Homo sapiens
taaattggtttggtttaaaataagttaaagacagtccagagctttcagccaattggtctcctactcggtgtaaatatttttccctccgggcaggggagccaggtagagcaaaggagacaagcaggagtggaaggtgaggcgtctccggctggtactaagccaggaggctttaagctccagctttaagggtggtgagcccctagggggtccagggaacggcttgcccagggttgcagctgctgagtgtcgagtgggccaccggggcaagagggaaggtgaccgcccagctctcccataatcccacgggatcgggcttacaggggggtcggaagcctgtcctcaccgctcgggggatagtggcccccgaccccctccctatatgcacccctggaaaccagcaagtcccagacaaaggagcagcgcgaggtaggcaaagtacaggggaaccgcaagcctccagatgtaacccaggttcacacatatgccaatgtcgggggttacaccctgagaggtactcactctaaacatgtctgacctctaaaatggggccccaggttacatccgtgggtcccctgcacctgtcacaagcgactgtgaggccacactgggaacatagagtgcagcttgtgatacctttc

SEQ ID NO: 513798 - DNA, 390 bp, Homo sapiens
ctccaaaactgtgagaaaataaatctctgttgtttaagccaccagtctgtttctgttacagcagcctgatatggtttggctctgtgtccccacccgaatctcatcttgaattgtagctcccacaattcccatgtgttgtgggagggacccagtgggaggtaattgaatgataggggtggttctttctcgtgctgttctcatgatagtgaataagtctcaggagatctgatggttttataaagaggagttcccctgtacaagctctctctgtttgcctgccgccttccatgtaagacgtgacttgtccgccttgccttccaccattgattgtgagccctccacagccatgtggaactgtacatttattaaacatctctttattcccaaaaa

SEQ ID NO: 513799 - DNA, 549 bp, Homo sapiens
ttgatattccattgcataaggtattggttcatgaaaatgaaaaattgtattagattgtataaccagatcttggttgatttgagtttctgcaaacacatacaagtaatgtaggcatacagttaaaaatgaaatgcttatgctgtagttctagctactagggaggctgaagcaagagaatggcatgagcctgggaggcggagcttgtcgtgagcccagatcaggccagtacactccagcgggggcaacagagcgcaactccgtctcataagaaacaaagaaaacagaacaaaaaaaaacttatagacaagtacaaaatgagaagaaaaagtccctttcccttcaggcctctacttcctgctgtattctcagaggtaagcacggattacagttgacttatggatctttccaggaaaatattgtatgcatttatcagaagatgtaagtatatgcatcctttaaaattgtggatagatcaaactctgcagggtactatcttcccatcctcattggatatagtgtagatcttttcctattgggtgtagagatcac

SEQ ID NO: 513800 - DNA, 898 bp, Homo sapiens
  misc_feature (469)..(469): n is a, c, g, or t
  misc_feature (475)..(476): n is a, c, g, or t
  misc_feature (589)..(589): n is a, c, g, or t
  misc_feature (599)..(599): n is a, c, g, or t
  misc_feature (607)..(607): n is a, c, g, or t
  misc_feature (647)..(647): n is a, c, g, or t
  misc_feature (698)..(698): n is a, c, g, or t
  misc_feature (891)..(891): n is a, c, g, or t
ctaagacgtatataccagtactaagcacagaaactaagccctcggaccacgagaagctgcacatctacatgctttatgcactgctacgccatgacaacacgcaatcctatataatccttctaatagactatcgctgcgttcacactaatatcaactctcacggcattaattggaaaacataaagcaattaactactcggaatttcaaatccacttgcactactactatagaatacactctgtgaactgtgacttaattgactatataattacatacctaagagcaaattagacgcacgcaccctctatacacgttattactcgcacgctttccgaaaacggtgtacgccagagggagctcccgttactgaacgatctcgagggcttgtttactattccttgcaacattggacaagaaagagctacgctctcccgcgatctataatttcataatagccaagatattactnccactnncatctataaactgatataagacactatctctctaccacatctaactacatacttcttcatacgccgtacaatacgactagtggccaggtctgatgcgtcgcgcacttgaaaanctccataaancacccaancattaatggctaagtactactctaaggcaatcactacctntcataatataactcccaccttagtagcgtatagtaagaatatatcagacancgtgtctaatacggtcacgaaatctcttgaagataattagacgccaatttccttataatttcactctcaatttgaataattatatttccttataataaacttacacggccattagcgcttatatatcgtactaatcgtataaataggcttcgtcaccgataatccacagtatacccattatcttacctaagtncattctg

SEQ ID NO: 513801 - DNA, 689 bp, Homo sapiens
  misc_feature (278)..(278): n is a, c, g, or t
agcggctctcgctgcagccggcgctccacgtctagtcttcactgctctgcgtcctgtgctgataaaggctcgccgctgtgaccctgttacctgcaagaacttggaggttcacagctaagacgccaggacccctggaagcctagaaatgggaccactgacatttagggatgatgaaaatagaatatatctatagaggaatggcaatgacatggacacatgcgcagaggaatttatatagagatgatgatgtagagacactacagacaacctggctctancctggcactgcagaactctaagaaagaaacaagaatcacaaggactggaaacaaggaaaaagacaaccagacgaaacagaaaaaaaaatgaaaatgaaaaaacaaaaaacacaagtaatgatgtaactcaataaagaacaaaaaaatgtaaggaaagaagaacaagaaataaaagaataactcacaaaaaagatgataactgaaccaactatggaaaaattggacactggaaataaaacagaataaaaaaagaaaataaaaagtgcgaaatagcatgataaggaagtaaaaaggaagataaataatggaataaaaaacgaagataagaaaaaatactgaaaaaaaagaataataaaaagaaatgacaaaatatgtaaaaagtaataaaataaaaataaacaaaatgtaaat

SEQ ID NO: 513802 - DNA, 172 bp, Homo sapiens
aagaggatcactcggtgtagtcttgagtgaatcaaagcattggagtcattctcggctggttccgtgaaccagaaagtattgcgagacgttaatcctgacaggttatccaggtgacatcccacatggtttcctgatgtcttgtactgtaataagggacaccggagaataaggg

SEQ ID NO: 513803 - DNA, 847 bp, Homo sapiens
ctcaactgtacgatcctgacaaattcaccgttgctactgcgagatcgacgagagagtagtgcgatttgtagctccgtgcaagagcatgctggactgaggtgtaatgtaataaggttgaaggaaacatgaaatgatgcgcaacgtagggatgtcaagatagcatagatccttacctaagcgccagactcgtttacctaggagcgtgaacatgaacctgcgcctagtacatggttatgtgggggtgtgattagagccgcggcatccaatcatggagagaacaatacttaaacatgaattattcctcggaggcccttagccatgagacacgaaacattaacttgacatggttcgcgcagtgggagtacacatagaaaccgaaccatggaagaagactggagggatctttgtgttagtcagcagtctactgactgaaaagccacggaaacctggatggtgcacgagatagctatgcataccagtcaacatcggcaacttgggcaaggtggtgaaatctatcgttggataatacctcaaacaactaggtcacttatcatgagccaagcaagcatggaaacaaagcggagactacgttggaaaacgctgcaaggagcatgcgatggaacgaaggctgcgtttaccgaacgagggtcggtggcacgagggtcctggggaccaaacacttggtagacccacaggcatgttaaataagatattctagcatgccatgggatactggaacttactcataggtgactttatggatgagtagatcagtggctataggtggacttatggggggcatattgatgattcgtggtctataactaatgggtaaccaaagacggta

SEQ ID NO: 513804 - DNA, 809 bp, Homo sapiens
  misc_feature (495)..(495): n is a, c, g, or t
ggtagtagccatggcggcatgagtttgtgcggcgggtttcggttactgcggtggcagtctgtctggccggccctggactcgcctcggatttgggggcttcctcactcgtggtttccgaaggctgtgagattctactattgcattgactggattccagtagcaattttcataactctggtgaatgtattcatgtgcatcccatatcaagatggatgtgcccgtaatttctatgatagtcctgaaaagatatatgaaagaacaatggcgtccttccagatgtgaagctgaaaaggtgaattacgggtaaaggagctgaagtgcgaaaatgtgatgcatgtgagaggagatggaaccctggtattactatgagacaatgtgacaaggaacttatgtgatcattctccgaaagcaatcctgacaattaagcatttttttctccaaatacaaagtatattctctttatgtgaaaatacattactaaatatattctgtatntggctctcggtgaaaaaaaaaagagctctgacataatgtctctcagtgtggggtcagatggaggttttgtggaggagtgggttccagtctcaaagaaggttaaaggtctactaaaactgggaatacggattggtgactctaaatgtgcacttgaagtaggttattactgacaatggagtttagagttatatgtaggccgtatttgttttggcaatgctgtgggattcggtttgggggaccgggagtagtctcaggttggaactaaggtgctttaaagtttgtgtaaaaaaaaaaaagtggggggaaaaaaatgg

SEQ ID NO: 513805 - DNA, 2069 bp, Homo sapiens
ggctagcttctgcgtgcttgttgttgtgctgtgctttgttctgctgcgtgtgcgtctcggtgctgtgctcttgtgtgttgcttgttgcgcgtctctgtcgctcccgtctcgccgtctcgtgtctggctcgctctttggtctcggcgcgcgtctgtctgtgttctgttcgctgtgtcgccttgccgtcttcttgcctgtccttgctctcgtgctgctgccgctcgtgtggtcggccctcgctgtcgcggtgtctggccgcgtgctcgtcgttgagttgtctgtcgctggtgcgctgctcctcttggcgtcgcttcaactctgtctcgtctgttgactctgtcgtgccgtggctgggtggtgtgcctcgcggggcgtggtggtcgtttgggttgggtgtttgtgtctttcgtgcagctggcgctgtctcgtggcgtttctttggtctggcgttctgtgttggttctctgcctcgtgttggtctcatgggtgtcggcccgcgcggcctcccttcttcgcgctgtgttgctcgtcggtctcttcttctgctgcgcgccctggctccgctcgtgtagtgtgttctgcgtttctgtcgttcgcgcttgttggtcgctgtcttcttgccgtgggctgcgcgtgcccgcgccgctggtgctcgattcctctgctccgccgtctgtctgtctgtggtcgtctgtcccttccctttctgctgtgtcgtgttgtgtggtgtgggttgctcgttccttccttcttttgtttcgttctgtgttgtgtcgtcttggttgttgtgcttgtggtgcttgtttggtggcttggtgtttgtgtgtcttggttgtgttttgtgttgtgtgtgggtggtgttgttgtcttgtgtgtcgttcgtggttgcttgtgctgtgttcgtcggtgtggatgtgtttgtttgtgtggtgtctgtgtttgtcgtgtttgtgtgtgttctttgtcgttgtggtgatgtgttgtctaggagtggagcctgtagctggtcttgtgcgctgtggtgtggtgcccgttgggttgcgtgtgtgtcgggtggttttgtgtagttttgttgtgtctgttgggtcgtgtcgggtgggtgtatcttgtgtttgtttgctgtgtttgctgtactgtggttcatctgttgttgtctggtctgtctcgtccgttcgggttactgttggtgttgtttgttgtttctccttgctgtccttgttctgctgggttgacgttgctcgccccctgctgtttgtggtaggtttggttgcgtattctggtgtcttgttgtgtcctctgtgcggtgctgtggttatgcttctcgtctgagtccgagtctttgctggtgagataaatcgggtgatttttgctatctcgtgtgtacctcattatttagtgcttctgttggcttctggtttgcagtgctagtgattgtggctctttccaacctttgacatgacgcgtggggatattgtagctgtgagcagcacgtggccctggggctcgccattggactctggtgtggtcagctaacccgtccctacagtctgtccatccaggacatggagcagcgtggctccctgagatccgtcagctatgatgaccctgctggccctgtatggtgtgtgacggagtgtcactggatctatcattacccacattcatggcctgtggcatcccactggctcactgaagagactctggtagttatcttcttagaatgtggacctcaaggcacccggagcttgtcagtcagctggcttcagatgctggcctgacctgtaccattaatcttagtaggctgtgcgtcatgggacttctgtgggaggccttccggttcctgcatatctcggaggtctgggcacatagcatggctgccctgtggatgcacttgtcagtgccgccagctctgaccagatgggaggtggatggcactttccagagcccaggttcttatggcatttcccagggttatgtcgatttccccatgctcgtgcatttctagtatatttcatagacatgcctggattggctccatcacatcagagtggcttaacccgccgtggtct

SEQ ID NO: 513806 - DNA, 113 bp, Homo sapiens
tacttttccacagatccatttggcaaaatatcaagcctttaaatgtggcagcaagagaaagcggactacgcaggaacggggagttgggagaagctctcctggtgttgacttag

SEQ ID NO: 513807 - DNA, 162 bp, Homo sapiens
cttgaactcgggatggaggttgagtgagcctgaaatcacaccactgcactacatgctgtgggcgacagagtgagactccatctcagaaaaaaaaaagaaaagaaaagaaaggctttgttcttgaggtcaacgtgctaatggggacatgcaggcaacaactca

SEQ ID NO: 513808 - DNA, 917 bp, Homo sapiens
ttcttgcggagtgattgcttctagtgttccttttcctacgctcttgtctagttttctgttacggttttcctctcgttgttcctgtcttctccttcctgtggtattttgtcttccgtcccattcctatggtgggctcttcttttgcgtgcactgtcctctccagttgtggtctgctcactgggcccttgctctctccatccgcgcctattctctcttcggtgcgcctctctgtggtgttctccttgcgtggttctgttctcccgtggtcctccctcgattttgtgtttcctgttgtagtcctcttgatgtctgacctgtgttcactacgtgtgcagatgcagactttgtgttccttcggacccagactagtcattttcctgtgcgtcatcttctctgtctccttgggtatattcttgtctttgtattgcccttcttctctccgccgagtatggatcgtctcgaaacggggaatcctaattcggtggtctcttatctcgttgaagttgacgctggtggatcccacaatctcatcgcacggagccatactactgggtcctcagacgccgagacgccttcgcgatcggccgacggctcgaacgacacgaacgcgcctcacttgttgcctacctagctgcggacccagcacaagccgctgctagctttgcgggcgcgtggggaacggggccaacgctgcagacacaccatcagtcattcactttcatgtccaaccacccctgtgggtggcagggtgtgacgtgtgtgtgccttgtgtgtgcgcacgtgtcggcgctcacacacacatgctagcccactgagtgcacccaagcccagggctggcaagtctttgcagcgtggggccgtcttcaacctggagcctggagaggatctatgcttaactgccttgggtaatccatata

SEQ ID NO: 513809 - DNA, 126 bp, Homo sapiens
gcatctattatgagtgataagcgctttaccacataatatacccatgtaaaatatacaattcatctttggtatcacattatggttattattcttttgagacagagtatcactctagtagcccaggat

SEQ ID NO: 513810 - DNA, 291 bp, Homo sapiens
gtaagcggagactccgcgcgccgaagaaaacttaaataggactcttgctctgtttgccaggctggagtgcagtggcgcgatctcggctcactgaaatctttgcctcctgaggggagggggtggctcccacctcaacctcccaagtaggctgggattacaggcacatcaccaccactcccgggtaattagcgtcaaattttttaattgcattaaactgcactgtaatttaaaggttcttattttatattaattccgtttttttttgagatggatggcgcggtgttggccagg

SEQ ID NO: 513811 - DNA, 112 bp, Homo sapiens
gaggttttagtgaactggatcagaagatgatgtaaaaatggccctgaaaaaggaccaggcaggccacggagcttgaccacaaagccttcacctccctcaggccccgagagta

SEQ ID NO: 513812 - DNA, 225 bp, Homo sapiens
agcacactcaggcctcagctggtggcacaggtagactcttgcgcagtccgcatcgcatgattgtgggttggaaacgtgaagctgatgtccacgtgcgttctgggaatcaccccgcgggaatgtgattgagcagtgaggctgcgttttgggcaagacactgagctctgaaataagacttttcttggaatctcaagccctcaacttacagtgggacacgaatgttca

SEQ ID NO: 513813 - DNA, 453 bp, Homo sapiens
cttggatttttactaaacttggttgataaaacagcagcagagtttgaggggttgacttcaattttgaagaatgttccactgtgggtaaagggctatccaacagcaacacatgctacagataaatctttcggaaaggaagagtcagttgatgttgcagccttccttgttgtctcatttaaagaaatctctagagccacactaaccttcggcaaccaccacaccgatctttcagcagccatcaacagtgaggcaagactgtcttccagcaacaaagactcactgaagacttagattatcgttagcatcttttagcaataaaatatttttaaattaaagtatgtacattgtcagatataatgctattgcaaacttaatagactataatatagattaaacataacttttataggtactggaaaataaaaataattgtgtgactcccaaaaaaaaaaa

SEQ ID NO: 513814 - DNA, 119 bp, Homo sapiens
gcggccgcctactactactactaaattcgcggccgcgtcgacgtgaaattaaatgaagcaatgctgatgagagtgaggagagaatggagtgagcagagtggagtgagtgggggatggag

SEQ ID NO: 513815 - DNA, 517 bp, Homo sapiens
tgtctagcagcaaccacgtctctcgacttcggaggcgacgctcagttcttcagcaaggagtcgaggcatacagcgcttcgagccaggccctgcagttcggtgatgccatccgccaggcttgctcaagcaggacctggacgctgtcgccaaccacttcacgcgtgaagttcggcgcttgcttgccggtatccaggacgaatcggcgcgtgctcaaacgcaacaccggctatccgcactgctgcagtagagccgaaatcattcggcgctgaatatccacctcaaacaccgcctgaccgcggtgcatttccttccctcggggccatgccccggtgggggttggctccttttcaacctcaccggagaatgtcaccatgatccagaagatcaatcccttggctcgcggctactacggcttcgagattcgacgcgtggcggtggtcagttatgacgatcgccatccgcaaacgttcgttccgctgcacccgtctcagcgcctcttaccagaacgacccaccga

SEQ ID NO: 513816 - DNA, 249 bp, Homo sapiens
agccggagcagaagcaatcctgccctcgccatcatgccgtagtcctcatcgccctcccatcccgtacgcatcctttacatcacagacgaggtcacgatccctcccttaccatcgaatcaatttgtccaccatttggtactgaacctaacgatgtacccctgacaacgggcgaacataaatcttcaactccataacatacgcccatggtatggcagggtactccctctagaagtcgaccttgcaaggcct

SEQ ID NO: 513817 - DNA, 709 bp, Homo sapiens
ttttggtcatggttatgatggggtgatgggggctgtgatatacggtaaggagattcgcgcgttagaaagggtctgagtcggtgcagagaacagcgcgactcgatgaaatgacttagaaaatggaggagaagaggaaagtactgtaacagcagaggagatgaagaataaggatgaactgatacggattgctagagactaggtaaaggataacggtagatgcattagatgccttgtagcactgattatttgtgccagagtaatggagtgacgcttaatgagatgcgtgcccacggttgggaagtgaaggagctgaaaacatgcagacacactgggtgaaattgtattatattaagagacgattattgctgcggacgcaagtccatgtgatttggtaaagattgtctatagggtggtacaaggcatttatttggtcgagggtttataaggtatcgatggtaaggtggttcattgggccaatttaatctgaatgagaggattacagttacccagctgtcgaataaggagttggtcctgacaatacctgtttgtaaacaatttataaccctgaaagctaatagggctatggaggcttctgaatgctgtatctgaccggtggagcttctcagtttattgctgacccaattggcataggtgttgtggtttaatattttttggagtataacggtgatgtttggacaagtgggcattt

SEQ ID NO: 513818 - DNA, 439 bp, Homo sapiens
gcgacatcctggccgttttgcgtatcagcaccacctggtattgcagcatggtgatttttggcgtcttcaccatctacgccattctgagttactccaccaactatctgaccgaaatgtatggcatgtcgctggtggcggcgagctacatggggattgtgatcaacagaatattccgcgcctgtgcggccgacttggcggcataatcaccacgtacagcaaagtgaaatcccgtacccgcgtgatccaaatcctgtccgtacgcggcctgctgacgttgactgccctgctcgtcacgaaggctaacgcgcaatcggtcgcgatggcgattggcctgatcagactggtgcgattcacctgttgcgcgtgacgcgggctgtactgggcctaccctggcgaagcgagaacgccgtgttgcattatgtgcaccgcgtgaggtagt

SEQ ID NO: 513819 - DNA, 803 bp, Homo sapiens
  misc_feature (13)..(13): n is a, c, g, or t
aagttccgcatgngaacaaccatgttctgcgggtgcttcttgcagagtagatgcatgaggctaccgctgggacacagtgttcctgctgtcgcgggcacgagacggtgctcacgcctgagttcctgaaccgctgccgcatgcatgccatctccggctggcaggtcttctttcccatgcatttccagagccttccacccagctgtggccccagccacatagggcctgggcccccaagagtctgggccgtgacgactggccgctttgatcgccaggctagccaggcgaggtccctgtcttctacaacgtccgacttacgtggcagcccggtgggcgcctggcggtagacctctagagagcaacgaagaggagctgctggagagcctggatgtgtccgaggctgttcctccgcgttctccaagtctgcatgtgctgcgggcggtgggagaccggtgctgctgagcgtctaccgggcccagacgtgcagcgcggaggctcacgttgagggagctgttacaagccgctggcctccaagagaccgtgcttgagggccgtcggtgcacagaatcccatggctgggccagtgctattcttttgacaccgaggaaggcagggagcatgtaaggactagcgttgaggcccaaccagtggagccacagtgggtaccaggggcgcttgtgttcaagggtcccccattaccgcggtctttttcttcacctggatattcgtaatacgcccagggttgccgtgtctcttttctttggttatggtgcctagacgcccgattgggcgcaacccgagagctg

SEQ ID NO: 513820 - DNA, 468 bp, Homo sapiens
cgtgccgacacagcttcgtctaagagtggctcaggactgaatccgtgtttcaaccttcggtagatggttacgaaattagattattacacgtgtgttggagggcttgacttataccatgcaccttgctcccagcatcacccttgtgtctgaccactttgcagaagagaagccaatcagggctgggcgcagtggctcatgtctgtaatcccagcacttcgggaggccgagatgggcagatcacttgaggtcaggagttcgagagcagcctggccaatatggtgaaaccccttctctactaaaaatacaaaagtcatccaggctttggggtgggcgcctatagtcccagctactccggaggctgaggcacaagaatcacttcgaagacgggaggcagagggtgcaatgagccgagatcgtaccactacactccagcctgggcgacaaagagagactctgtctcggaaaaca

SEQ ID NO: 513821 - DNA, 100 bp, Homo sapiens
tgtcacccaggctggattgcagtggtgcgatcccagttcactgcaactttcaactcctgggttcaaggcatacttccaactagaagtcgtttccacctag

SEQ ID NO: 513822 - DNA, 244 bp, Homo sapiens
gcgaatactacgtgtgtcagggatcgagttcagacgtctactggcctgggtgttccatctcatcttggagtaaatctatcataaagtaaagaatgagagagtgagagatagacacagagacgcagtatgaccgagagtacataaatgcagaaagacagagggagagaacccgagaaaccgaaaattgtttttttatggaagggtttaaacaaagtcctcaagatttcttttctccacatctcct

SEQ ID NO: 513823 - DNA, 391 bp, Homo sapiens
cagccggctgagaaaatggctctgtttatttccaagtgggtcgcgtttttcaagaccttgatatacccacgccaccgtggctccagcacccgccctggaacagcacgccccatttggctcatgctgactccgcaaaagcaatccttagaatccacaccccttggaaatactactccccttccccaggaaaagaagctgaaatggaaatgaaggttgtcatgaccaggaacacatgagtggaagctggtgcaggtgaaatgagaatgtttctatggcactgaaatgaaatgttccctccacccaggaatgactggttctggacagtgaatgctttgtgcccttgtggcgacagcgcctgtttactccaacctagctccagagctgagaattt

SEQ ID NO: 513824 - DNA, 197 bp, Homo sapiens
cggaaatggggcaggtcaaacctcccgtgctgatcagtggtgggatcgcgcctgtgaatagccactgcactccagcctgggcaacatagcgagaccccgtctctacaaaaatacaaaacattagctgggcgtggtgatacatgcctatagtcctagctacttgggaggccaagctgagatcattgaaccggaggtga

SEQ ID NO: 513825 - DNA, 321 bp, Homo sapiens
taagttgttgagtgtaatggtaatttatccattttctttgtctatataatcattctcaaacaaatggacatcaggacacctcttacattgttagcaattattgaggactagaaagagctttagtttatgttacatatatatcaatatttctgtattcaaaaatagaactagctggtcacagtggttcacagtggttcacccagcaacttgtgaggccaaggaaggaggaccagttgaggcctggagttgaagatcagcctgtgccacatagccagaccccatctccataaaaatcaaaaaattttttttgaacaccgaggt

SEQ ID NO: 513826 - DNA, 109 bp, Homo sapiens
cgactcataggatcccctgatcttccgtgccccatgaatacatagcgacagcagtcactttatactattgttcagaggggagaaaaaaggagcgcaggggcacggatca

SEQ ID NO: 513827 - DNA, 298 bp, Homo sapiens
ccatctaggtacttacaaatagaacttatccaataaccctggctctgtaacaatcttacaataatatctcttcataatgaatcattcttaattctcttatttcctccaaattctcccttgttctctagtgtcagtcaaaactctagaaattaaaagagggctttcaagtgtatatagatttaaataggagtaaattgccaacgtgcacttcatattttaaagttgtacgcttgttaccgtttacagactagaaaagtgctatgagaaaacagtactttgttattatagcgagatccag

SEQ ID NO: 513828 - DNA, 529 bp, Homo sapiens
  misc_feature (4)..(4): n is a, c, g, or t
  misc_feature (77)..(77): n is a, c, g, or t
  misc_feature (80)..(80): n is a, c, g, or t
  misc_feature (89)..(89): n is a, c, g, or t
  misc_feature (95)..(95): n is a, c, g, or t
  misc_feature (98)..(98): n is a, c, g, or t
  misc_feature (124)..(124): n is a, c, g, or t
  misc_feature (174)..(174): n is a, c, g, or t
  misc_feature (181)..(181): n is a, c, g, or t
  misc_feature (185)..(185): n is a, c, g, or t
  misc_feature (200)..(200): n is a, c, g, or t
  misc_feature (204)..(204): n is a, c, g, or t
  misc_feature (260)..(260): n is a, c, g, or t
  misc_feature (262)..(262): n is a, c, g, or t
  misc_feature (278)..(278): n is a, c, g, or t
  misc_feature (325)..(326): n is a, c, g, or t
  misc_feature (386)..(386): n is a, c, g, or t
  misc_feature (422)..(422): n is a, c, g, or t
  misc_feature (429)..(429): n is a, c, g, or t
  misc_feature (435)..(436): n is a, c, g, or t
  misc_feature (448)..(448): n is a, c, g, or t
  misc_feature (454)..(454): n is a, c, g, or t
  misc_feature (489)..(489): n is a, c, g, or t
  misc_feature (514)..(514): n is a, c, g, or t
tttntttggttttgggggttgtgggggggggggggagggagaggggggaaattggggggtaaggccatgggtggganggngtgctgagnacttgnggnggaagagctaaaagagtgcgacgganctgttgagggaggtggtgggggtgactctggtacaggggctgcaccaggngccccanagcncctgggtgcccagcntggngctcagcccaggagaagagcatgtgacggatctgctcatccagatcatcccggaantngtgcaggatgcgctgnaactcccggtaggacacccccaggtgcagggccacggctggccagtnnagacccagacgcccagccacactcagcaggttgctctagcgtcagaaagccggtctcggnatgtcccagattaaagggtgacaaggagaggcaagncccccgnggtggnncctcggaacctngaagtntctgttggaaggaaaaagtgcattaagccctgggntccacccccaactccaccatgtcancctggtaacccctgg

SEQ ID NO: 513829 - DNA, 687 bp, Homo sapiens
  misc_feature (181)..(181): n is a, c, g, or t
  misc_feature (185)..(185): n is a, c, g, or t
  misc_feature (187)..(188): n is a, c, g, or t
  misc_feature (191)..(193): n is a, c, g, or t
  misc_feature (195)..(195): n is a, c, g, or t
  misc_feature (229)..(229): n is a, c, g, or t
  misc_feature (292)..(292): n is a, c, g, or t
  misc_feature (372)..(372): n is a, c, g, or t
  misc_feature (374)..(374): n is a, c, g, or t
  misc_feature (400)..(400): n is a, c, g, or t
  misc_feature (413)..(413): n is a, c, g, or t
  misc_feature (425)..(425): n is a, c, g, or t
ggcggtcgtgctggtccaggtgttcgaacgtgatccgagtacataaggcatcttgctccctaaggcttgcatcagcattgaaatagcctacaagtagctggggggccggtccacaagagtgttcttgtcttccatcagacagcgagagatggcgtgtgctcttcatagggactatggttantagntnnctnnngnggtgctgccaactttataatggtggcccacctanctatcaatgttgccaaggcccgcaagaagtacaaagtggagtatcctatcatgtacagcacgnaccctgaaaatgggcacatcttcaactgcattcagcgagcaccaccagaacacgttggaagtgtatcctcccttcttatntnttctagctgttggaggtgtttaccanccgcgtatagctnctggcctgggcntggcctggattgttggacgagttctttatgcttatggctattacacgggagaacccagcaagcgtagtcgaggagccctggggtccatcgccctcctgggcttggtgggcacaactgtgtgctctgcttcccagcatcttggtgggttacaagtggcttgggcagtggaccaaatggctgcattacagaatcataggggtctaaaaatctcattcatttcaaatgacttacctttatttccagtcacatgttttctaaatat

SEQ ID NO: 513830 - DNA, 136 bp, Homo sapiens
ggcaatttctacattttgtacatctttggaagatttgcccagacccttcggcacaggcccaaagttgtttgtttgcttgtttgtttttgagacggagtctcactctgtcgcccaggctggagtacaatggcatgat

SEQ ID NO: 513831 - DNA, 371 bp, Homo sapiens
  misc_feature (181)..(181): n is a, c, g, or t
  misc_feature (185)..(185): n is a, c, g, or t
  misc_feature (187)..(188): n is a, c, g, or t
  misc_feature (191)..(193): n is a, c, g, or t
  misc_feature (195)..(195): n is a, c, g, or t
  misc_feature (229)..(229): n is a, c, g, or t
  misc_feature (292)..(292): n is a, c, g, or t
ggcggtcgtgctggtccaggtgttcgaacgtgatccgagtacataaggcatcttgctccctaaggcttgcatcagcattgaaatagcctacaagtagctggggggccggtccacaagagtgttcttgtcttccatcagacagcgagagatggcgtgtgctcttcatagggactatggttantagntnnctnnngnggtgctgccaactttataatggtggcccacctanctatcaatgttgccaaggcccgcaagaagtacaaagtggagtatcctatcatgtacagcacgnaccctgaaaatgggcacatcttcaactgcattcagcgagcaccacgaatacaggggatcatctagagtcgacgttgcga

SEQ ID NO: 513832 - DNA, 409 bp, Homo sapiens
acaaatttgttttagtccattcagactgctataataaaataccctagatggcatggcttataaacaatagaaatttatttttcacagttctggaggccggaaagtccaagatcaaggggccagcagattcagcatttggtaagggcccactgccgggttcacagaccaccacgttcttgttccatcctaacatggtggaagagataagaaagctctctggactctctttcgtaaggatacaaatcccacccatgagggctctaccctcatgaccaaatcacctcccgaaggccccacctccctgggttaggattttagcatgtgacttcttttgtgtgtgggtggggggccacaaacattcagtctattgcagtttccaaagcaacagccaaaaaaaaaaaagtcgagc

SEQ ID NO: 513833 - DNA, 229 bp, Homo sapiens
aagaccgccaagggagacgcccatgaggcctgtcccagtttctcgtatcttgtctgctacacctgcacaacagacagagacagcccatgctggcctccatgcctgagaccctgcccaaccctacaatgccaggatcttccgcgcttgatgccaaggagcgcaaatgtcaggactccagcatatgggagcaggccaaatctagacccctggctttccagtcagcagcatc

SEQ ID NO: 513834 - DNA, 377 bp, Homo sapiens
atcacactgactgggcacacacaaatacagtgcacgctcacacatgctgagtggcttgcactcacacacatagatgcatgcttgcacacatcaaggcacactcgttacacaatgtacacatacacttgcacacttgtggcatcagaggtgtgcactggcggcagagaactccacactcagtacacttgagagcacacccaagggggtatgggggcggttggctacaagcgaaattaaaagcctgacacacacagcaagtactctcacatgggcacacacacacacacaaacacatctgcacacacctggtcatgctctcacacgaatgcacactcatgtactctcacatatgcacactcatacacacatccctggtg

SEQ ID NO: 513835 - DNA, 842 bp, Homo sapiens
agtctactgtgtgctagtcacccccggggttcccggtccttctcgaggctgaggccgcggcagcgcggtaggacggcggaggcgggacatggtctgtcctgcgtgtgggagccggacctaagcaaggatagatgtgaactacaaaatgtcattatcctggatgatccaacgaagctagccaaggtggaagagaacgatcgaccattgacttcttctaaccgggccgctataaccatcaccctgctcagcttcaccatcgatcagcctcgatgtacttcgcctttgacctagggtatgtactctgttccagaaagacaacatctggagaggcatcctctctgttattttgcttcgtttcttatcgatcgagtgtgttagctttccccatttggtccgttcagctcgaccgtcatccagtccttcatggcgaatcgcgtttttggactcatgtgtgctctagcttcctgttcctggttttcctactcttcctgaatttcgagcaggttaaatctctatattgtattgtgctagatccaacatcttcgatacgccacaagggaagcagatgtcatggagtatgctgtgaactgccatgtgatcacctggggagaggattatccagccacttttgatattcttgcctttggacattcttggggctggggccatgaaggctttggtgaatccgaagttaagggctctgctggagcaaaccaggattacctggggactgcacgagctctcttctgggtttcctcccattttgccgcgagtcgcgggcacaagcatcttgggaccgtgtgcaagagagcgggagatagcgggaggacaccgcgccaaag

SEQ ID NO: 513836 - DNA, 213 bp, Homo sapiens
ggtaatctacaagcggccaaccataaggcatcataggaggatgggactttgacacaatttaacacacaaatcgatcagacgaatggcgtcgtcattaaattagtgccagatacgcaaacaggtggggtcttagatcccaaggcacgggctgaattagtggcggcccaaacgcaaactgtcgatcagcaagacatgacacccccagatatttct

SEQ ID NO: 513837 - DNA, 448 bp, Homo sapiens
  misc_feature (38)..(38): n is a, c, g, or t
  misc_feature (44)..(44): n is a, c, g, or t
  misc_feature (93)..(93): n is a, c, g, or t
tttggacaatttttaacattttaaaataaaactttttngtcatnaaaaaaccaaatgtattaaaacttagtttccagaacttgccccaaatgnctttttaaacatgacttaaatgtcgttttacaaattctatccaagaatacgtaattttccttttagaactttagtttataatttatatattaaagtgccctttaattgatattcatcgggataccttcctctgagccctaatggttttgggaggcctaggcggtggatcacctgaggtcaggagttcgagaccagcctggccaacgtggtgaaacccagtctctactaaaaatgcaaaaattagccgggcatggtgcgggcgcctgtaatctcagctactcgggaggctgaggcaggagaattgctggaacccgagaggcagaggttgcagtgagtcaagatcgcaccatcacac

SEQ ID NO: 513838 - DNA, 434 bp, Homo sapiens
tgctaggcagaattctaagcgcttcatattcacagcaaccctgtagatcccatattgcaatacatcccattactcagatcacattatatattggccttttgaaggagtcaattgaaagcaagataaccactgggtgcgatgactcacacctggaatcccagcactttgggatgccaaggcgggcggattgcttgagcccgggggttcaaaaccagactgggaaaaaaagtgaaacctgtctttaccaaaaataatgatgatgatgatgatgataataataataataataattagccatatgtggtgtcatgcatctgtagtcctagctacttgacaggatcatgattgcttgaccctgggagggcgaggcagcagtgatctgagatggtgccactgcactccagcctgggcaacagaatgagaccctgtctcct

SEQ ID NO: 513839 - DNA, 913 bp, Homo sapiens
cttcttttttattagcattccttactgaactgaatcgatttaaaatacaatgaattacatccaatttttacctttagtaacaccatcttaataacacaaattccaaagaacaagtcagtctggcttatcttctaaaataaagttatatttaagtagacttgggtggctttagtgacattatgaatgctttaaaccacatttatactatttttattctgttaacatttttaattagttgtcagcttttactcttgatctatcctatttttttctttcctcttaacactgtaacaaaaaatactcctgtttcttctgacatattgggcatttcaccttttctttgtttttagtatctctgaggtaagggaaaggtatttcactgaggaataaccaaggcaagttgatgtgaagactttctctgattatattatttttacatagtgtagtgtggttgttaaatgaaatggacctgtgactgatctacactgaaactaacagtgttaacttagagatagttttttcctactaccatgtaaatgattaaagtgttcatcagtctatgctcaaactggagaattggaaaatatgtatttacaatccctagagagcttggaagaagcatggtaaaatggagacaacatggattcgaagtcatctggattccagtccaagtccctattaggttagcgaataatatctctgagtggttcaatattctattgccttagtattgtaattactatgaagctggataatataaggacgagcgaggggaattgtgacagagagagtgatgacaagtagaggatgattgtgaaagagacgtaaaaaaaaaagggggaagacgaggaagcaattaagaagaaaggggaagggaaaaggaacgaaacaaattttttgttttatgttaaga

SEQ ID NO: 513840 - DNA, 524 bp, Homo sapiens
cattgctgacagggtcattggagaatgtaactggatctggcaggggctcatcctagatcacaaccttccagaaaactccaagataaaggggagagtttcctctcaaatggaagcacctgacgatgcggcatataaaccacaccaaccggacagagtcggtgggcccacttcccaaatctcgggaggatctgcagcttactcataacaggatcacaaagcggggctctttggagggatgggtaaacctgaccttcatccatctccagcacaatcggctgaaagaggatgcggttccagcggcttttaagggtcttaaatcactcgattacctggactggagcttcaatcagatagccagacggccttcgggtctcccggtctctctacaaactcctcctagaacgggaccagtatgccccagatgtggccgaactcatcgggagccttatggagattgcgtaacatccgtttgaaagtggcccggacctatctcttagatccttacaggatatggtctggagtgg

SEQ ID NO: 513841 - DNA, 262 bp, Homo sapiens
cccacgttcaagtgatattctcctgtctcaacctcctgtttagctgggactacaggctcgagtcattattttcagctaatttttttatttttagcagagacggggtttcaccatgttgaccaggctggtctctaactcctgacctcaagtgatctgcctacctcagcctaacaaagtgctaggattacaggcatgagccaccgcgcccggtcacagcccttaaaaatttgagtttaaatgcatatacatatttttgtaccag

SEQ ID NO: 513842 - DNA, 495 bp, Homo sapiens
gcgtttatctcacaacgaactggactgatagtggaataccgtgcgaaattctttcaatgtgtcatccctggttgagctggatctgtcctataacaagcttataaaacataccaactgtcaatgacacaaccttgaaagactattaccgtggaggttaactcaacttgagaagtttgactataaagagcttctgcaatgatcctggggccattatcctactccaagatcgaagcatttgcgttgggatggcaagtcgcagtctcagaaaccagtcgttccaccggatatgtactgacatgtcgtacgtgttgctgaacgaagtcactcgttaattaatatcgtggtatcctggaacaatattgtatggtaatgttgttctgtgtgtcagttttcatagtatccatattttattactgttgattacttccatgaattttagaatctgagggaaagtgttttgtaaagcattttattgtattttgaagaaaacgatga

SEQ ID NO: 513843 - DNA, 381 bp, Homo sapiens
cgtcgactgagattgtgcccctgtactccagcctgggtgacaaagcgagaccctgtctcaaaaaaaaaaaaagaaaagaaaagaaaacaagtgggggcgtcctcactttcccaggctccctctaattgtgtgtgggggttgggtgtttagcactcacaagcttccgcgaaatgctgcctcaaattatcttgtagccaccaggtggcagcagcaatccactttttggtctaacctggcagaggctgaactaggatggttctcctttaattagcgtactggccatagaatcgtggacgtttagacatgaaagaaccttcctcaaaagttctgacaactacaggtcgacgcggccgcgaatttagtagtagtagtaggcggccg

SEQ ID NO: 513844 - DNA, 138 bp, Homo sapiens
gagactgggccttacagagtaacatgtgtgaaagcagcaaagaggcactggcagaaaaaacctgaaccttccaaagatgccgtcgaggatgtaccgaatttgtttgtcaattcgttctgaagaggtgagtggctgtct

SEQ ID NO: 513845 - DNA, 915 bp, Homo sapiens
  misc_feature (89)..(89): n is a, c, g, or t
ttctctggacggaccttttctcttgcacacgaggagcctgaaatgatggaaaactaggtcaggggggttttggtccaggtttccccctnccctggtgaaacggcagaagacccactttcatgatttgcccatgtggtgcctcagtgattctcggtaacaacggcttcatctggatttaccctacacctgagcacaaagaagaggaagcagggggcttcattgcaaacctggagcctgtctctcttgctgatcgagaggtgatatcccggcttcggaactgcatcatctcgctggtaactcagaggatgatgctgtatgataccagcatcctgtactgctatgaagcatcccttccacatcagatcaaagacatcttaaagccagaaataatggaggagattgtgatggaaacacgccagaggcttttggaacaggagggataaggaggtgctccagatgcacgggactgtggaccttgcaggagtgatgactgtgatgtgtggtccccatatcgtggctcagcaatagactcgagagatcatccctttgtctgcattgacggccctgtgacggcctcactagccacacatggctctcgctttactccgtgtctctgaacatcataacgcctaggtgctcgcgcagcatgtaactacgtgcgttacccttggagttgacacgactgagtccgcggtatctagaggaatacgtttcagcttcttctctaatagtgcatcagtgttacagtcgaatgggctcccatcctggaataactatggagaatcctttgtcttccactcactgtcattcaacaaggcacagtgccccatgagattgccccaatagcacacatcggcatccctgacctccaaatgcgtctgttttggcctccatttacatctccggttaatgacc

SEQ ID NO: 513846 - DNA, 507 bp, Homo sapiens
  misc_feature (17)..(17): n is a, c, g, or t
  misc_feature (56)..(56): n is a, c, g, or t
  misc_feature (62)..(62): n is a, c, g, or t
  misc_feature (106)..(106): n is a, c, g, or t
cccttccacgggcgaanaatttttcttggcccgaaggcaaagggctttctagcgcntgaccntaaagccgcttctcagggaattcacggttgtttgcggcgcaatngtcggaacgcgccggaacgttgttgctggagccccttcccgctgcggttgtcatggagaaacttccagcttgggccagagactctactgcaggacaatccaaagctcatctatgccaggctgagcggatttggccaatcgggaattttctccaaagtagctggccatgacatcaactatttggctttatcaggcgttctgtcaaagattggcagaagcggtgagaacccctacccaccgctgaatctcctggctgactttggcggtggaggcctcatgtgcacactgggcattgtgctggctctctttgaacgcacacgctctgccgagggcaggtcatcgattcaagcatggtggaagggactgcatacttaagttctttcctgtggaaaacccagccca

SEQ ID NO: 513847 - DNA, 153 bp, Homo sapiens
tagctggtacctatacaaactgaactcttcattcctgctttcttagaatacatggccagaatccaagtggaaaaggtctctgtgggccagtccacctgcgcatcggtccccactgtcctgcacttcttccttgccctggtgctggatctgaga

SEQ ID NO: 513848 - DNA, 350 bp, Homo sapiens
tcagtggagccttgaagagagatcagttcagatgactctccttcggtagagtctcgagaggctcacagttccgctcgagagccgccttttcactctccctctctcctcgatcgcactttagccagctttccctcttgccttgtctcaagtactgccccctctgggtctgtccctggcctttcccggtgctgggacacgaagtaggctccttcctccacccatttgacgccttggctcctatgtctccattcacgccacagcacgactctgcctgactcacctctcctcgtggggcggccagcctcaagatcgtaccactcggtgccaggctcgtggatatcctcaccttc

SEQ ID NO: 513849 - DNA, 375 bp, Homo sapiens
gatgctcggggttactctatcagcctaggataaccacccagactgtgggactcatagcctgtagtccatttgtttggcgtatatactaatgttcaaggatgcacacataaggcgggtgatgttttttggatagcgtcttatcacttgtagaattgccatgataggcatgttttggagctacttgaagtacttgctggcctagtaattatgcaagtaagtaattaagtgttgattcatatgtgaaagcccaaggtaagcattatttatgtcttacagtgaagtgtggtgtgcctttcatttatctgagtggtctttatgtgatggaatattaaatggatcggtgaataaactcaagagggtagattataagaggaa

SEQ ID NO: 513850 - DNA, 434 bp, Homo sapiens
tcaaccacttcatgcgtcacatagagtaccctcctacttggcaaaggacccaaggtgcgtccttcctacgatttttgtcatgcagcattaaagaaatgtccactattaaaacaatagagacaaagccattattaccgaagtacggatatatgcaaactaaatgtctattaacatatttgacaggaggactatagtgtaaagaagatagatagtgtagtgtgtgtgtgcgtgacaatagtgtagtgtgtgtgtatgtgtgtgaataagtcgacataaagtctttaattattgagcaccttaccaaacataacaataatccattatcctatttggcaacaccacaaagatcgcatctgttaaacaggtacagttgacatgaggttagtttaattgtacaccatgatattggtgtattacgctcgtgagtccaaccc

SEQ ID NO: 513851 - DNA, 1395 bp, Homo sapiens
  misc_feature (632)..(632): n is a, c, g, or t
taggtaaaatctttttttttcagaaaaaaaaaaccccaaaaaaaaaagtttttccaaccaacatccggggaggggatttgggtgtagggggaagggtgtctggtgccatccaggcctgttgccccacagccaatggtggtgttttgggcagcaatataaggggtgtatgggctgtaattgggcccaaaaattaacaggggttcgtggtgttgtatgggagagagaacagggggggtcgcaaaggctgtgtgtgggagacgcggtgtagaaggggagaaagtgggaccagacgaggggtctcagattcctgtggagaagccgccagaagtggtggggagggccatttgttcatataaccatttttcttgttgtgtgatctcaaaacccaccgcgtggtgaccccgcccttctctttgtgccccatactcagagcgaggacatttaaagcggggtcgtgtgtgtcagagctctttgggggtgacacagaggtgacacatttttgagagagggtgggggggcgcccccccaccgcggtgtgctctcgtggggggacagccgaagagatatctcgagggcgtaaaatatctcgccgcaactctctgtgggcgagccaagtgggaattctcccccgngggggtttcccacccggacaagaacatttttcttgtgtggggcgccccccccaaaagtgtgtttttttttggccccctatatttcccaggcgtttgacacaacactcttttgtgagacgcggggggcgtcttttgttgtggcccaaacaccccatgagggggaggaaacacccccaaacacctctctaaaagaggtgtggcggcgagtcgtagcatgttgtttgtgatgcaagcgaaaagaagccggtggttttttcctccccgcgggcggggaggaagacgctgtggggggggggtccccactaaacatagatgggggaaggacgggcggcgaggaggttctcttctctgtgttgtgagcgcccaccagctgattagttgtggtccgcgggggttatcatccttggagagaaagaggggtggttcccccggtgattcgcggcgacgccatatggataggtgttttttgtgcccgacgatgtagcgtgtatagacaggcggggtgtgttaccaccacacccccgcgggtgggggccctattttgtgggcgggcgacgccgttgatgcgacaacaactgcatgggggagggggggcattgacgggacatctttcccgaggcggcggctctcatgtagcgttagatgcttgttagtgggtgggcgcccctgtggagaggagaacaacttgtggtgggtgggcatctcacagaaagagctgtatgggccacctatagcggagatatgttgtggtaaggcggatgag

SEQ ID NO: 513852 - DNA, 302 bp, Homo sapiens
  misc_feature (71)..(71): n is a, c, g, or t
  misc_feature (136)..(136): n is a, c, g, or t
  misc_feature (251)..(251): n is a, c, g, or t
  misc_feature (281)..(281): n is a, c, g, or t
gggatcgagactctgaccactgaaacccaaggccaagcacttttatttttcacacagggtcttgctctgtngcccaggctggagtgaagtggcgcaatcacagctcactgcagcctcaacctcctgcactcaagtnatcctcccatctcagcctcccgagtagctgggactacaggcaggcatcaccaccctcaactaattttttaatgttttggtagagatggggttttgccatgttgcccaggcaagtnttgaacttgggcctcaagggatccttccanttgagactcgcaagtagctgg

SEQ ID NO: 513853 - DNA, 108 bp, Homo sapiens
aagaagtgcttatcagacatcaccaggttcccacagttaggtacaatcaactcttgtgcacctgatttttcccactctcttatcgccttgtcattccgtgctgagatt

SEQ ID NO: 513854 - DNA, 552 bp, Homo sapiens
ggccctcgtacatggtggcgcctgtgtggtacttgtgtagctggctggctctgctagtctggctttatcctcttcctgactcgcagccggggcctgtgtgctggcatcacgccggccaatgagccactgcaccaatgagtgagcttgtgcagtgatgcatggcctggtgtgtgcccatgccattggtgcccctgtgacgcctgatgtgatgcctgagatgcttggacgtgcagtgacctctgtgctgcctggaggggaccctggtggacactgaccgcactaacatgtggcccatgctgttcgaagtcccactgcgagagctgtgccatggggcaccgacacgcatgaattgacgacaccggacgtgactgtgacacgctggtccaggtcccttactgccccccaggtgactgggactgtggcccctggggttggtcccggacgacaatgccccacggacctgtggaccacatccgttcaaccgcattggatcagcagcgtgcacacacacctttggggacggccttcccccgacaccgctttggggctggg

SEQ ID NO: 513855 - DNA, 383 bp, Homo sapiens
  misc_feature (35)..(35): n is a, c, g, or t
  misc_feature (382)..(382): n is a, c, g, or t
tgctcgtcaggctacggcggacattctgcgtgaangaatgtacccgtgaccgaactgcgggccggaattatcgttggcgcaggttccgcggcgttcgaagtcatgcgcgatatggtctacaacctgccagtcttaacgcctccgcgctgggttcgttcacgcaccacgcccattgcgctggaaaacttgctgcactatctggttgcgttgttagatcatccggccagcgaacaccgcatcttcgaagccgccggaccagaggtgctcagttatcagcaacagtttgaacattttatggcggtgagcggtaagcgcccgctggtttgatcccccatcccccctccccaccccgctggatttcggtgtggtttctcaaatgtgng

SEQ ID NO: 513856 - DNA, 957 bp, Homo sapiens
tatccccctccttagttttttgggcgcaaaacccaattataaccccccccccccttgttaacgggggggcggggaaaaaagccaaaaacccaaaaacccgctcgggtaaacccccatctgtctctggccccccgccttttaatcggccctgttggggttttgggtttttcacatcctggcccctggggggctggggcgtgagatgttgggggggtgggcaccccctcgcggggggcctctgtcgcctttggagcgcccctctgggagagaatgtcaagagggggatgtgggaagaagcgccactgtgccgcgggccgggagttctcggggggagaacgtggtggtgtggtgcccccacaaaaatgcccctataggcggccggaaggaggggggggatagggcgcaggggctcctcccctacggggcgtcagagagaggggagcgctccgagaggcgaccaccagggaggtggggccaccctgaaggttgaggccctaagagcgtctggcgccagaagagggagaacggggggtcaagcacctgtgtgttgttaaccccagcgggggtcccacccgagggcgggggccgaggggtggcgcgcgcctcgccgacactcctggtgtggaacccctctccctctctccccttgtggtgaaatcttttggcccgcccctaaagacccactgacgtgtggcccacaaggagggcgcagaaacccctgggtggaccccacttggggggcacaaggggggtgataatggcccgagcaaaagaggagtgctagggggggactagtcccccaagaaactagaaatagtggccagggttgtgccacattcaacaggtttgtgtgcccccgagacccccagggttctttgttgtcaatgacagccaccatggtgctcaggctgcggaggggaatgcctggtgagtgacatctcgcacaagtgcaagcac

SEQ ID NO: 513857 - DNA, 575 bp, Homo sapiens
ggctcacgcctgttatcccagcactttgacaggccgaggcggacggatcatgaggtcaggagatcgagaccatgctgggtaagaagggaggactgacggtatactaataagcgcaatggaattagacggacgtggcggggggcgcctgtagagcgtgattctagggaggctggggcagtcgaatgacatgcgcccactagtcgaagcttgcactgaggtgtcatcacgattgtgcaatatagactgttacgacagagtgagattacatcacttaacaaggggtcttgtgcgagttccatggtggtggactcaatgcaacaacttttactacttggcgacttcatgcatgctgtagaatggagcgagtctttctgcacgtgggctttaacggtaaagtctagtacttcaggggattatgccagttaccaatttcgcctagatcttcccatggggaactctgggtgcatacagccccagagtctatctacctatctatgcaccaagctttgctgatttcttcgctggccttctttccttaataggccatagatattggtcggctacctagggtctcc

SEQ ID NO: 513858 - DNA, 277 bp, Homo sapiens
aaggccaaaccgggttttttttgatggggcgaccccccctttgttttttgggggccccttggggtttttcccaaatttccccatcgttttaaaatgggtttggggggttccctttttggaaaaaaagggaatccctttgttttccctttaaaggaattttttttttagaaccaagtttcctgaatgggggggcccggggggggcccaaacccctttttttttttgaataaaaagccttttttttttttgttggttaaaaaattttttttttccttta

SEQ ID NO: 513859 - DNA, 333 bp, Homo sapiens
gccgctcctcccttcggctctctcctctcctctcaggattgccacctcgcctcctggccccaaaaggatcgcccccaaccaagggaccaaaccatcggggctcccccaaggaaaggccccgcagccccccaagcaagggaaggggccaggccccaaggcccccggcctcccccggctccccccggcgccccccgccccccctggccaaccagccccccctcgcccccccagcggccccggcagcgccttcccccacgggcacgccctcccccttttgcaccccccaggcggtcgttcaaagactcgatatctcccactgtcccccacccaccc

SEQ ID NO: 513860 - DNA, 189 bp, Homo sapiens
tagtcgtacgtggcacaggtcaaggccaaggcagatggctccacttggatatacccgccaattgccaggctgtgcaggaatagcttacaggctgaccctatctggggcctgccccagagttacacttaagtggcacttgtgggggtgctgggaagcagacatggggcccccacagcactgctgggcttc

SEQ ID NO: 513861 - DNA, 920 bp, Homo sapiens
ggcttggcacccgggtggggcacagatgccgcgggagtggggagtggggagtggctgcctcgaaccctgctgtgtggcttgtcaccctccatggcgtctctgcgcctccgtttgactccagctgcacggcacacggggcgaggttagcatcaggggccaaagcggacccccgccagaaaggaggaagaggcccccaggtaggtgcgtgcttctggacctggcgctcggcacactgtgaggatgggcggatggagttggtctgcaggttccagaatgaatggggccctgttgtgacaggagaaggagggcagcctgggttgaagaaacaccccctgctgtccaacagctgcactgcccgctcccctggcaacacctgccacgtggactggagaagacacattagcccttgggctggaagtcgtggaccggcgtccacctgagatgggactctgggagggaacagccgccggccctcctgcctcagctgctctcagcatcctacagtgccatcgggtgctctcaggacagatgcctacagaacaggcttttctaaagaaagggggtgggctccagggcccagagtcacggcacggacgagggggctttggatcactctgcacacacctcaggatggaagtcctggtcagcaaatgcattgagcatttctggttggaccaactgctcctggggcaggctggtctctatccccaattcccaatcccacgtgcctccttgcctctggtcacgttgatgttggagcagcaagccttttccaaagctcagaagtcagagggccacaggccactggtccccttgggcaggccggaatcccttggactcctgggagcactcgggaaaagccagtggccacacaccagtttggccgtgggcccggctaaagaattccccgaggggccaga

SEQ ID NO: 513862 - DNA, 115 bp, Homo sapiens
tgacatgattcgaatcgagccggtaccacagtgatagcaggattggtagtgattttcatgatgctgggcggcacttttctctactggcgtgggcgccggattcatgaagatgaga

SEQ ID NO: 513863 - DNA, 379 bp, Homo sapiens
ttctgtatgaatatgcaagacggcttcctgattactctgttgtgctgctgctgagacttgccaagacatatgaaaccactctagagaagtgctgcgccgttttagaccctcattatatgctacgccaaagtgttcgacgaatttaaacctcttgcggaagagcctcagaattcaatcaaacaaaatcgcgagcttcttgagcagcttggagagtacaaattccagaatgcgctactagctcgctacaccaagaaagtaccccaagtgtcaactacaactcttgtagaggtctcacgaaacctagggcgggcagcaaatgtcggaaacatcctgaagccgcgctgcacgagacaacgccagtgtgacacagtccctgccg

SEQ ID NO: 513864 - DNA, 237 bp, Homo sapiens
gacattaacctttatcgataaactgacagttagactaagactatactaaccccaggttggtcaactcctcgtgccctgcactcgtggtcactacgattaacccaatgtctgtaaaaaccggcgctaaacgagtggcaccacggtccgtatgatggggatcctgtacagtctacctattctcgttgcagcatgtgtacttgccgtgttcagagaagctatcattaatgccaaaacact

SEQ ID NO: 513865 - DNA, 606 bp, Homo sapiens
aaaacaggggtgcaccccccatgggggagaccccggcccccgccgcgttgcgccaccttctgggcgaaaaaaccccctggccgcccgggggaccattaaaacactctgggagccggtggactccccccatatcagtgcgcccgggtaggaccagatggccgccaccaactaaaggcgctgggcgctggccccggatgaaaacccacggccaaccgaggtacaccgcacgggttcttgccaacccaacccctttatggggcattttctaaccacaagttgcccctcgaggagtcggtgctcgaacccttgaggggggaacacacgaacccctctctgggggtccacaaaagacgaaacaggcacacacagtggcatgttgtgcacactgagcctgtcgagcgctcccaaccgttgggggattgccccccccatgtgccccaccgtgcgccccgagatattgctgttaggacccctctaggcgccacaggaggatatatttcccaccggtacacgaggagattttacacggcgtggcgcccccccctggcccccaaaatttttttttgaggggctttttccccataaggaccccccccccaaaaaaaa

SEQ ID NO: 513866 - DNA, 479 bp, Homo sapiens
  misc_feature (34)..(34): n is a, c, g, or t
tcccccgggatcccttaaacccttaaaacaaaanccctttataaatgtataataatttcttcaaaaaaaaaaatgggcatttgtttacttttaaaaaaatccaccagtccccaccacttaaatattctaaaatacaataatcttaataacattcatttctatcccaacaacacatttcctaaacataaccactttttaaatctttccaacccccaaacccttaaacacaatcaatactcttttcacttcatcaactactttataccatataaatatcttcacacagcaaatcttttaatcacacctcctaacccctcaccttctttagccaatttctcaataatcttcccacactacatctttctcatatcccacacttttattttcttaagcctttttttcctttaccacctctttcatcccaatttttttctattggacacttcaaccacccctacccttcccccaacacacttccc

SEQ ID NO: 513867 - DNA, 440 bp, Homo sapiens
ctcggtgtcacctgtctgtcccatcctgtctcgggtcattcttaactgatttgcacccgggacgcaggcactctgtgtcacctgtctgtcactgtctcgggtggttcttactgatttgcacccgggacgcaggcactcgctgtcacctgtctgtcactgtctcgggtggttcttactgatttgcacctgggacgcagcactcgctgtcacctgtctgtcactgtctcgggtggttcttactgatttgcatctgggacgcaggcactcgctgtcacctgtctgtcactgtctcgggtggttcttactgatttgcatctgggacgcaggactcgctgtcacctgtctgtcgctgtctcgggtggttcttactgatttgcatctgggatcaggcactccgtgtcacctgtctgtcgctgtctcgggtggttcttactgatttg

SEQ ID NO: 513868 - DNA, 96 bp, Homo sapiens
  misc_feature (25)..(25): n is a, c, g, or t
  misc_feature (62)..(62): n is a, c, g, or t
cagcgatgcgcctccctgtgggatntcatcaccctgggaaccgggagtggcccttggctcantgtgttctgcatggtttggatctgaattaattgt

SEQ ID NO: 513869 - DNA, 115 bp, Homo sapiens
tgtggagacgggggtctcactggtgccagccaagatgggtctcgatctcctgaccttgtggatccacccggtctggggcctcccaaagtcctggggattacagggcgtgagccac

SEQ ID NO: 513870 - DNA, 187 bp, Homo sapiens
  misc_feature (165)..(165): n is a, c, g, or t
accacaacctcagaaagccgcatcggggagggcggcgcagagtgcctcaaacaggtaagaaaagttttggaggcacacgcgcttggaaagatgcaacgcggcgcaaatagaccgtagacacgccttggcccgtttattcaatctttatcacagaacgaacaatanattttgcccaacacccagggta

SEQ ID NO: 513871 - DNA, 236 bp, Homo sapiens
ccccccccttttttgggggtttccggggcttttgtgattccccgtctggtccaaagttttggggatccattccgcgaaatgatgttttggcattggggggggggggattaattttttccagactttttaagatgacccctttggcccccccccacccttttgggggttgttaaagatggggatataaattttttttttccttttttcccttaaaattccgcttttttccgtcctta

SEQ ID NO: 513872 - DNA, 213 bp, Homo sapiens
  misc_feature (179)..(179): n is a, c, g, or t
  misc_feature (181)..(181): n is a, c, g, or t
  misc_feature (193)..(193): n is a, c, g, or t
  misc_feature (195)..(195): n is a, c, g, or t
  misc_feature (211)..(211): n is a, c, g, or t
ggggtccgtctgcttcttctctcagcattagatcagatgaggaagggaactgaactcttagacaggacgatgataaaatcactgctcccttacatgtctgctctccctcagtgtttcatctcaggcttcgggaactaaaatgtttgctgtgctttttaaaaagctggataaaaatgttntntaataaatgtcncncgttgaaactgatacnca

SEQ ID NO: 513873 - DNA, 225 bp, Homo sapiens
gaggatggggcaggtctctaggggaggctcgccttcacaggaagagagagtggtaccagtgagccttatagaagctcaaatataagaccttctcccttggaagatcggaaggccagaagagtctccatgcaaagccaagccaatcagactaacgcacttgggatcagccggggctgggacctttcagacgcagaacgatactggacactacgtaccacgcggaca

SEQ ID NO: 513874 - DNA, 481 bp, Homo sapiens
gctctggaagtggattaacacacgttcccaaaagtgttaatggttaaaccttccccttccatgcaaatatataggcaccttttctaagaggaagagccaatccaagaccaactgcgccttggttaggttgttaaaccccaggcccaggccaccaaaaaaccacttaaaactggtaaggattattttgcagcttttggaaaaaaattctgcaaggcttgccattaagaaaccttcttttcccaagaagggtaaaaacctggttgttccaagccaacctcctttaggttaataccttcccttttaaaagctttccaccttcccttaagattaaaaaaaaaaaattaaagtccaaaggttatttcttcggtttttttttttggtgggggaaaacccaccccccggtttaaaaaccataattttctttaaccatttgccctcttttctcgggcctccaattaataaaaaatggaaagaatctaaa

SEQ ID NO: 513875 - DNA, 461 bp, Homo sapiens
gaagcacaaaggaggggcccgagaccccacccaggccccgggatcagctgcccccccatcccctggtcccgccggtactccggggacgtgactcctcacctcctccgacccagagcggcccccttggtacccgcagtgatgacacaggcgacctggcccccggagggagcggaccaggccggctggtgacacaggcaaccccggcctctccgagacggactcctgccctgcgacagccagtccctgagacccggctggatcgcggcggccccggggggccccaggaggcaggggaaggaccagcatgttgggtccccagaccatgaccgtggggtccggagccagagccagcgaaggagcaggcatgtgcttgttgtgccgcagggatccgaagacgggacatgaactcatgggtgccaaggcggcagggggaagatgggggctcgggcaggagcaccccc

SEQ ID NO: 513876 - DNA, 245 bp, Homo sapiens
tgattcagtgcagatctcgtcaagacaaccaacggccgtgtgaacgcgagcattgccacgcgggctcctgtaggtggcgcagctggccggccaaccaggccagctgctcgacgtcgaggtggttaggtgggctcgtcaagaacaagtacgtcgtggtctccgcgcatgatttgaaaccagtgcagcccgccgtcgttccccacctggaaagatcggccatagcgcggtcgagagccaatgttggt

SEQ ID NO: 513877 - DNA, 906 bp, Homo sapiens
acaggcaagggagagacaggtggaaggtaattgaatcatgggggcagtttcccctgtgctgttcttgtgatagtgagttctcacgagatttgatggttttataagggattctttcccctttgctcggcacttcttcatgctgccttgcgaagaagctggcttgcttcctctttgtcttccgccatgattgtagatttcctgaggcctcccaagctgtgctgaactgtgagccaattaaacttctttcctttataagttacccagtcttgggcagttctttatagcagtatgaaaacagaaaaatacacctactatgtaaaacttaaaatacaaaaaaacaaaacattatctcactaacataggagctaatatttggtgtacttgtttagtattttatattaaaaatatgtacatatatatttatatataattaagaacatgtatgtacaatcgtgcatacatcatgtacatacatctacttaagaaaatagctatgtaatataccattactcaatagattataattttttctccatttctttattgtaatttatcattttctactttttgttttctcatttttattgcataatatttaattatgcaaaaatacttaatacttggaaatattggtgtgtattagataaggaagaggtcaacgagttataccattacgtactagatatgacatcttttctcatggaattcttaatatgaaatggtatcccttaacctgtaaattctcggtcccgtggactttcgaaattcttgggcgtggggcaagagtcatgttttttcgtctttcaaaaagtgggttctcggagggtttgagtatgatagagagaataatggggaggcgtaaagagttttccgttgtctgtgtgtaattattttaatatttgtatt

SEQ ID NO: 513878 - DNA, 592 bp, Homo sapiens
  misc_feature (336)..(336): n is a, c, g, or t
  misc_feature (490)..(490): n is a, c, g, or t
  misc_feature (500)..(500): n is a, c, g, or t
tcaagaggatcccttcagcacttagtggtaattactagccatcccaggaggcaagtaggaaataactagttcaggttttttaacaacgaactggattttataactccgggggacgatcctttcaagtcggggaattccaaaccaggtagggcttcggaagggaatcccctcgggcaagccttccacatacaagaactcggggttggattcaaacacaggatatggtacttttacggcctcggtgagtccaagagctggagcaaatttcaaattaaaaatctcttccactggcttccgtagctgggtaattctgacattccaatcttcttggacggnaaaacaaaaagaaacccaataaccaggtaatttatcagggcggtggcaaatcagaagggatttggctagaaagtactctggttggcagggatccttttgggtgggtttggtttaattttttggagacagagtctggctcggtcgcccaggctgnagcgcagggncgcgatctcggctcactgcaagcttcgcctcccgggttcacgccattctcctgcctcagcctcctgagtagctgggactacaggcacccgcc

SEQ ID NO: 513879 - DNA, 679 bp, Homo sapiens
gaaattttatttcatgacagcaccatcttttctttgcctgcgcctgggcctcctagtgtgctgcttacgtgaagcccacgtgccacagagttattgcccgaagctgccaaagggctgagcaggggataggctcttccttacaaaaggtctggagactctgggaccatgcaaacgcgatagcctttatttcttcttaacatgcaatatgaggatacaaaactgcattggagggcaaggactttaaatccacaaaagtgtaatgtgccatgctggagtggccacaggaagtatcgagaatctacattgactcgtgtctttggacacatctgggccgcgcctcccgtgtttacgaaaaggagctctggtttaccgtggagcacaccagaatcgtaaaactctgtgattgaaagaggaaaactttggcacagactattatcattcagccttttatgatgggcggcccgctgaaccaatacagggggaactgatataataagggggccttcccgaccacttttttggtttcaatagatgatgcttgtcagcagaacattttttgttggatgcctgggggtgtccccccttcattggagaacccccgattataagaaggacccccgttttttttttttttggccgcccctttctaaaatttgttggccaacaaaacaccctgtgt

SEQ ID NO: 513880 - DNA, 252 bp, Homo sapiens
gtggagcagtgggacgaggtactaaatgtacgtgcataatgaacgtttaaattatatgatgatgaaaggccattaagtatacgagctggggtgtggtcaggagacacacatggctttaccagctgcttagattttatagcagcatgatgcacacgatacagtatatataggaatgtcgccataatagattacaattgctcagctgggaccatgtctttttcgtttgaatgtctctggtacctgattttgcgc

SEQ ID NO: 513881 - DNA, 178 bp, Homo sapiens
caaagacccctttcatttttttatttttgtggtactgagggccccaatcccttagggatgtaattttataggataaaccttttggccagttttttttatagtttaataagtaaaaagggtccttccaattatgataattgcctatggacatggattaatttaaaccctgcccccggga

SEQ ID NO: 513882 - DNA, 1282 bp, Homo sapiens
cagagtgaaactccgtgtcaaaaaaaaaaaaaaaaattggttactcatcctctctgaaagcaaaaagggaaaccctaacagctctgaactcgggtttaattttcctggctgtattggggtgaacttggtatgattaggcattaatgtgtttaacaaaaaaatattttttttggggtaggaaagtgcaacctccaaccagttaaagcaggttacgaaaaaagcctagccttcttctcagaagaaccgggggaaggcagagtttactacttagagggaagtgaagtcctgagtggaaactcatgcctgtgtcaaagttgaggctctgaaagccggaattgcccaaattaaaagaagttattatttttattctaaattctataagtgtgggttaaccatttttaatgccagctttaaaagtgactgtggtaattattttcccctcttggtttaagtgtgtatcgtgtgggatatttttcccttggaagtgaaagtgattggggctcaagtgaggccctctttgccacactctcccagaaaaattacgttgttgacgggctgtgacttttaaaagaaaacttatgtggtggttctggggctccactttatatttctctctcttaaaaatttatctctctcattgggccctgtgggcaaaactcagcctcttctcctcggtgggatatatacctgtggtcccataagcacatttattgtctaccctgtgggggaaaatgtggtctaacaccaaatttgtttgacggggcagggagcccaagaaaaaaaaatgtgtaggctctacatatattcttaacagacacagcgtgcctatctggggtgcccatattggggggcttacccagttgttttttaaccctctcttctttaagggacaaaaaagcgtcgttggcatgtatgaggtgggcaacacacacaacagcaatctccggggcttactcaccacggctaacttcctgtggctaaacaaaacaccctagttcctttaactctgtggttcttcaccaaaaatctgccgcgttgggcgctctcataataaattccccccaattatttatttccgttagaacaaacctaaataataactggggggtggggtggggggcgcctcgaatatttttgttaaaagcacccccccgtggaaaggatagtctccaaacgacacggtctgtaggaacgaccactcttggagaattttgtggtagaagccaccccttcaaagtcccttttctttcacacaaatggtgggcgaaagcactctttaata

SEQ ID NO: 513883 - DNA, 183 bp, Homo sapiens
gaggatccgtcgattgtgtcgcactattctgattttacggtcaccatgaagttcatattcttatcctaccaggcttcggaatcatctcccatattgtaacttactactccggaaaaaaagaaccatttaggatcaaatcaggtcatggtctcgagcctcatgcatatccacattggccttcca

SEQ ID NO: 513884 - DNA, 155 bp, Homo sapiens
tgcacgcgtcaccatctctcacactcgctggcagtcatctgcctctgagcgggaggggccgcgtgctctgctccagctcagctgcaccctggactggtccttcctcctctcacaagtccgttgcttccgagtccactggtggcggctggagaggg

SEQ ID NO: 513885 - DNA, 287 bp, Homo sapiens
ctagaggatccccaacgatggtccttacagctactcggaggctgaggcaggagaatctcttgtacctggggaggcggaggttgcagtgagctgagatcgtgacactgcactccagcctgggcgacagagcgagactccatctcaaaaaaaaaacagaaacagaaacagaaaaaaaaaaaaacgggggggggcagagccaaacctcatttaaaaaaggcttgaagctccggctcgtgggggggtcacactaggaagacacggggccacaaaatcaatattacggctct

SEQ ID NO: 513886 - DNA, 867 bp, Homo sapiens
cgtccgtcgtgcagcagcggggctgctatcccggctgagggcccgccgagcagtgagagtggctggcttcgcattaagcgggggcctttcctgaggacggcgtacggagtgtggggaatgaaggatggcagcatgccgtgcattacaagctgtgtggtagatctcagtggcacgcttcacattgacagatgcagactggtgccaggctgcgcaggaagctcttacaaggttacgtggtgctcgctgtaatcattaggtttgtgagcaatacaaccaaggagagcaagcgagacctgttagaaaggttgagaaacttggaattcgatatctctgaagatgacatatgtcatcagtctcgtgactgcagtcagaagtttactagagcggaaacaagtcagacccatgctgctagtggatgatcgggcactagctgatttcgccggaatacaaacaagtgatcctaatgctgtggtcatgggattggcaccagaaccatttccattatcaaattctgaatcaagcattccggttactcctggatggagcacctctgatagcaatccacaaagccaggtattacacgaggaaagatggcttagccctggggcctggtaccatgtgtgactgcttaagagtatgccacagattccaaagccacagtcgtggggaaaccagagaagacgttcctccactggaagcattgcggggtcactggtgtgaacctgaggagtgctgtcatgatcggagatgattgccggatgatgtcggtggggctcaaagatggtcggcatggctgggcatctttacacacgagtggggaaatatcgagcatccaggaggacaaatcatccacctccctacttaatt

SEQ ID NO: 513887 - DNA, 776 bp, Homo sapiens
acccaagaagctggagaacagacagaaaaactgctgaagtcaagcctgtcattgccacaactctgcatgttagtgaagacagccaacaagtttggaggaacatggcctctgtctcacttccatcttctaactcttcaactggctcattgtgaagattaaatgaaagagtaaatgttaaaaagtgtgggacagttcctagcacatagctggagatcagcaaatgttcacatgttggagagtggtaatgaagtaagaggatacagaagcaccaagggacactggtggatcacttgaccgcatcgtggataaggagtcccacctcctgatgatcaggagcaatgaccctgccaggatagtggctcctttccttgcctgctggtctcttggcctgaggactctacagtggctatagtagaacccctgagtttcactggccacatgaccagccagcaatgactacatttcccagccttccttgcaaaagctgcttcaagaggcagtaaatgatgctgagcttgacctagtgtggtgcaaggattgcaggctgggctgagctcgtgttctgtatgatctgggaagaaatggttgttggactcatattgagactgtaagaggaatctttaagaggaaaaaaaatatatatgttaaatcttttggaaagaggcagggtaaagctttggggggatttcagcacctggaattataaataaagaagatgcggcccgcttcctttaaggaggggtaattcatgatccccgcttactgactcggtgcgt

SEQ ID NO: 513888 - DNA, 946 bp, Homo sapiens
cccaccagcagctgatattcccagcagcttgaggattgtgcaatgtccctgaagaggggctctgagcagagcatcacagtttttcaccatggtccaccttctgagttgctcagatccacttgccaccatgtttgggcatgcccttctccagcattctggtttgtctcatttcctgaggagcttacaagagaaatgttgctagaataaactacagctgttgttgctgtagttgatcttaaggctgaaatgattatgtatcatgcccctctttagctacccattccagtatctcctcactttcaagcagcatctctactggtctacatggcttgcctgaaggggtgacccagatcctcatccctgtggggtgtgagccctatttctcaggccatgactgcttttctttcccatttactactaaaacaggatacagaagcaccaagggacactggtggatcacttgaccgcatcgtggataaggagtcccacctcctgatgatcaggagcaatgaccctgccaggatagtggctcctttccttgcctgctggtctcttggcctgaggactctacagtggctatagtagaacccctgagtttcactggccacatgaccagccagcaatgactacatttcccagccttccttgcaaaagctgcttcaagaggcagtaaatgatgctgagcttgacctagtgtggtgcaaggattgcaggctgggctgagctcgtgttctgtatgatctgggaagaaatggttgttggactcatattgagactgtaagaggaatctttaagaggaaaaaaaatatatatgttaaatcttttggaaagaggcagggtaaagctttggggggatttcagcacctggaattataaataaagaagatgcggcccgcttcctttaaggaggggtaattcatgatccccgcttactgactcggtgcgt

SEQ ID NO: 513889 - DNA, 241 bp, Homo sapiens
actcaggcaccaggtgggggtgtcctaagaataacctgatgaaccagggagagggtgcaggagccacctgcgaagactgggctttgtatgtcgtgtaaaaatgctggttacctgctgaccacactctacttctgctctcagcatcctgcattaaagatcatgtgattctcgacatactacttgggtctcatgtgcggaagagctctgtgaagtgaaccagcgggatgactatgagttgtga

SEQ ID NO: 513890 - DNA, 214 bp, Homo sapiens
agggaggctgagcgcaaaatactgtagatccagagactctagacgcaagctaactatagtggatgaataggtcagagcctccctgtgactcacaggtagcagctgtccaaaaacaacaggaacctctatataataaaggtgtacacaaagtatatagcaggactctaatgaatgtaaaatacggagaccagtgagtgccagtacgcagtgaacc

SEQ ID NO: 513891 - DNA, 765 bp, Homo sapiens
acacatcagagctcgctcagctgctgcccagcctcggctgtgatgataggctggctgggcagcacgtctctcccctacagggctccctgagaccaccaggaagagcccccaaccaatcttgggattctcccttcgtgcggttgtctgggacctttttccaggtcaaagcagatcgtgatgaggaagctgagatgccctgtatccaagcccaatatgggacaccagcaccgagtccgggaccccgtgaccacctggctaagcgatcgccctgacctcctgtagattctatcaagctcctaccatggacctggtcagccccgaggcacgcccccgcgtggtcccactgcccgactttgggacggaagatgctggggatgtacaggcagttctatcgaaactgcatctccgtgttctctggagcgtcatccgcaaagtgggcggagaagatccctggctttgctgacgcttgtcgaccggctgacctaggaccatgttgctgtgagtcggccttcctggcagctcgttcatcctccgcctggcgtacgggtctctagccctggcgagggctagctcatcttctgctctgtgccgtggtgctactgcggttgcagtgttgcccgtggtttcggggactggattgacaggtatcctgggccttgctcatcggtccctgggcagtttgttgtgtcccatgtcccctggctttagctggcctcttctgcccttggtctcatccccgatcgggggtgggctgctggatccgca

SEQ ID NO: 513892 - DNA, 300 bp, Homo sapiens
ccatgtccctccataccactcccaaaaattttcaccagcctaacacttcaccactgtttgttttgttggacttattaatataaagaagacaggaatgtcaggcctctgagcccaagcctgcacctgtacatccagatggactgaggaaactgcagaaccacaaaagaagtgaaaatggccagttcctgacttaactgatgacattaccttgtgaaattccttctcctggacaatgagtctcagaagttccccactgagcaccttgtgacccccacccctgcccgcaagagaacaaccccc

SEQ ID NO: 513893 - DNA, 154 bp, Homo sapiens
tactggaactcctctctccttccacttatttcctcaacttgttgctttacactagacacagtgcaatgatatgttttaaacacatccaaaacagatcatgccagatgagttgcctgtcataggctggagatagctcttattgccctggctggat

SEQ ID NO: 513894 - DNA, 250 bp, Homo sapiens
  misc_feature (4)..(4): n is a, c, g, or t
  misc_feature (9)..(9): n is a, c, g, or t
  misc_feature (11)..(11): n is a, c, g, or t
  misc_feature (152)..(152): n is a, c, g, or t
  misc_feature (202)..(202): n is a, c, g, or t
tcgncttgnangagcagatccctaaccatgagcaccagccaaccaggggcctgccatgccagggagctgcaagcgccccgccattctctacgcacttctgagctccagcctcaaggtgtcccccgaccccgtagccgctgcctatgtaggcnaaccggcccgtccagctatgtgcacctcatcgcacctgccgggagctttnggatgttctggccaagacagtgggctttcctcagggaacctgccatcc

SEQ ID NO: 513895 - DNA, 205 bp, Homo sapiens
cccaggagggaccacagtcagcgtgaagcagttattttctacgctacctgtgcgccataaggaatttcaaaggaatattaagaagacgtgcctgcttccccttcgccttctgccgtgattgtcagtttcctgaggcctccccagccatgcttcctgtacagcctgcagaactgtgagtcaattaaacctcttttcttcataaatt

SEQ ID NO: 513896 - DNA, 137 bp, Homo sapiens
gagtataggcagacacgatgggtcgtcgcgcacgtagggtgcgatcggccgattatctagagtcacaaagcgcgggccgccccgtctggcgagagggctgaccgggtgttttgatctgataaatgcacgcatctccc

SEQ ID NO: 513897 - DNA, 1336 bp, Homo sapiens
  misc_feature (653)..(653): n is a, c, g, or t
tccccccggttagggtactggcggccgtaaaactttgtttcactgggcaggcggtgcctctaatactggtgatgctagaggtgatgttttgggtaaaccaggcggggtaacaattggccgagtccctttatactttttttaaaccctttccttatagagcatgcctgtgtggggttagacagtgagggtaataatgaccttgtcgggtcagatgtgtacaatattgggcgctggtaacaattggtcccagtccagtggtttcaaatctggcaccgcaggctttatcgctggagagaaaattggtttcccatgtgttcaacctttatcacctaaacctattaaagttctatctaataagcggtgatcaaattgggtcccaaattgggcattgtagaagagactgctatccaacgtcacactcaacctgcgtctcggagagacttctcctccacaaggctaaagcgagcggttagttcagacccccttttagaaccacgccatacttccttcaacaattggcgtggccgccacgtctcctaacaaaggcccctaaccatagtgcgcgttctgtaccaccactctgattatacaactacctcctctcatcaaaccaaaggggtaattaatcaccccaaagagttatgctcccacanagaagaccgccatgagtaaccccatcaccttcttggggcgaccatacaaccaaagtaccaccaatattttataaacaacagcggggcgcagattttcaacaaaacgcgcgcggtacacctgaggatagagcaccacaacaatattaacaacaagaacatgagtatcaacgaaaccctacacacacagaagatctaccaaatctccaatttgagggacaacacaaacaacacgcaaaacgaacatatatacacaacacacacccacagaaggaccacccaggaagcaaaaagacagtctcaagtagtcgaccagccacccatcaaataacccacagtaaacaacaacacaatttcattagtccgccccgacaaataaacattgtaagtggccacacaacaaattagacacaacaggacgcgtattgattaggacaccacatattctagatagcagcagttgattacacacataatacagagccatttcaccacgtcaccggacatcactgagcggtaaatcacacgaggcagaggagacggatctatccattacaacagccatgatctggcagggatctaccactcacctacgtttgcgactaacaaagagaacatacaacatataccaatcatcagatgatcaagaaacatccaccaagatctaaatagtcgtcagacagaaa

SEQ ID NO: 513898 - DNA, 229 bp, Homo sapiens
gctcgacgggttggccagtgcatatcgaatcctggcattgtcatgggtgttgctggtcagttgggtccacatcttgtcgacgacccggcccgacttcttcctgagcaaaggtaaacaactcgggtgtatcgagcagaagctggagcctgggcattggcgagataggccgatcggaagcaatgtcggctccatgcagtagcattggtcttgaagggcaaaagcagcggcg

SEQ ID NO: 513899 - DNA, 455 bp, Homo sapiens
tatcatgcagatgaaacatccaggtagcaagcttcagagagaatagactgtgaatgttaatgccagagaggtataatgaagcatgtcccacctcccactttccatcatggcctgaaccctggaggaagaggaagtccattcagatagttgtggggggccttcgaattttcattttcatttacgttcttccccttctggccaagatttgccagaggcaacatcaaaaaccagcaaattttaattttgtcccacagcgttgctagggtggcatggctccccatctcgggtccatcctatacttccatgggactccctatggctgaaggccttatgagtcaaaggacttatagccaattgattgttctaggccaggtaagaatggatatggacatgcatttattacctcttaaaattattattttaagtaaaagccaataaacaaaaacgaaaaggca

SEQ ID NO: 513900 - DNA, 465 bp, Homo sapiens
catgacttatggcaggatcatcatgtcgtcgactctcaccaactaagattaatgagacgtggcggagacttagccacacgcctgtatgagcacaagtatggtgcggcgccccgtgttcgcctcagtggtcatgtggctgcccggtgccccatcatcgctatgccactggactacatcctggcggatctgcgcacgaatgcaatgagagccacaatggacagtcacctagacgctccctacaatgtcccagatgtggtcatcacgcagtcgccgagcaatgatgtcgatctgatcatcaggatctccgagcgtgagtgtaggattcgctcatgaagatctggagcgggtctgtggactaccatttcactactgcgtgagggccagcacacaggacccccggctcagacccatctttgggcgtctggacatgcatagttggcgccccagtccgcgaccttgatgggg

SEQ ID NO: 513901 - DNA, 110 bp, Homo sapiens
ctagcgggaaggcgtggcttatggggcctgcagcacacagtgtaaagtgagcccacactagtgatagtgagtggcagacacacagtgatgtgttcttgtgtatacggtgg

SEQ ID NO: 513902 - DNA, 586 bp, Homo sapiens
ggaaaatttcgtctgttctagaaacatatgttttatttgcacagtcgtgatttgctattgagaatgcaatccatttaggcgatgggcgatagattactgtcgccgggaaattagtcacttttttgaaacctaaagtgactgccaatggcactcagtgtaatgacagggattggtaaatattgggaaaatactcatactcattgcgatgattataaacgcacttattaactcacggcattcttggatggtgtccaaagatgcaatcagagtttacatgatcaacatttatgggttatactagttgaagtatgtctctctccatctgtcattacaatgacacaggtatattgtagcatgagctcctgggccccaagttagtactgatgcagtaactttaggaaagatattctgggctaacgtgttagtgtcctatgaacccaataatctttccactagatttagaacatgcgtggactttacagcttgagcttttctaagagcatcaagttgctcacgtttcaagatttaatatacttggggacacaacatgcatttccgtacctacccttgggttctgctgttgtcg

SEQ ID NO: 513903 - DNA, 375 bp, Homo sapiens
agaggctgaggacagatgaatatggcacatgcccaggatagccaagtgaggctccaaatctttcccatgtaaacacagcctggagttgactggggatagccatgaatactatactttgggtggtgctagggcagggcctcacaccatagatactgaataccctgagccttagggacaggagaggtcacttaggatggcagtggatctccatctgatgagcacactgccaccttcattgccatcctaatattgatgcccagtccttcctacttaccttccacttgccactcagctgtgcaccagcgtgaagtgttccagaccaacctttgctgactaggaacctaaattagtgtaaggtacatggggaaagctctc

SEQ ID NO: 513904 - DNA, 567 bp, Homo sapiens
tagttgactctacaggatcttcacactggttcgagtactaccatatgttaaaacaaatatatacttttttaagacaggtctcactctgtcacacaggctgagtcaatggtgtgatctcgcccactgaactctgattccatgctcaaatgatcctcccaagtagctgggattacaggtatgcgctatgacatctggctactttttgtattttatgtagagacagggtttcactatgttgtccaggctggtctccaactcctggactcaagcaatctgcctgcatcagccttccaaagtgctcagattacaggcgtgacccatcgggcccagccaggattttgataaatacgatcaccatatatattattgtaagtgccagtgtctatcgatatctctcacaatttaaaatgattaagcattacgccaaggggtaaatacaatacacattttactttctacctgtttgaaatccagcactgcgtggttcaacggacagagtgagccgagagacagggctgaatcccttaatacctggaccccagtgagggagcttgtgtcacactgggc

SEQ ID NO: 513905 - DNA, 126 bp, Homo sapiens
gctataaggccactgactaggcagaggtagtatattagatgcgcacatgtgcccaaaggcattctagggcaaataggagctttcaaagggtacactaagggtctcagctctagtctctcacgacga

SEQ ID NO: 513906 - DNA, 129 bp, Homo sapiens
ccccgggaaaaaaaaatttggaaaaacctttttttttttcaaaattttttttggggggggggggggttttttttattaggccttttttggggtgtgggggggggaaaaaaaaccttggggcctttccca

SEQ ID NO: 513907 - DNA, 832 bp, Homo sapiens
  misc_feature (13)..(13): n is a, c, g, or t
  misc_feature (44)..(44): n is a, c, g, or t
  misc_feature (51)..(51): n is a, c, g, or t
  misc_feature (55)..(55): n is a, c, g, or t
  misc_feature (59)..(59): n is a, c, g, or t
  misc_feature (110)..(110): n is a, c, g, or t
  misc_feature (113)..(113): n is a, c, g, or t
  misc_feature (129)..(129): n is a, c, g, or t
  misc_feature (156)..(156): n is a, c, g, or t
  misc_feature (197)..(197): n is a, c, g, or t
  misc_feature (217)..(217): n is a, c, g, or t
  misc_feature (237)..(237): n is a, c, g, or t
  misc_feature (241)..(241): n is a, c, g, or t
  misc_feature (273)..(276): n is a, c, g, or t
  misc_feature (280)..(280): n is a, c, g, or t
  misc_feature (286)..(286): n is a, c, g, or t
  misc_feature (289)..(289): n is a, c, g, or t
  misc_feature (340)..(340): n is a, c, g, or t
  misc_feature (370)..(370): n is a, c, g, or t
  misc_feature (386)..(388): n is a, c, g, or t
  misc_feature (394)..(394): n is a, c, g, or t
  misc_feature (467)..(467): n is a, c, g, or t
  misc_feature (518)..(518): n is a, c, g, or t
  misc_feature (523)..(523): n is a, c, g, or t
  misc_feature (529)..(530): n is a, c, g, or t
  misc_feature (586)..(586): n is a, c, g, or t
  misc_feature (640)..(640): n is a, c, g, or t
  misc_feature (821)..(821): n is a, c, g, or t
taaaagcgaactnctgacacccttaaaacagaaaacattgttanttcacantaantaantgtggggctctgtctctgccgacaggggctgggttcgggattagctgtgcngtngacaattgccccattnatcccattcataaatgctgctgctacnggaagggaacagcggctctcccagagagggatccacctggnacacgagttacctccaaagngctgcgattgtttgagaatntgcnaagaggaaaaccactcaatgggacctggatannnnaggntcgggngtnatagctgggtgtggtacttcagggccctgggcaccctgttgatcacgagcntcccgtcatagctcagggtggcaaactgcnacgggttagctgaggnnnagttcncggcatagacgctgtcctcgtgctcctcgtaggtggcgatcacgttgtcctgcaggggctccttgctcttctnttcagaacggtggtcctcctggtcactgatgtcatcgtcgtctactaagtngtcgntggttnngttgagatggacaccatgttggaaaggatgattctgctgttactgttgttcgtgangttcagctggtcatgagagtggttgtagcggacgttccacacccagtgggagtnctcctccagggtcttcacgggttcggtgacatttcgggtgtcccagaacttcaccttacagtcgtctccgcagctggccaagtagtactgcttattgggattaaagtcaaggtcccgcaccagctgtccgtgggcattctctatgcagtagatctggctcatgctccgggtgtccagccangttgggggtgt

SEQ ID NO: 513908 - DNA, 375 bp, Homo sapiens
atgataaaatattttcttaaaatgtttaaaacaggccatgcgcagtggctcatgtttgtaatcccaacactttgggaggtcaaggcgggtggatcgcttgagcccaagtgtttgagaccttgtgatccacccaacttggcctcccaaaatgctaggattacaggtgtgagccaccacacccagctaattttgtatgtttatttttattttttgagatggagtcttgctctgtcgcccaggctggagtgcagtggcacgatctcggctcactgcaacctccatctcccaggttcaaacaattctcctgcctcagcctcccaaggtgttgggattgtagacgtgagccaccgtgcccggccagctatgggcgtcttt

SEQ ID NO: 513909 - DNA, 552 bp, Homo sapiens
  misc_feature (33)..(33): n is a, c, g, or t
  misc_feature (90)..(90): n is a, c, g, or t
  misc_feature (395)..(395): n is a, c, g, or t
  misc_feature (502)..(502): n is a, c, g, or t
  misc_feature (509)..(509): n is a, c, g, or t
gtgagtaaactcaaaaactgacactcgattcanctattggaaagtttttttaatgtggttggaacactgaggtatgtgaatctacttttncaactgtaaattttatgaaatctaaatactgatcaagtcccaggcatgggtggctcatgcctattatcccagcactttgggaggctgaggcaggaggattgcttgaggtgaggcgtctgagaccagcctggtcaacacagtgagaccccatctgtacaaaaaattaaaaaattagccagatgtggcctggcgcggtggcttacacctgtaatcccagcactttgggaggccgaggcaggtggatcacgaggtcaagagatcgagaccatcctggctaacacagtgaaccccgtctctactaagantacagagaattagctgggcgtggtggcagacacctgtggtcccagctacttgggaggctgaggcaggagaatgcatgaacccaagaggccgagcttgcagtgagttnaaatcgngccactgcacttcagcctgggcgacagagcaagactctgtttc

SEQ ID NO: 513910 - DNA, 155 bp, Homo sapiens
atgtctgcatgctattttgggagctggatggtgccccaggaacagggagaggagtccaagctgctctgtcctccaatgaggcccagcaccatgcccagtggctctgaactggtggagggcagagtaggagaggagagagaaagctagaagctatg

SEQ ID NO: 513911 - DNA, 159 bp, Homo sapiens
gtggtaacgccactgaactctagcggggtgacagagcaagaccctatctcaaaacaaacaaacaaacaaaaacaaattaattgcaatataaaatagtaaaataggtgtaaaagaagccaacagagttagagggtaaagagacagatcataggggagggg

SEQ ID NO: 513912 - DNA, 1054 bp, Homo sapiens
gtgtggtggcgcacgcccatagtcccagctactcaggaggctgaggcaggagaatcacttgaacccaggaggcggaggttgcagtgagccgagatggtcccattgcactccagcctgggcaacaagagcgaaattccatctaaaaaaaaaaagaaaaaaagaaagaaaatgcccaagtactaactaaatcccagatgctatgctaagtactttaagcagtccattcatttaatccaccctccgaggaagtcttataatcccctccgtcacgcgccccagtttaagagagccctcccacaatggccacaacggtggcctgggctgatatgctccccggttcccgggagttcaaatactcccgatcgaagtcgtcccggctttgcgttcaaatcacacgcataggcaatgaattagccgccacttcaggagctcccctaacggtctggggccttctgaactagcgggtggttaccgcctcagccgaagaaagcagctcggagcgacaagtgaagaagtcccccagtccctaagaatataaggaaaagagacaacatttattgaggaccccaagagtgcaaagtggcaacatttcacaacgcgacaagggttaatacccactagacccacttcatacaacacacaaatacatagtccctgcagacatccatatctgtacggcctaagcacgaaccacatgtcctagaactacaacagagctccattaagaaaagagaagagtgcagcaaacaaccatataccattagcaccaagctgacgataagcaccacccaaaaccacataacatagactcacagaataacaactccactacctccctaacaatatacacaagcacatgcctaatcagtaattacatattaacaagtatcatttccaatgtctaacagcacaatatctccgaattcacatgataagttaataacaacgaaccaatgaatatcactcataacaccacatcaacacacgccaacacccaggtgataccacagaataaacaattcacaccacaccagactcgtatcaaatctactcc

SEQ ID NO: 513913 - DNA, 593 bp, Homo sapiens
agcggaactggcaaatcaatgacttaagagtagctttctcccagcctccccgctggctctggagtatagagggaagccagccttttcctccccactgctcctctcttcatgcttcccctccactctcctcctgaaccctggcctggccactcctgcttttcacttctctccacgtcctcttcggaccccgccaccgacggaacatccatccactcactctatatggtgccaggacaccacatatccgcatgcgcgccggcggaagtaaacacagtagcagaagttgcaggcagatatctagggtcctgaccccaggcaaggaattccccctctgtcctgagcggcgagagcgaaatgcgagaggcggcaccaccgagtgaagtacaatccgtgagagtggaggcttaggtcgaaggaagcccgccaacgggaccacagtgggtcaggcgcctgtcattctactcaacaccggggtaaccgagaggagaaggcatcggcgggcactttgggggaagaccaaagaaatctctacctacgaaagccgaagcggtaagtgacaaaaagctagcacgaggccacagatgcataactgg

SEQ ID NO: 513914 - DNA, 815 bp, Homo sapiens
cgggtccttttgagggcccagggccgtaagctgggacagaggatgctgctgctacctcgcagtcggacaatgccacggagaagaacgcaggaccacagggggaatctcccagaggcccgaatcctacgaggagacacgtcaacggcagactgccaccgagactcctccgcgtcccacgacaactgccccagctggaggccacaaagcccgtagccagcagccaggcttcccccagatgaagaatgaggagaccgtgcgaactgacgggaaccagtgtccgcacagcatcacacgtctaagcggctacagcacttacgatgaccggcagctcggccagccagtcttacccagtcgcgacgtgaccagaccctcagggagtcagggcacgggaggcccgtatctcccatccggtggaacccgccccattggccaccccatgctgctgcagcctgggtctgcatgctcgtagcacaccagaggcatgaacaggaccacgtgctacagaaggtgcagagggtctggagcagaggaagggaccacagtcccctgcgcatgcccctgagcacattctaggagactgcgtcctgtcctatcgtgctcacacatcacccttcctgcccgatcggagctgcttctgctgcaatggggcatatggactgacccacctcctgggtgagaaccttgcccctagggctctgtgcagaagggctactgccccttaggcctcagctgggggaaaggcagttctggtgctgtagaggacctggtgcagaaagtgggactcttttttcctaagtacttcagcgcaggctgat

SEQ ID NO: 513915 - DNA, 320 bp, Homo sapiens
  misc_feature (216)..(216): n is a, c, g, or t
  misc_feature (261)..(261): n is a, c, g, or t
tcagaaggctggtagatggcagatgtgtgttggagagtctagagggatgaggtggtgggaaggtgagagacaagaagacagcgggataacccctgaaggatgtgatcatcgcagactgggcaagatcgaggtgaagaagccttttgccatcgccagggagtaggggacagggacatctttctttgagtgacggtctgtggcaggcctgtagtccgncacagggctctgagctgcactggcccgggtgctggcatctggtgnagcggaccactcgcctcacattccacagggccatggactcactttcgtaaaaaactcct

SEQ ID NO: 513916 - DNA, 908 bp, Homo sapiens
  misc_feature (30)..(30): n is a, c, g, or t
  misc_feature (62)..(62): n is a, c, g, or t
  misc_feature (92)..(92): n is a, c, g, or t
  misc_feature (102)..(102): n is a, c, g, or t
  misc_feature (114)..(114): n is a, c, g, or t
  misc_feature (134)..(134): n is a, c, g, or t
  misc_feature (138)..(138): n is a, c, g, or t
  misc_feature (159)..(159): n is a, c, g, or t
  misc_feature (162)..(162): n is a, c, g, or t
  misc_feature (177)..(177): n is a, c, g, or t
  misc_feature (190)..(190): n is a, c, g, or t
  misc_feature (193)..(193): n is a, c, g, or t
  misc_feature (202)..(202): n is a, c, g, or t
  misc_feature (207)..(207): n is a, c, g, or t
  misc_feature (222)..(223): n is a, c, g, or t
  misc_feature (254)..(254): n is a, c, g, or t
  misc_feature (268)..(269): n is a, c, g, or t
  misc_feature (271)..(271): n is a, c, g, or t
  misc_feature (278)..(278): n is a, c, g, or t
  misc_feature (280)..(280): n is a, c, g, or t
  misc_feature (289)..(289): n is a, c, g, or t
  misc_feature (294)..(294): n is a, c, g, or t
  misc_feature (297)..(298): n is a, c, g, or t
  misc_feature (311)..(311): n is a, c, g, or t
  misc_feature (318)..(318): n is a, c, g, or t
  misc_feature (320)..(320): n is a, c, g, or t
  misc_feature (322)..(322): n is a, c, g, or t
  misc_feature (326)..(326): n is a, c, g, or t
  misc_feature (328)..(328): n is a, c, g, or t
  misc_feature (330)..(332): n is a, c, g, or t
  misc_feature (357)..(357): n is a, c, g, or t
  misc_feature (372)..(373): n is a, c, g, or t
  misc_feature (387)..(387): n is a, c, g, or t
  misc_feature (390)..(390): n is a, c, g, or t
  misc_feature (405)..(405): n is a, c, g, or t
  misc_feature (414)..(414): n is a, c, g, or t
  misc_feature (431)..(431): n is a, c, g, or t
  misc_feature (443)..(443): n is a, c, g, or t
  misc_feature (530)..(530): n is a, c, g, or t
  misc_feature (558)..(558): n is a, c, g, or t
  misc_feature (891)..(891): n is a, c, g, or t
ttcacagattcataattgtattaaggggtncaatatctacatttagaaaacaaagtattgtnctcaatcactgaaatgcttaaatgcttgantcttcaaggnatcttctcggcngtaaagacttgagaagcttntctnctggcttgtttctcctctagnganagagcaccctctacngccaatatctggnatngcttatgtnttaantttcccatagatttnngagggggcttgggactgcgagcctctatgtnttgctttaataatnncngcgttgngnggggggggnatccnggnncaagtattagtgngcataangngngggntngnnnctcttcaattccaataacagtgcgnctgggaccttgaggnngaagatagataggnggnttagatgtacacacnacctttggnctcccttctccctctgnagaataatagtncaatatccattcaaataagcgagggtgtgtacccaaaggaccagttgatttgtgaaaatcaacaatatgacactttacccttagggnggtcaggagtatatatacttcacatgcnccaatccaggcctttgttccctgtaacctgttattaagttgagaggccccctgaggatcaaaaccttccttccatgcatcttcaatcatagattgaatttttggaatgcaaggaatcaacataccttttaagcaatcgttgtaagcatcattttgtaataatgatgaaagtagcatttggaaatttctgtaaccacaaccccaacctttgtcgcctaaagatgaatgaaagtgatccaccactgaagaaagccacacccgtctcacatctgtggcagcattctgataatacctatgaagtgcttcaataattccggaagtttttgtttttccncgtcaaaacaagagcta

SEQ ID NO: 513917 - DNA, 176 bp, Homo sapiens
tcttttcataaactttactcttttgtagaatttgcgtaaggcaggatacagtagccttggcccaggtatagtatggttttttctttgttcaagtgtaccaaccaaccaattctagccacacgaatagttaggaaaaattgccaaagtgggaattgttaacctctatcaataggaga

SEQ ID NO: 513918 - DNA, 169 bp, Homo sapiens
ggaattcatcaggtgatgttaaaagtcactggccggctgttgagaatcacgcctgtaatcctagcatttgggaggccgaggcgggcagatcacttgaggtcaggagttccagaccaacctggccaacatggtgaaaccccatctttactacaaatgcaaaaattagctg

SEQ ID NO: 513919 - DNA, 330 bp, Homo sapiens
ctctctgtcattccaatctgatcatttagcttcctcctcctagtccagtactcccatgcaacagcgccacttggcagactctcttctatccgttctttctttatttaattttagtttaatttaatttaatattttgtaaagatgagttttcactttgttgctcagtctggtctccaactcctggctccaagtgattctcctgtctcagactcccagagtgctgggattataggtgtgaggcaccacacccagtctctcccttctttttctattaacaataacattatattgaatttaattaggaacatatgaatatatatatttttttgg

SEQ ID NO: 513920 - DNA, 713 bp, Homo sapiens
catcccttgcctaaaatagaagtatctgagtctgtagaatatgaggcaggacatataccatcaccagtgattccccaagagagttctgttgagatcgataagtgaaacagaacaaaagtctgagagctttagttctatagagaaaccgatctattacctatgaagacaaagtaaagttaatgaggttcaatggcataatgattatcacaacagaagcatgtgaactccgatgcaacattttcaacaatagcgtgtcgtgaatacaatagtgcgcacgcaataatatacagacactgtacccgacaatgaagatggggaagccaaaatgaagtatacgctgacacagcaaagcaaactttgatttctgttgtggattcttcttcattaccgtgaagtcaaagaagaagaacacgtctccagaagatgcccttttgagaagggttacagaggacagctacagattgttatgctgcacattgcaacaattctacagcatctaggatatgctaatggaaatcttgtacatggatcaaagcaaaaggagtcagtgatctatgagacttaataatcgtattaaagccttagaagttaacatgtctctcagtggtcgctatctggaggagcttagccaagaggtaccgaaaacaaatggaagaacatgcaaaggcctttcaataaaacaatcgtgacacttcagaatacttcaagcaata

SEQ ID NO: 513921 - DNA, 916 bp, Homo sapiens
ccggctacagcgggtggggctcccccctctcttattactttctggtcgtcctcctttgcggggagtacacgaatgtagtgtgggtgggtctctctccgccccgccccctcctttgggggctagctcgtcgcccgcctcttgttttcgctcggcagaagtagtttgtgctcccctcctactttatgttgtgttccacaactcccactcctctctgtgtgtgttggtcggtgtgatgttctcgctctctctacaagatagagagatagagagatgaagtcagttctttctctcggcggggagagtattttttattcttttggggtgcgctgctcttgtttttgagagtgaaccttcccccccccccccgtgggggttaaagattcttcttgtcggttgatctctgtcgttggtcgcttggttggttattattcccccgcgcgcggggcggcacgccctccctcttccatcttctgttcgttgtcgtgcgtgccgagttgattatatttgcgtggcgatgacgtcgtcctcacccccccgcggcggcggtcttctcacctcgccccgtctttcgtcgtggaaactagtgggtcggcgcacgcccccctgcgctgcgtgaggctcccctctctcttctgcttgttctttctgttgagggcgggtggaggtatttctctccgcctccgtctatatcacctgcgccaccgcgcggcgggttgttcacaattgagttttccttcccctcccccgggcagctagtatttttctcttcctgcccccccgtggtcgtttgcgcgctctcgtccgttcccaattttttcccccaaagggcccccccctttttttttttgtggggggggccctctcttcttctctgtgtgtgtgtgtgcccccccaaatcgggggcccccccgttgta

SEQ ID NO: 513922 - DNA, 846 bp, Homo sapiens
ggggacaaccgtgctgggtgtcccaggctgaggaggaggtactccgtgacaccttccctttcggccttgaggttcccagcctggtgtccccaggacgtccggtcgcatggagagtgtacggacgacgcctatgaagcccttagtccttctagtttgcgcttagcatatggaccttcgtctgtgccggctttatccgagcataactgtgacacctgatgacagagcaaaacttgaatcattatatacaagtttagagaacctagtacgaagtgtccctcgtgggagagcccaggtcgtgagaaaaaaatctaactctacaaaaacatgtttatcatatagcatcaaatgggatcaaaatttacggagctaggttacacatggagaggcttaccaatgagaaatgcatgtttaagcaaatcctatcagtgaagaaactagaattttccctacaggaggtacacacaccggaaatagggaaagaaaaacacaagggaaagtacccatgctggtcgatcaaacaaaaaatggttccattgtttgatgcagagaacttattgaaatgaagagcagagcaagagcgggagaatgtgcaaaaagagtggggaccaagaatgttgccagtggttactgcatcattacaagtccattgtgtacctcatacaagtcacgtgtaacattagatacgaggagggggtgggatcctaagacagagattctagataagtgacggggtaaaccggagagtggagtccaggtggaagggcttgaaattagattatcagggagatttggcgcgcccttaaaatggttaaaaagagtgtagggagaaatgttgtgggaatgtgt

SEQ ID NO: 513923 - DNA, 240 bp, Homo sapiens
gctggtgatctctacaggatcccccagcaagaatggcattcagtagccattttaacggaatcagaacactttgggtacatgctgctatcagcccgtcagctcgtcttccttgttttttgtcaacattggctttccagataaagtaccaatgtcctctatttttgtccgtggaagaacttttgaatactttcaacgtgcttatttttattatcacctgctcgtaccctattgtactaattt

SEQ ID NO: 513924 - DNA, 142 bp, Homo sapiens
actttgagtatgggaaggcatcaacacacttgggcaccaatatacggtggaggtcaaggagatcatagacgagaaaatctacaaaagtgatcttgtctgctgccaaaccatggccgcttaaactcgccccgcttaaactaca

SEQ ID NO: 513925 - DNA, 401 bp, Homo sapiens
tcgacggtaccaacaaataatagctgacaagttgatagccagaaaacggcaaagctgggatgcaaacccaagcagtctgactcccaagcctcttaacattcttaagagaacaactaacttcaatcctccttcgaacacatgtttttcctgtttgccacctgaatacgtggaaccaccatccacccagctggttaaaccagaatcactcagaaatctacctctccttcatattattcataactgccagtgttaaaattctaattgctggccaggcacggtggctcatgccagtaatcctagaactttgggaggccgcggcaggtggatcacgaggtcaggagatcgagaccatcctggctaacatggtgaaaccctgtctctactaaaaatacaaaaaaaat

SEQ ID NO: 513926 - DNA, 252 bp, Homo sapiens
tttatattttgccattctgggtagaagttatgttagttattatattacatgtagtaatctaaggtaataattccctttaggtgttatgggcataaagaaaacatggaaatgggagtgcagtggcagacaggggccttttcctttctggtatccaattgccctttgcataacgaagttagataatactgataggcaaatctgatattagatcctgcattaagacaggcagcttagattagccataaaaaaacg

SEQ ID NO: 513927 - DNA, 776 bp, Homo sapiens
gggaaccaaaacggccatggcagcagcggaggaggaggacgggggccccgaaggggccaaatcgcgaagcggggcggggcagggcgcgaccttcgaatgtaactatatgttgggagaatgcttcgggaagcatgtggtcagtgtgtgtggcgcaccaagatacacttgtatggaccatggtcatttcatccagattggatgggaggaccacgggccacgacccggggccacgaagtgtccacagtattgtacaacgctggagaatcagcacgaggacgaacggtaggtcccagacatattatgcggcgaagggagaaggcccaggaagaccccaaagggaatccacagcaattaaaaaacgtccaaacacacggacccaacagggtaccaaggaggagcacactaccggagcagcaaagagagagaactaccacggcacattacggacgaataccggtggtgcaatacacagcgttcctacactagagaagatagcgaagcatatacaccaccttatgcacattatacacaaccaaccgggcatataaaaggtgacacaattgaaagccacattgacccggacagggggtaccagatagtgatgcgcatcctggaacaacaaggggtcaacacaaagagcatcccatggctgggccacgggaatgcacactccttacacatgtaaactgtcgccaaagaaatactcgcataacgaaagaggcacgtgcctcaagacataatgacgctaatagtctcgaacccatgccaatcttaca

SEQ ID NO: 513928 - DNA, 739 bp, Homo sapiens
tgggccgagccgccgtcgcccgcgtgcaccgtgtccccaaggcccagacagcggggcgggggtctatcaggcgcgggactggcttctctcaggccgacccttctagccgggctccggatcttcctcggcctcgggcccccttcacgttcaggacggaggccggagaacggtgatcatcacacaccccagccggcttcctggccagggcattttctctgcggccaagcagtgttgggattgtagctgctgggagccccctcctggcgcgacttttctggcagggagggactggcggcggcttccactcttttctatactctgcatctccacactctcttcccattcaagaacgagtttctcttccctctccattggaaatcctgctccggaggtccaaaacacgtattttaagcgtgcccttcctcacctcctggagcacccttagaagtattgcctacttatccgggctgagaatccttcatttttgacctggcttttttttcgccctttgggagatacaaggtccctctccaccctctactaacactctgcacccaaggtcttatcctttggggtcaccagctcctttgggcccaattttttcccttaaattggtttgaaattctccccccaaaccatctgagttccagttccctctgggctcccaatctccagtccctggcggatctggtcagtccaccctaggtggggagtgaccagggctctggcccaggatccg

SEQ ID NO: 513929 - DNA, 190 bp, Homo sapiens
aactcattgaattcttttcccgagaggctggacaatgtttaaaggacaaactttgccaggtaaggcgaaccagatcttttgttgaccatgcccctgccacatatcggatgttggagctatgacccactgagccaggcccacactggctttatggtatcaccccaggaggggaaaatggtggccaatcctt

SEQ ID NO: 513930 - DNA, 155 bp, Homo sapiens
gggggggggccccccccctttttggggggaaaaaaattctttttgggggtttttttaaaaattatggcccccttcccccgggggggggtttttttggggggcccccccccctttttttttttttttttttttttttggggggtttttttttttta

SEQ ID NO: 513931 - DNA, 126 bp, Homo sapiens
tcttggtgcatagctgtctccagagtataccaccgggtgggacgtacggaatgttatagaaaaaatagagctactgatagttacatctgacatatttatataggacataaattagggaggtgcact

SEQ ID NO: 513932 - DNA, 1339 bp, Homo sapiens
ataaaccgaaacttctctgccttcccgctgcaagagtgaatgagcgatccctctcaactgactcaaaatgtttgcctcacccaggagggctccctatgcctctccttttttcctttcatctgcattattcccgttgccaaaatctggagcctggtaaaggcccagtagcggtggcaacaatagagctgtgtgtcaccccagtgagctgaaagagcagacatcaagctctatgccagagaacagtggggcatccccaaggtcctgctggaaggcagctctgatctggaactgggaaggacaacacacagtcaagctctttctcgtctcagagaatccagcagaatcttcagggatccttccagaccaggaagactctcacactctgcagagaagttgcggcttgtttagcatttgacctacattcagaaacgaccagcctcccaactttcagctctaaggattacttaaaaaaacaaatggtgttcattctcagatatcttgcctttctcaggagagaaaaatgaagcttgcaattagccagcaaactagcacatacacaaacacacacacacgtacatacactccaacacagggagcaatgtggtatgttgttgaccagctggaagttaggatctcaaaggaaagaacaggataacttaagaggcacttctgggactgcagagctgagctggtggttctgaagagccatcggagtgtgggttcaggcagcttccctaattcagaagcagccccaagtgaatagatgacaaagaagtggatgtgaacatgacagaaaaagccagtcatggcttagaataaattttattattgttctttaaaaaaaaaaaaaaaaaaaaaaaaaaaaaaaaaaaaaaaaaaaaaaaaaaaaaaaaaaaaaaaaaaaagggggggggccggcccaaaaaaacccccgagaggggggcccaaattatcacagaaccaccaataattgcactaaacacagggggcccacaaaaggagggagcactataaacaacacaaaagaaacggggcagcatattaaaacaaacgcacaagagagagagaaaaacgagggccacaggtcaggacaacctgctgtgagagaaacaaccacacacgcggggggagcaaacaaacaaaagagaagcacaacaaacagcccccccacacaagagattgacaaccccctcgcagggacgaaacacaacaccccgcgcgaggcgactaacagggggcgaaaacaccagcacgcgacaaaataacagccgccgccacgaagaaaaatcgcagcccccatacaggagccatagatgacacacaacacacattacagcga

SEQ ID NO: 513933 - DNA, 952 bp, Homo sapiens
gaccgcgtccgccccgcgatgcacagagcctcgcctttgccgatctgccgcccgtccacacccgccgccagctcaccatgaaatgatgatatcgccgcgctcgtcgtcgcacaagcggctccgtgcgagtgctgcaaggccggcttcgtcggtgcgacgtatgctcccccagggccgatcttcccctcccatctgtggggctgctcccaggcacgcaagggcgtgatggtgggcttgggtccgacaggattcctatgtgggctacgaggcctagagcaaggagaggcatcctcaccctgaaggtaccccactctgacgtcacggcatctgtcgaccaacctggtgtaccgacagtggcacgaaagatctggactaccacatgcttctacatattgagcatgcgtgtggttcccgaggtgagcaccccgatgtcgtgctgaccgaggtcgccccatgaacgcccaaggtccaagccgtggagaagatgaactcatgatcatgtttgagaccttcaacaccctcagcctatgtacgttgctatccaggctgtgctatcccttgtacgcctctggcccgttaccactggctatcgtgatggaactccgtttgaacggggatcacccgcactgttgccctgtcttacgaggggttatgcccttgccccatgtccatgcctgcgtctggaccttggcgtggcccgggacccttgacttgatgtaccctcgtgaccggatcctcgaccgatgcgcgtggctacctgcttcgagcaccctatggccgatgccgggaaaaattcgttgcagttaccattaaacggtagaaagcttgtgcctaacgttcgaaccccttgttactttcgtaggcaacgacgatgtggccacggcttgctttccaggtccttcccttggagcacagaccttaggaagctagccttaagggcaaggtgatcacc

SEQ ID NO: 513934 - DNA, 143 bp, Homo sapiens
ataaaccgaaacttctctgccttcccgctgcaagagtgaatgagcgatccctctcaactgactcaaaatgtttgcctcacccaggagatggagctctcgaaggccttctttggccagaggaaccaaccttccgcctttaatta

SEQ ID NO: 513935 - DNA, 453 bp, Homo sapiens
  misc_feature (337)..(337): n is a, c, g, or t
  misc_feature (352)..(352): n is a, c, g, or t
  misc_feature (378)..(378): n is a, c, g, or t
tgcttgagttttgcacttggaagaaccctgcaccggttggcgtgtgcgacggcccagtcccatccagagcatggagcccgaccccagccagcgccttccactccatcatttcatttcacacccccgaagggaggggaggccaggaggggagctgctcctgccagaagctggtgggtgaccgttgggaatcggccacacctggtgtccatgggcagcctggtgcaattccattcatttgtacagaaacatttttgaaaaattcttttcaataagatgcaaaatcttccaacttttcaacccaagtgaagaaaaattgaatttgtttcaaaattcccgnaaacgggtaagttcnaaaagtttatatccagaaaaaaagtnaaacagtgctgttagtaatttcttgtggatttcattgttttgccttcaaataaagcaaattttaaaaaaaaaaaa

SEQ ID NO: 513936 - DNA, 209 bp, Homo sapiens
gagcgcgatgctgtgtttgcactccattcagagaattacatgggacacactcttttgtcgattcagcaaatagtaaaatttattattgcattcattatataagttttattagataatgaaaaaagaagaaaatgctccagtgtgatttataactctacacatggagtcgccctctgtcgtcgtgggatccctctatgagtcgcacctgc

SEQ ID NO: 513937 - DNA, 559 bp, Homo sapiens
  misc_feature (5)..(5): n is a, c, g, or t
  misc_feature (10)..(11): n is a, c, g, or t
  misc_feature (16)..(17): n is a, c, g, or t
  misc_feature (19)..(19): n is a, c, g, or t
  misc_feature (22)..(23): n is a, c, g, or t
  misc_feature (28)..(28): n is a, c, g, or t
  misc_feature (33)..(33): n is a, c, g, or t
  misc_feature (54)..(54): n is a, c, g, or t
  misc_feature (58)..(59): n is a, c, g, or t
  misc_feature (61)..(61): n is a, c, g, or t
  misc_feature (82)..(82): n is a, c, g, or t
  misc_feature (145)..(145): n is a, c, g, or t
  misc_feature (156)..(156): n is a, c, g, or t
  misc_feature (162)..(162): n is a, c, g, or t
  misc_feature (209)..(209): n is a, c, g, or t
  misc_feature (225)..(225): n is a, c, g, or t
gtacnacagnnggctnncntgnnatgangtcangaggcatgtggcacaagtgtngtcnnangggtacctcctgattcccaanttctctcaatgaacaatatgctgctactgactggacgtacctggaagggagctattcttgttngctttaaaagnggggancgcaaaccaaaacttgtggctgattttatggctaagaagttttcatnggatgcattaataacncatgttttaccttttgaaaaaataaatgaaggatttgacctgcttcactcttttttttgtatccgtaccattctgatgttttgagacaatacagagggggccccttgtggcagtcttcagcctcctctacaaaaaaagttctggagcaacagctgggaaatatcattaattctgctcatcacagattttatcaataaattacattggggggctttccaaagaaatggaaattgatgtaaaattatttttcaagcaaatgtttaaaatccaaatgagaactaaataaagtgttgaacatcagctggggaattgaagccaataaaccttccttctt

SEQ ID NO: 513938 - DNA, 1002 bp, Homo sapiens
atcctcccatggatttgttagtttcgttctttaaaggatttgagggatattcactaacatagtcagttaaaagtaatttgtaaacatcagacctgtgtctagatgtagtgggatacgcctataatcccagcactagggaggctgaggtaggaggaccttgagttgtagaccagtctgggcttacacagtaagaccctaactcaaataaaacaacctaaaagaagaatgagaaatctattaattggcccatatttgggacaaaggaaaaagaagtcactggtcaacctggggtgctgggcctcttttcctacagtgaccaggaaccaggtccagacttgtagatgatcagttgcagtctggtagcacacccctcctgcatgtagctctgtggccctttccctcacatcctaacgagctagatcctgaactgggacttgtggtgctgtcaggatgagaacatggaagttttgaacctagtgtcttttggaattcgtaaagctaaataaatgatgttgaacttgaaaccctccatatgtagatcagtttcaaagtgataatagtgattgccacggcagtaagtaccctgacctgtccctgtgcagactcccttgcagggttttactatgttgatctaaggtctccttgaattcatttgtcctaagctaaagaactggtgagtctcacagatcagtctggactgttcttgtcccaaatattactatttaagttgaagaaagacacaattcccctaatcctatactggcaggaagtaaaaatggtgctggctgggtgcccaaatgcgggattgggttgaaccatccgtgaagagaacctttggctaagaaaattggggaacctgcggaccgttaccagcagtgagatggtacatgccaaagataccgtactaagagtaagaacaacagatgggagtactcaccatagtaacaccggaacggtggtaatacaacaaacggcgtacacactaaaaacatcttttcgacg

SEQ ID NO: 513939 - DNA, 176 bp, Homo sapiens
gagctcatcacgagcgtatccgctggtctgaggctcgaatagaaattctctgtctggatctgctccatctgcatctccacgttcttcatgaacagcatcttcgggaatagctgtcgtctggacaccaggtgcatgaggtaacatgcgcacatgttcaaacaaaggctgtgttatct

SEQ ID NO: 513940 - DNA, 757 bp, Homo sapiens
cgtggtggcaggcgcctgtagtcccaactacttgggaggctgaggcaggagaatggtgtgaacctgggaggcagagcttgcagtgagccgagactacaccactgcactccagcctgggcaacagagtgagactctgtctccaaaaaaaaaaagaaacacaataatggaacatagaggcaggacagggattattttggaagaatgtatcaacagaaatcggacatttaaataacaaaagcccctccaggctaaatagttccttggtactcatttggttatagcccaaatgaacaatattttaaaggctttatgaaaattaccataaatttactttctctataacttctctggcatggttctaaacatgtccataatggctataattaagcttaatttcactactgaccgcactttaaaaaattaattactgccattgcatttcggctggacatttttaaaacacccacaaattaaattaaccttaaaagtgctgttatagagaacatggctcctacattactattagtggaaggattcaagcaacaagtctaagtgtgaatagcatcctcaaatggaaaaagcttcaaaagtaaccgaattgatatgatttaagaaatagagatggggtccgtgccatgttgcccagggtggactcgaaatctggggttcaagtgaattctccacttgggctcccaatgtgtggaattacaggcttgaacaggcacaaactgacaaaaaagcaattaaggcctaatga

SEQ ID NO: 513941 - DNA, 424 bp, Homo sapiens
  misc_feature (6)..(6): n is a, c, g, or t
  misc_feature (65)..(65): n is a, c, g, or t
  misc_feature (94)..(94): n is a, c, g, or t
  misc_feature (103)..(103): n is a, c, g, or t
  misc_feature (108)..(108): n is a, c, g, or t
  misc_feature (114)..(114): n is a, c, g, or t
ccaagnaattaaacaacgtattcctaaaccaaccattgggtcaatggaaggaaatttaagatggnaatccaaaaaatgccttttaaaaccgtgnccaatgggnaaatnaccatncccaaaaccctgtgggattacagcaaaggcagtgcttaagagaaaattatatagcaataaatgcctacatcaaaaaaaaagaaagatttcaaataataacctaatgatgcaccttaaggaactggaaaagcaagaacacaccaagcacaaaattagcagaaggaaattagatcatttaaataataaagatcagagaagaactaaatgaaatacagacttaaatataaagaatcaatgaatagctcgttctttaaaaaggaacaaaattgaaaaaccactcactagactaaccaagagaagagaaaatcca

SEQ ID NO: 513942 - DNA, 1058 bp, Homo sapiens
cgtccggaggaggggaagcgggcagaagccgcggagtagagagtgagggagacatggcgtgggggccaggtttcctccatgtagactagggggtgcatgacagcagggggggttcctggcctgcgagtgtggggatccatgtgtgtccctcggcagcccacatacagtcatgccccatctcatggatcccagatgatgatctgcattatcgtaaccccatactgcaggcattcatcatgatgaccacatcagtcacacacatccccatgatcacatatggaggacccacatgaacatgatggaacatcccacttcactgcactccgtgactcatgaggaccctcgtcatcccacaggttggacggcaccatgggagacggacaatgacctggacatcaggcacgtagaagggactatacacttcactggtccttcacaaccgcatgcaagacaacgtcttgcaacatgaccgaaccaagcaaggcagcaggagatccgtgaacggccccgatgactccacacagcatctcaacggcagtctcaatgccgcacgggatgctccagtagcatgggtcatgttcacccacagaacccatatgggcatcaccatgaagtccatatcacgtgccgatcaggacccatcaccatgagccagatcccaccagtatctggcacgtggcagagactgagagcatatccctacttatgccaaagggagcgacaaggagataacatgggctgacccatccagcacgggagaaacacgtcacaaccacatgggggcccttcgatgtctgggatggaacatgcaccgaacacacagcaagctcccctacatgactcctggtcaccgaatcaccgacacagggccaaccacggaaggcacggggaagggactgaacggcacacggttggacaaagataaagccaccataactcggtgcacccggcaggcataacccaatgccacagctaacggtaggtcagggacccaaaacaaccacccaaaacaacaccaggacacaaagagaaaacacaccgggccacaccacaggcaa

SEQ ID NO: 513943 - DNA, 122 bp, Homo sapiens
cctggcccatgcacttggaaacaagaacactttttacatggattaagaaaaccaagactttttggttagatgcacgtttgtttgtttgtttgttttgttttgttttgttttgagatggagtt

SEQ ID NO: 513944 - DNA, 691 bp, Homo sapiens
ccgtgggttgacagaaaaagccctactgattatacccccacccgagaatgtcttctcccttttcccttggggcttacacacttttatggggtttgtggggctgaagaaataccgcggtccaacagggccgaaaaagttcttccccgtttttttttccaagcccccttagccgggtttattattttttggggtttgggcccaataagcccccctttcccaagctcttaaaaccgatggggatgctcccatggaacgtggggggttaagcgcctttcttgccctaggatttcctttccgggcccaaggcccttttaaaggtaaccctttttaaggattccccgggctttagaggaattttttttccccggcgcccttttccgggccaaaaggcggctttcgccatatttgtgaaataggaattaaaaggaaccccccgtttgtttttttggccctgttttttgggccccccttgggccttgaggcccccagcttttcttttttgggccccgggtccttggggttttttaaaaaaaaaaaaaccccctttccttgtaagccctttttcggggggggggggggggggggtttttttggttttccattccccaaaatttccccaacccattttttccggggtgtttggcccaaacccttgcttttaccatgttccccttttcccctgtttttccta

SEQ ID NO: 513945 - DNA, 1672 bp, Homo sapiens
cctttcaggccttgcgaggtagaaggctgtcctgcgcctgcgcctgcgcccgcgcctgcgcctgcgcctgccatcattcctgttcctaaagctctgcacccagaacctaaacgagtaggtaggacccacctctgcgatgcatcggctgcaggtagtgctgggccacctggctggccggcccgagtcgagctccgcgctgcaagctgcgccctgctccgctaggttcccgcaggcctcggcctccgacgtggtggtggtgcacggacggcgcacccccatcggccgcgccagccgtggaggcttcaagaacaccacccccgacgagcttctgtcggccgtgttgaccgcggttctccaggacgtgaggctaaagcctgagcagctgggagacatctccgtgggcaatgttcttgagccaggagccggggctgtcatggcacgcatcgcccaatttctgagcggcatcccagagactgtacctttgtctacggtcaacagacagtgttcatcgggactgcaggcagtggccaacattgctggtggcatcagaaatgggtcttatgacattggcatggcctgtggggtggagtccatgtccctgtctgggatggggaaccctgggaatatctcttcccgcctgctggagagtgagaaagccagagactgcctgactcctatggggatgacctcggagaatgtggctgagcggtttggcatttcacggcagaagcaggatgactttgcgctggcctcccagcagaaggcagcaagcgcccagagcagaggatgcttccgtgctgagattgtgcctgtgacaaccactgtcctggatgacaagggtgacaagaaaaccatcaccgtgtctcaggatgagggtgtccgtcccagcaccaccatgcagggcctggccaagctgaagcctgccttcaaggatggaggctctaccacggctggaaactccagtcaggtgagtgatggagcagctgccgtcctgctggctcggaggtccaaggctgaagaactgggcctccccatccttggggtcctgaggtcctatgcagtggtcggggtccctcctgacgtcatgggcatcggacctgcctatgccatccctgcagccttgcagaaagcagggctgactgtgaatgacatagacatctttgagatcaatgaggcctttgcaagtcaggccgtctactgtgtggagaagctaggaattcctgcagagaaggtgaacccgctggggggtgcaatagccctgggccaccccctgggctgcacgggagcaaggcaggttgtcacgctactcaatgaactgaagcgtcgtggcagacgggcttacggcgtggtatccatgtgcatcgggactgggatgggagctgctgcggtctttgaataccctgggaactgaggcctggctgcaggcggcacaacccagagagtgccacagtggtgtccagagagggacgctacagaagccgtctgcgtgggacacttagcagtggaggggtgtgtcacagcactttactttagaaaacataattgatgttggaacagagggtgggactgccccgtcaggtaccctgaacagtgctgaagtgagcatgggacaccctggttgcaaagccatttgtacctttgagggagggatgcagtaaatgtgtactgtctc

SEQ ID NO: 513946 - DNA, 921 bp, Homo sapiens
cttgttatgtggtcctcttatgtacctgcctcacttgtcaaggtgtgggaatttggggtagagtcgcgctgtgtcaatagatgcgactctctctagaatgggggccttcctaacctgtctccctatatgtttgttagtatgcttgagggcccttaggttgccacatgggctcaagttgggactcctgctcagcataccgcaatgcctctaaccactttactccggggtttcggtggcctcgggaccgtacggtgctcgctagatgtggtcaaaggaagttgcacatgatgccatatatgactcgagcctctggagagcccccatgtgttgggctatggtggattcgctcgtctgtgctctggcaccattcagctctgttccagaacggaggattccgagcatcaggctaaagatccctgtgtcctcctaccattgcatctcactcctctaggcctctggttagctgacagttagtcttgtgcgggaatcacagcgtacaacgcctaccctggcagggactctgagagcatctgcaggaggggcagcgcactgtgtgcatgtgtctgtcgtgagttgagtcacatcctcgtgtgcacacgtcattacacatgttgcacacaaagcgcactctccgccgctcaaggggacctggaggtctaggcgtgagcccactggggaaagagtgagttctcttcatctccctccatccaggtcggagtgcctggagtacaggtgtcgaggccacattgctggctgccccatctttgtagctcctataaagggccacacctggtggatacctggttgagcgtgtggtctctgcctccagcctgtccatgtcacgatcacaggccttgcttatgtaacaatgatgaccgcggcctgtctcatcattctgaagaggaaaagtcaaagtgatga

SEQ ID NO: 513947 - DNA, 220 bp, Homo sapiens
attgtgctcctctcctattgcgcccacctccccctccacatctgagatgtctgccagctccccagtgggctcgttcagcatctggatgaactgctcctggtgcctggctgatttgcttgtaaacagctgagtggttctccgtggcccatgctgcttggagcagtggcgggcatgcagcgcagggttcttgctgaatcaccttgccgcgatgttctgcttg

SEQ ID NO: 513948 - DNA, 253 bp, Homo sapiens
gagagcttaccatcgagcaatagctgagaatgctcgaagttaaatattcagatatactcgggaacagcgaaaaatagataatctaagagaaaaagaatctgacggcctttttagctgattccgaacatatgcatcattgttgttgcagtgttgaaacaagagctagaaaactgacaatgtcgtctgcttacggaagctcctaaagactagtgtgtgatttattaacgcccaacttctattattgagtgtgaag

SEQ ID NO: 513949 - DNA, 190 bp, Homo sapiens
ggtctagaggatcccattggaagatgtgcagagacagcatatggactcagtgtgctagtccattctcgtgcggctaataaagacatacccaaaactgcctaatttattaaggaaagagtttcatggactcacagttccacatggctagggaggcctcatgatcatggcagaaggcaaaggaggagcaaag

SEQ ID NO: 513950 - DNA, 107 bp, Homo sapiens
caacttctttttgtacccttcatttcttcttcttggacttcataatctgaaagtggactaaactggtgaagttttctaatttcctccaataggttcctttaatttac

SEQ ID NO: 513951 - DNA, 761 bp, Homo sapiens
  misc_feature (331)..(331): n is a, c, g, or t
  misc_feature (563)..(563): n is a, c, g, or t
agcgggcctcgcgccgcgctggtcctccagtcctgcggccacattcaaggcacgagacgcagtctgggatggaaacccggcgtccggggcgcaggcagcccagatgggccccgcagtcaccccgacgagctgctcacgatctccaaagggaagaaagcgacgctcttgagaatcgtccgtagaggctcgtctggctcgaaagctgcctgactcggggaggcgtggtggatacggaatacctgacgtctccccttcgatcatcccgggaatacccttctccgtattactctccaattaccgtcgatccgcacaatataacgaaacagcaaancattggcttatgcagaatagtataatgaacttgcgcttctctagggctcttacctctggcatggtctatcgttccctgacatacaatgttttacttgatgcctgaccggagcgacgggggacggagcattatcgtaggtacggataaaggacacgagtgccttctccgtcgtcatcggcatctctcggacagccaagcgagttcaaagctgggcacgtgcctttgcactgcntgtgtgaacattcggtcgtacagaattgttattcatcctcgcgagttggaccaaggatggaggaagggacgaagtcgtagttgccctgttggagtgacagcagatccggccagtccgcgactcggcgagacggctggccggcgcccgggccctcgatcgcagccaggtcacagatgccgatgggaacgagcctccccg

SEQ ID NO: 513952 - DNA, 366 bp, Homo sapiens
  misc_feature (149)..(149): n is a, c, g, or t
  misc_feature (163)..(163): n is a, c, g, or t
  misc_feature (209)..(209): n is a, c, g, or t
  misc_feature (239)..(239): n is a, c, g, or t
  misc_feature (345)..(345): n is a, c, g, or t
tggcttgatagatctacctttagttttgtcattttccagtattcacaatcctttcaaagtttcctttaaaggggaaaaaaaagaggcttgtaagaaatatgcccaaaagaggttctaggacttacagacatcccattcccgtataaganacaaaaggcaaaangtttcctttacccctgatccaggctagctccaagaatcctaaaaangatgttttaatttgggaactggggtgcggngttttgtgggttaacatgtgttctgccccaggggctactctccttccttaaggaacatgagccaaaatgctttgctccccccccttgttttgtttgttcccctggnggtcttggtccttcctggtac

SEQ ID NO: 513953 - DNA, 723 bp, Homo sapiens
cagaatctactccttcatacggatgtgtcatataatatgtttctggaaatacgaacaatgagagtccacctcgaaagatatgggagaggatttggagtgcctctgtcagataatgaggacagtgggacctagattagaccatgaagcgagccaagtccttaatggatcagtactttggcccgaatgtgctccttgatgttaagtacggaattgccagcacaggattcagtactcctgcctgcagggatacctgtggagagttgcgacgaacgaccagttggtgttccgtcgcaaggcctcttcacttgacaagtggatccaaagacgatcaattcaaattcgctcaagatgcagtaaaagatctaggggtgctttatctccatgctcctatggctcaacgggactgatgatagtgaacttctttctggcagggaccgtttcatgtccagcccagtgatgcaatacattggatagggacccaacattggaggacgtatgctgatatgtcctggacaaatgccaggctagccggcaattaggtactggtccaggagttatccaggcatagagttttcaagcccaccatgggtacgatcatcgttcaaatcaagctcttcaatggccatgggggcacacatcatgcctcccacacaatcgcagattcggagcagatgcgagcgcaagtgtatgaacaagcccagcattaacctgaagagcctgcct

SEQ ID NO: 513954 - DNA, 845 bp, Homo sapiens
gaccccggctccatctcgcgtgagaccgatttggtctgtgacgctgctgctgggggtcagaatgtcgtacccaggctatgccccccaacatggcgtaccacctattcacctggtgatatacctctctgtcgagggtcaagagtaagttcaattctgtatatgcacccccattcattggtccggtaatccatatatcgcttagttgttgcttatcctccaatatgggaggtgcatgagtagctgtataccacaaagttgcgcaggtgtggtggctatcccaaggagagctggaggttgaccgtttgatgccattggagagcgtaaaatcgcatgacccacgtattgctatgagttaattccattgcgtttgcctccaaaacaatagcccagtgggtgttgagaggcttcgcgaagtaccgttagttcccctgagtcggtttcccccttccatagtgcccgaaaggggctttttcgacagaagattccccagcacaagggggttggacagcgtcgggctgtccggtccctggggagatattcgcacaaatgacccgacccacatacaagggcacgttgcgcttaattcgggaaagtgtcaggagtcggtaagccaacgatgaggtttacccaacataaatctctgaggagggggcttttttcccttgggactggtatcacaatggcgtgttctacaagttattcccttgggagggaataaggtcctaatttttacctttagttcgagtccttggccaatcatggtgactacaggtcctccttgcacacggggagtaattctgaaacgagtttgcgattttgtccggtggctatgaactgaaggtttg

SEQ ID NO: 513955 - DNA, 599 bp, Homo sapiens
  misc_feature (29)..(29): n is a, c, g, or t
  misc_feature (64)..(64): n is a, c, g, or t
  misc_feature (70)..(70): n is a, c, g, or t
  misc_feature (74)..(74): n is a, c, g, or t
  misc_feature (78)..(79): n is a, c, g, or t
  misc_feature (81)..(81): n is a, c, g, or t
  misc_feature (85)..(85): n is a, c, g, or t
  misc_feature (91)..(91): n is a, c, g, or t
  misc_feature (124)..(124): n is a, c, g, or t
  misc_feature (157)..(157): n is a, c, g, or t
  misc_feature (166)..(166): n is a, c, g, or t
  misc_feature (183)..(183): n is a, c, g, or t
  misc_feature (201)..(201): n is a, c, g, or t
  misc_feature (211)..(212): n is a, c, g, or t
  misc_feature (214)..(214): n is a, c, g, or t
  misc_feature (216)..(216): n is a, c, g, or t
  misc_feature (220)..(220): n is a, c, g, or t
  misc_feature (225)..(225): n is a, c, g, or t
  misc_feature (232)..(232): n is a, c, g, or t
  misc_feature (252)..(252): n is a, c, g, or t
  misc_feature (260)..(261): n is a, c, g, or t
  misc_feature (263)..(263): n is a, c, g, or t
  misc_feature (266)..(266): n is a, c, g, or t
  misc_feature (269)..(270): n is a, c, g, or t
  misc_feature (284)..(285): n is a, c, g, or t
  misc_feature (288)..(289): n is a, c, g, or t
  misc_feature (292)..(292): n is a, c, g, or t
  misc_feature (310)..(310): n is a, c, g, or t
  misc_feature (320)..(320): n is a, c, g, or t
  misc_feature (351)..(351): n is a, c, g, or t
  misc_feature (356)..(356): n is a, c, g, or t
  misc_feature (370)..(370): n is a, c, g, or t
  misc_feature (379)..(379): n is a, c, g, or t
  misc_feature (390)..(391): n is a, c, g, or t
  misc_feature (414)..(414): n is a, c, g, or t
  misc_feature (421)..(421): n is a, c, g, or t
  misc_feature (429)..(430): n is a, c, g, or t
  misc_feature (438)..(438): n is a, c, g, or t
  misc_feature (474)..(474): n is a, c, g, or t
  misc_feature (544)..(544): n is a, c, g, or t
attatagaatggacttcactcctggcttnagtcatcctcccacatcagcctccaagtcgctggnacttcnggcntttnnancacncccagncattctggttgttactttgttaacttttttttnttatacctctggtggtcttcaggtcctaatatntgcttaatntgctcatttatatcttnatttatttgtttatagtnttttttttanntncntagntgcanacagganggggttgtgatttctaattnttagtgtnntnggnggnntgggggggcgttgnncanntgngcgagcggagtattaacntcattcattnggggatagagtccatttgggggggggacatnagatnagttttgggggtgngagacaatngcttgcgaagnntgagagtgtggcatattgctgtncttttgnttattttnnaattcttncagcatagtatctactataaacaacagatcttcaantttgataccttcattttcatcctgcttcttcaaattaagccaaggtaccagttctgcagatagtgttttnaagggcttatacaaatcctttaaggcatgtcagttgatatgcccacatttctatt

SEQ ID NO: 513956 - DNA, 222 bp, Homo sapiens
  misc_feature (186)..(186): n is a, c, g, or t
caatatagacagagtctgggctgatgtcagcgtggactgcagcagtagcatggtctagaaaggctgattaggaataagggactgaagtactcccaggtccttataggtgagggatactttcagtgacagggttgggtcagccagtcagcaaagtagccttcctaaggagctttacatttggacagnctgctgcccccacctgatacatctatggcaacacaa

SEQ ID NO: 513957 - DNA, 199 bp, Homo sapiens
tccgagctcggtccctctgtcatcgctaaatctttgccgggggcatacgtattgcgccgctagaggtgaaatacttgtgaccggtgcactgatggaccagatgcgaacgcatattgccaatgaatgttacattaatcatgacacgaaagtcggagtgttcgaagacgatcagataccgtcgtagttcctgaccataaat

SEQ ID NO: 513958 - DNA, 395 bp, Homo sapiens
ctctaaggatcccctatgtgcagcgaataccgcggacatcctagtgattttccggcaaaaccgttcagtttggctggtaacttttccagtaactttgacactatatggaccgggtgttgtgtgtctcccctttctcaaagttgctgggattacaggctgtgagccactgcgcccaggctgagaagtgaccgtttagatgaaggtggtgagatgccggtggattggttatatatttcacttgttgaggccaaaacgttcttgttgaggtgacgagggaacgacgcatccaatcttaagtttttggggcagagtagctggttgaatggggggttcatttcctaaaatgggaagattgggagagtaaccggttctgggggcacaccggggtaccgagc

SEQ ID NO: 513959 - DNA, 230 bp, Homo sapiens
cagtgaatcgcggacatactgggtaacaggggtgataaccgatctctagtgaaatacaaacatagcctagcgtggtggcaggcgcatgtagtcccagctacttgggaggttgaggcaggagaatggcgtgaacccgggaggcggcagcttgcagtgagctgagattgtgccactgcactccatccggggtgagagagcgagactccgtctcaaacacacacaaaaaaaaa

SEQ ID NO: 513960 - DNA, 374 bp, Homo sapiens
  misc_feature (33)..(33): n is a, c, g, or t
  misc_feature (42)..(42): n is a, c, g, or t
  misc_feature (70)..(70): n is a, c, g, or t
  misc_feature (81)..(81): n is a, c, g, or t
  misc_feature (108)..(108): n is a, c, g, or t
  misc_feature (140)..(140): n is a, c, g, or t
tggccctgcaggcccctttggcaagccccccantgctgcaanggtcctagaggcccatgggcagtgtggnaccctgctctnggtgtgacaaaaacagtattaaggggnaagtttatagcactgaatgccctacattaagnaattagaaagatctcaaattagcaatcctagcattgcaccccaactgtactataaaaacaagaacaaactaatcccaaagctagcagaagaaaagaaataactaaaatcagagcagaactgaagaaaattgagagattgagacccaaaaatctatacaaaggatcaatgaaaccaaaagttggttttttgaaaggacaaacaagatcaatagaccactaggtagattaacaaaa

SEQ ID NO: 513961 - DNA, 234 bp, Homo sapiens
atttgaaagagaattcttctagatgaatgtttacttaaaaaagtgatccacctcaacaacggatacagcgatgctttattcattgggcatttagcctcaaaaagcatgtagtaccaagcacttggtatttccgtatatgcagtttccgacgggacgtgagggagaagaaactcgaatagagcgtgtcaggtcttgcaggggtcctgacactgacctgagactgctgagacacct

SEQ ID NO: 513962 - DNA, 1190 bp, Homo sapiens
  misc_feature (265)..(265): n is a, c, g, or t
gtgaggtgtgtctccccctcctttttctgcgggaggtgacacacttcttgcttgactctccgctatcctccacgattccggggtgccccccgatcacagcccgctctgaacgcgtgaaaagacttatgccacgctttaacgaacagggaggggtttcccctggggatttttccctgcgggctttcatgtgtgggggccttccccggggggccaaataggaagatgttcgtttcctgggggaaaacttgggggaatgtacaaggangctaacaatcccacgagggacccaaaaggtgaaatcgcgtaacgtggggaccccgaatggaccaaggggtcccctgccaccgtatccggacaaagccttcctagaagcactgggatccttgggaacccttggggagcccctggagtggagaggaaacctgcgcaaggacacaaccccccgaagcccaggaggtgagcccttgagtttggagcacggcaccccgagaaatgtctttttatgggaattgatcccaaccggccccgcgtacaatcccgttatccacaaccctgggcatttggcccacgaatgtttgggaaaaaggtagccacgcaagggagaccttttgggtgtacctcgggccttctcgctggtgtgaactggtgaagaacccacggccccaatggctttcccacattgggcctcttcagaacatttcccacggtgaaacccactgggtgaaagcttctaaactggcgcccaaaggggcactggaaagtgtgaacaccaccccacagtgcacttcaagagacacccacttcacacaccggatggcgccctaactttcgggacctcggttttcccctgcaacaagcttttcacatggggcaatcccgaggtatccggcccaaagaggagcctgccaaaccacgtttgtgcccacaggcctttaacggtttcaaagagatccacatccgaatggcctatccacagctgcagctccaaagccgccacgcaaacttcaagaggcccacgtcaagagcgagattcgctgagattccctcccccacacctgtcctgcacgtctttgaacttttcctttcttttttgccacaccctttcacagggaaccctgtatggtttttagtttaaattaaaggagtcgttattgtggtgggaatatgaaataaagtagaagaaaaggcca

SEQ ID NO: 513963 - DNA, 423 bp, Homo sapiens
tctcgatctcctgactgtgtggtcaccatctcggctcccaaagtgctgggattacatggcgtgagcagcgacccggcagagtccagatcctttttatatgacttttttttttcacccttctgtaatcagtgttccacattttcagaatgacgtattaatacctgccttggcgaaggtctgtttccatgccaggcccttttccgagtgacctctggtccttaatttcggggacactttcttgaatacatcctcagtgatatccttcctaaggtgtgcacggtggtactacttttctctcttttttctaagcgcttgatttacacgctttttgcccaaggttgaagtgaattgggtgccatctcggctcattgcaacttttgcctcggggtgtacaggcaattctcttgcttcagccctcccaag

SEQ ID NO: 513964 - DNA, 266 bp, Homo sapiens
gccatttacgctgcagtggatgatgatgatgatgatgcagcttaagatgatttacttgtaagttttcgtgttgttttgcttttttgagatggagtttcactcttgtcacctagactggagtgcaatggcgtgatctcggctcaccgaaactccgcctcccaggttcaagcaattctcctgcctcagcctcccaagtaggtgggactacaggtgcccgccaccaaacccggctaatttttgcatttttagtaatgacagggtttcac

SEQ ID NO: 513965 - DNA, 415 bp, Homo sapiens
gaaggtttgttgtgatgattcttaatgcaatatgtgtcttcttatctgtctgcttcgttctcttctatggtgccatcattgacagagcggcgtcacactgaggttgccagaatgccgtcatgagctcgcggtctgcaatcaacttctcaagcgggtcaggatacagttgaagccatcacccatgcgaggtgaggctggttctctccctccactgggggatcccaggagtctgctttcctgtcctgctgtccgcttgccttgcagaggtcttcactaggtgtacggcttgagccgccagtgacccttgctctgggctcttggggcaagaggctgccccagctccctggtgagctgtgtgcaagggtgaatctgtaccctctgggtgagttcacacccatcacctccgagggctgca

SEQ ID NO: 513966 - DNA, 997 bp, Homo sapiens
attgttttgttgtcttttttctgtttctacccctctcgtgagtttggtccttcgcgcgctcttgtatatagccgggtccccgagttttttgcgggagttctttcccggggccgtttcccctgcctttgcgccctagacgcgggttgacaaacgcgggggtcccgttcagtttcccggtttctcgccccccctccgaataaaatggttcctctgccagaacccttagaaaaccaagaatttccagaacttaagttcttccctgtgatagaagtttgcccacaagatgcttcgtaagccaaagaggaactttatctatggaaagctcacccctgtcccaggatatttgccgatgtacagaactggattcgaatgcgaggatgccagaaagctgccacttctatgtacctgccggacccccattggcctttgtcatccgaatccgaggtatccatggagtgagccccaaggttcgaaaggtgttccgcttcttcgccttcgtccaatcttccatgggacccttgtgaagctccaccaggcttcgattaacatgctgaggattgtagagccctatattgcactgggggtacccccattctgagagtccgtataatggacttattctacccagcgctggttatggccacaatccatatagaagcgagattgctttgaccgataacgcctttgattgctcgattcttcttggtaaatacggcactcattctgcactggaggatttgatttcactgagattctatactcgttgggaaacgccttccaagaggccaataactttcctgtggcccttcacaattgtcttctccaccgaggtggaatgaagaaaaagaccacccccttttgtagaaggtggagatgctggccaccacgggaggacccgatccaccacggcttattatgaagaatgaaactaaggtgtctaccctgattatttttttaagctggttggtttaataaaccctacctgctctccaattga

SEQ ID NO: 513967 - DNA, 428 bp, Homo sapiens
  misc_feature (27)..(27): n is a, c, g, or t
  misc_feature (70)..(70): n is a, c, g, or t
  misc_feature (145)..(145): n is a, c, g, or t
  misc_feature (149)..(149): n is a, c, g, or t
  misc_feature (171)..(171): n is a, c, g, or t
  misc_feature (205)..(205): n is a, c, g, or t
  misc_feature (229)..(229): n is a, c, g, or t
  misc_feature (243)..(243): n is a, c, g, or t
  misc_feature (246)..(246): n is a, c, g, or t
  misc_feature (253)..(253): n is a, c, g, or t
  misc_feature (264)..(264): n is a, c, g, or t
  misc_feature (270)..(270): n is a, c, g, or t
  misc_feature (297)..(297): n is a, c, g, or t
  misc_feature (331)..(332): n is a, c, g, or t
  misc_feature (353)..(353): n is a, c, g, or t
  misc_feature (409)..(409): n is a, c, g, or t
  misc_feature (411)..(411): n is a, c, g, or t
  misc_feature (426)..(426): n is a, c, g, or t
ttttcttttgtcttctactagtttatnggtaaatttattgtggtttatccttactagggtttattcatcnttttaatgtatgaattcatgcgtgcatcaagttggagacttatgattctcaaaatatttatgctttgtgtaagangccngacaaaaaaaaaagtcatactntttgattcctttcacattaaactacttaaatgcntaattgtgagccggttggtggttntctgggggggggtnttntggtggngcattgtgtcnctttgngggttgatggttttgttcactctcttntttgtagtatgcttgttctccacatggtgtgatnncttttcatattgttcactttnaatttgttctgttttttttttgcttaattatatctcaattaagctttttacaaaancntacatctcttgcctnca

SEQ ID NO: 513968 - DNA, 196 bp, Homo sapiens
ttttttttgggggggggggggggggggttttggggctttttatatccccccccccccccccccctttgggggggggggggggggccccttttttttgggggcccccccccccccccccccgttttttccccgggggggggggccccctttttttttttttttttttttaaaaaaagggggggggggggggggggga

SEQ ID NO: 513969 - DNA, 174 bp, Homo sapiens
gatccccaacaccgaaggaggcactccggtcggaggtggatgtggcgtactgacatagaagagcaagagaggcggactcaagagtgtcctccaggcagtggcagaacaagtgacagaggaatcccagctgcctggcaccggtgggccagaagatgtgcttcagactgtgcagag

SEQ ID NO: 513970 - DNA, 190 bp, Homo sapiens
ggttattataaccaaggcttgggaaacccttcaaagggaaggggaaaggttttggggcccccttgggttttttttttggggggggggggttttaggttttaggtttttaaaaccgggcttttttaagggaaccccctggcccaaaatttgggcccagaattttgggcccccttaaaaaggttaatgggga

SEQ ID NO: 513971 - DNA, 267 bp, Homo sapiens
  misc_feature (45)..(45): n is a, c, g, or t
cggaccgtcgtgttctaccatatagacgtatgatttccctacccnatagtttgtaactgagtattccttttgttttttgagacaggctcttgctctgttgcccaggctagagtgcgattgcacgatcatggctcactgcagcctctccctcctggactcaaataatcctctcacctcagcctcctgagtagttgggattacaggcatgtgccactagtctggctatttttttaacgttttgtagagatgacatctcactgttgccca

SEQ ID NO: 513972 - DNA, 129 bp, Homo sapiens
tttgtatttcaggggtggctttttcagtggaccaagctgcaatgcagtattgacttgacagagcctctacttttgtttcaaaatggctccaaatgatttttgtactgcaaaataaagcccaattttgga

SEQ ID NO: 513973 - DNA, 195 bp, Homo sapiens
attttctttataatttcttgaacaggcaaatgaaagcttattataaaaagcatgtatttttttttatctttggaacatcagccccagtatattgctggcagctattgtattaaaaaataaagtatattttccctatcataaaggattcttttttcccccctcatgaaaataaacaacaacttggggtaaaagtga

SEQ ID NO: 513974 - DNA, 196 bp, Homo sapiens
aatgatcacgattaagtaataattgccttaattgttcaagttgcgtttgaatggttggttcaggtaagttgccaattaaggcttgtagttgttcagtgtagtctgtgagtaacggattcagttttgccatcgggtggactttggggtaatgggttcgggtaaacggatcaggtcagcatcgttaatcaaatcgggc

SEQ ID NO: 513975 - DNA, 1195 bp, Homo sapiens
  misc_feature (208)..(208): n is a, c, g, or t
  misc_feature (270)..(270): n is a, c, g, or t
  misc_feature (282)..(282): n is a, c, g, or t
  misc_feature (303)..(303): n is a, c, g, or t
  misc_feature (331)..(331): n is a, c, g, or t
  misc_feature (877)..(877): n is a, c, g, or t
gctcaccgactagtgccgcgtcatagtaacaatgtagcttgggaggaaggatacagtagatcaggtgaagttcatgatttgatttacccagagcacaggtcaaagccccaacgtatcatcgatctcttcgcgagtgatgtgtcgaagtgggcgtcagttggcattgatcacatgaagtgcgccctcaacatgcggactggaagtcagngtggtgagaagcgaccagcaacgcgttattgcagagaggccgtacaatacgcacgcacgacnaaaagtgtactntactcaggccgctatgtcccnagacggcagtacggtgaatgacaaaccnagagtgcgtgtgagaggcgtgcgtacccgcaaatgtagtgaaagaatgccagtgctgcatgtcctcgacgtaacaaaatcctcacgtatgtgcgccatccgttagggggtcatgagaacgtgagagaccgtattctcggtgtacatagagagcacaagtgcgtagacaaatccccccctagtcagagaccgagctaggggaaatcgccgtgaatggggtaccaagaacgaaccaggatagagcctttgtatattggggttcgccacaaacctttggcgaccgctattaacatttagcagcaccacaagtgagacactagggttagagtagcttaccttgtgggccgtggtcagtgcgcgtcgcattggattagctaacatgtggtaccacctcctcgtggcttggatcggtaaaacacgaggtacagcctcttcaaaggcttatgaagaatggattagcccaaaccttgtatatgcacagcacccggaggtggctcgcacaaggtgccaataggcgggacctgtgaccataaggagccacacaccnttccgggctacccaagtttgtcatcatcggtatgtgcggcgtccacagaaaaacagtgtttcccctatatatacgtggggaggctaggatatctatcccattaacacacgctctccgaccgcaaatggagtcgatcggggggaaccattacgatctatggggctgtgtaacttactcttccgttaagttgtgtggacccatcagagggttagaactttacacaaaaggcgcttcctatagggagccacgtccttacagattattcaatccatctagtgatctacctacccaagagaagaggccttcttttcacgcaag

SEQ ID NO: 513976 - DNA, 426 bp, Homo sapiens
aggcacaatgtctcttgttcattgttgccaagcatagtatccgggtgtttaaagcaatataagaatggatgctaagcagtaacgagtgtggtaagttatgttcatcagtccctacagaaggtcttgaatgcatattgacaaatatgaactatattatgtaggcaattagaggttaaaaaggtaacatatcagctgttattaataggcataattttcttggtgcgcctccgtgcgttacgtttagtacgtgagtctctgagatggagtctcgatgtgtcacacagtactggagtgcaatcgcttgatcttgcatcactactccaggcatctttttggctccatcaaaactccccctatatcctcctgagtagttagaaatgcatgcgtgccaccccaagctcgacctcgtgcagaattcgtgcagcc

SEQ ID NO: 513977 - DNA, 188 bp, Homo sapiens
ccatgattgtaagtttcctgaggcctccccagccctgcagaactgtgagtcaattacacctctttcctttataaattacccgtcttaagtatgtccttacagcaacatgagaacagactaatacagaccctttccccaatcccaggcccagacagttttctactccaaagacctgcccccctccccac

SEQ ID NO: 513978 - DNA, 841 bp, Homo sapiens
atcatatggagattatctgggttctgggaagagataggaatgagtctttatctagtgtggcaggccagcaaatacagaggtggttgatcaaacagctctagtatgaagcaggagtaaagactaaggtttcgagagcattcctactcacataagtgaagaaatctgtcagataggaatctaaatatttatagtgagatggtgaaagcaaccttaaagttggaagaagactgatgagactaggtgcttggtttcctttcatcaggtatcttctgtggcatttgagaacagaaacaagaaacatggtaattactaaattatgaggcttggttagggtggcttttaagtagaaaaacttgtgtggcaacatttgagttgtgagtttgatggagataatatgacttaactagttgttgtcattccattgtgttaaagatacagtcaccaagaatgttgggagttttgtgaaagaccccaatttaagccttgttaattttaaaattatttccattcagtgtgatgtgggatgtatatccagttattaagtcacattaaatctccattaaatttgtgtgctgggggctttttatcacacacgacagcacccgtatgtcaaaagacagaacaccacattttgtgggcggctcccggcccccagggagtgttccaaaccacttgtgttgggggcggcggccccagagtgaatgggacaagtgggccacacggggtcacaagagaacaccgggcaagacaaagggggtggggttcccaccataaaaaaccgcgcgggcacagagggtgtgacaaaacacaggaggtcgggcatacgggcacacagggcccg

SEQ ID NO: 513979 - DNA, 228 bp, Homo sapiens
agagacaccacggaggggagagacaggcagcccagcagagtgtagaccctgccacagccataggagggcagagggagaatccaagggttgagagccagaggcgtatgatggccagcccgtgcagcccagccgatgtttacatgggtcttgcaagcgatagctgtgcagtctctgtacagacagcgaactttgacctcggtgaccactcttctataagccatagaccct

SEQ ID NO: 513980 - DNA, 419 bp, Homo sapiens
tagaggacccgcgtagccgtacaaatacgaatcagatacagagctgatcatggacaattatcaagtcattagtataaacattattaatcattaacttttaatgttactctgttgcattactaatataacctaggaataaccggcgggtatagggtcaggtgctgaagcgacattgtgagaagtgacctagaaggcaagaggtgagccctctgtcatgcccgcataagggccgcttgagggctccttggtcaagcggtaacgccagtgtctgggaaggcacctgttacttagcagactgtggaagggagtctcctttccttggaggagtcagggaacactctgctccaccagcttcctgtgggaggctggatattctcaaggcctgcccgcagtcatccggaggcctaaacccctccctg

SEQ ID NO: 513981 - DNA, 429 bp, Homo sapiens
ctagattcacatgtctcagtcactactgcctcaggacccatctcttatgcgttatgtgctgggggctggagtcaggtgcatgcctgcttggttcctctggctctctggattagtggcacggtcgccatcaggcagctgccggcggggatcagattaagccggagatgcctcgaaatgccacagatgggacatcacagagcatcttccctgtttagcctggacttgagattgctgtccccagcagtaagctgctcaacctcaaagcaacttgcacgggggtttacaaaaaaatgcacttggccgggcacggtggctcacgcctataatcccaacagtttgggaggccgaggtgggtggatcttttgaggccaggagtttgagagagaccgagccccaaggggtggccgtcctgagggggtttgtgggtga

SEQ ID NO: 513982 - DNA, 1007 bp, Homo sapiens
tgtctcgtggacgtccccttgtagcccgccgtgttttcacccagtggcttctccctccggtgctgccagattctggtgggatcccgcactgttgtcgcactataagatgtccgtcgcgggccgcactattcgcggggttctccctttatgccggccccggcgtgacttccatgggttgccgcccgcttctggcccgggtgagcttccttcctttttcccaagggcgcccgaattccggcttggtttacaccacacccgctaccgcttggggcgcctgtccatctccctcaccggctgtcttttgtggagggcctcgtccacgcttaggtcgcactctataggggtcgcgttcgtccctctcccagggtcatgcctactctcccttggagttgcccgcgctttttccgaggaaccccctgaggcccaacaaatgagcccaaaatgctccattcttcgcctttattaaattcctcgggacgtaaagatgataactttctgtggccacaaccccacacttttctcgcgtaatctcttgatgggcccccacacacgcttattatggtgacctccccctcgaattactgaactcacccgcaccttggaacactctccgcctaactctttagactctacactcacatttgtctttgtagacacctccccagtgttaaaattcctaattataaattgttcagatccatacttttatgaataggccccattattcttgcatacgctactcatagattatgcttccattagtgtgaaagtgaccccctctcccaccctacctcggcggggtctcattatttgaggacgctccccgccgcactcaagcacacaaacctttggtcgcgagaacccggtttcatacactcaacattctgtgatgcaacaaaaaggaatggataccctaagcccctccgcacggcaagctggctgtcagactccacacactccacacactggcctctcccatgaaactcgttccccacatgagaacgaaa

SEQ ID NO: 513983 - DNA, 156 bp, Homo sapiens
atgttatgcggtactggatgtgtcagaggcattcgccaggtttgttgacccactttatcagcctcgtgtacaaggtgtccctgtggcccgctgcctcagctttagaccactttatctcattgtccatgaggcccaacttacctcatgacgcggctc

SEQ ID NO: 513984 - DNA, 166 bp, Homo sapiens
tgggaatgatctaaggcaatggtgtcaaatgtgtcattgaggttgatttcaggaattagaacctgggagggtgcagttgccatggagactctctcggtatattcttatgcagtctgtaggaatacgcgcatttatcattctccttcagagtagtgttccggcttgg

SEQ ID NO: 513985 - DNA, 412 bp, Homo sapiens
gaaatgaaaacatctatacaaatcctgtacaccaatgtgcatatgtaacattattcataatagccagaaagttagaaacaactcagattccaacagctaatgaatatatacattaaattaggttatgtccacagaatgaaatattattctgcaataaaaatgaagtactgatatatgtacgacatggatgaatcttgaaaacattacattaaatgagaaaagccagtcaccaaagaccatatgttatatgactacatttatatgaaatgtcagaataggaaaatctatagtgacaaaaagtacattagtggttgcctcaggcagagggtggggtggtggagaaggcaatgactacaaatgggtactgcgttttttgaggatggtccgcacagggggtaaccgaggctcgaat

SEQ ID NO: 513986 - DNA, 355 bp, Homo sapiens
  misc_feature (273)..(273): n is a, c, g, or t
  misc_feature (325)..(325): n is a, c, g, or t
  misc_feature (345)..(345): n is a, c, g, or t
gcagaatcacaggccagaggtgagagctggagaaagggaaactctcccagtccctgggagtggtcattacagactgggaaatcgctctccagctgatggtaaaggactgcaaatcctattcatgtgactcagggcctggtgtgccttctgggaagaaagcagaagagggttcctaactgtagaagggaaaagtttccctttattcttccagccacgtggttcaataagcatgtacaagctctcaccagggccaggcactgtgcgggcaccagnaaacattaagatggaattgacacaggtctgccctgggaagaaacatttaagntgggaatgacacaggttttnccctgggaag

SEQ ID NO: 513987 - DNA, 215 bp, Homo sapiens
gcaaaagggagatgtgaagaattacctaaagcttgatatagacaaatctaaaacacttcttgaggataattaagacatgtctcatttgtggaaatttggagaagaatttgacatttactggtataggccctttctgtctagctgacttggtcactattacaggtcagtcatatcattattattatctcgttagagacctggttattattttgaga

SEQ ID NO: 513988 - DNA, 235 bp, Homo sapiens
ctttcaatatacggtttgccttatcctgattcgccgttgttcagtccctaggtcatgtggttacatagtggcgccgcagaacagggcttcaaggccgtaacgagaaggtcttctggagcagaggacctgaaattgagaaggtgaacgggcacccaggccgagtctcccgacagggatataaggggatggacaagccgtgtgggtgccctcaaggtgtgtgcaaccatgggatggg

SEQ ID NO: 513989 - DNA, 328 bp, Homo sapiens
ttttttttttaagacggagttatgctcttgtctccccagctgtgcactggcaagatctcagctcactgcaatctccaactcccaggttcaagcgattctcatgctacagcctcccaagtagctgggaccaccggcacccactaccacacccaactaatttttgtatttttagtaaagacagagtttcgccatgttggccaagctggtctcgaatttctgacctcaggtgatcctcccacttcggcctcccaaagtgctgggtttacaggtgtgagccactgcacctggtctcaataaacttttaaagaaacttgtgttttaataggtc

SEQ ID NO: 513990 - DNA, 403 bp, Homo sapiens
aagacttttagcaagtcaaagcttctatcaccttttcttgcccccttcaaccagagtcccctcctgctcctactccgctagtccggcccctgacccctttccccagtacccacttcctgcctctctcattaacccttccgtagctgctcaccatgaccccatcagaatccagttaaaagactcttccaaatttcccaacgttcctcaataccccatctctctaacccaccaaaagggcctacagcccatcgtaaacaagctctgctcatgcagtcttcttagaccaacacactctccatataacacccctatcctccctgttaaaaagtctgatggctcataccgactcgttcacaacctccgagccatcagtcaagctgtcctccctattcatcccatagtc

SEQ ID NO: 513991 - DNA, 269 bp, Homo sapiens
gtccaagcatcttgtcaatagcgctatttcaggcacatcattggaatacaggaatgtatgccctgcacctgctctgtgagctctccctccacaagattgtaagagatgacctgggcatcttgagacatcattgatgtgtcttcacggagaatgtgcagctgcttttgtaacacactaattattatgcaaattagaggctccatagtacatccgctttgttaatgaaaatgataaaacacaatattgaccagctacgacacgaatgttca

SEQ ID NO: 513992 - DNA, 273 bp, Homo sapiens
gatctgtctctgccctagactacggaccctgccggcctacttctccgttactactacgacaggtacaccgcagagctggcgcagttcctgtacgggggctgcgaaggcaacggcacacatttctacacctgggaggcttgcgacgatgcttgctggaggatagaaaaagttcccaaggtttggcggctgcaagtgagtgtggacgaccagtgtgaggggtccacagaaaagtatttctttaatctaagttccatgacatgtgaaaaattcttt

SEQ ID NO: 513993 - DNA, 102 bp, Homo sapiens
gaaaatggggcatcggcgtgagcctgccaacaggctggggttgggaggcctctctgggcctgcaccagagctgccaccctcttctttctcccagccttctca

SEQ ID NO: 513994 - DNA, 927 bp, Homo sapiens
aacttaaggaagttgtgcctataaaagttactgcaattcagtatttctttatttttttcgagacagagtctcaatctgtcgcccaggctggagtgcagtggcatgatataggctcactggaaggctctgcctcaggggttcatgccattctcctgcctcagcctcccgagtagctgggactacaggcgcccgccacatgcccagctaattttttttgtatttttagtagagacgggttttcaccgtgttagccaggatggtctcaatctcttgacctcgtgatacgcccgcttggctcccaaagtgctgggattacaggtgtgggccaccaacccagtccttttaggtgatcttattcatatgtgtatttcttgttggggaaaaacgaggattgttcacacttcttggtgacccagaaaccccgctggggtggtgtggtggggggccccaactaccccggagctgaggtggacatctcacaccttcagagggttcccgggagatgtcaaagtgacatagaacctctgagggaagtgtcggacaataagggtggtcccccaacattgcccatgaaaattgggtctttgcagagaacacagctttccaacgttgttgcacggtgtgtgtcataactactgagtaccattttattttggccggtttggccccccagggtgtgtatttccggcggcacctgtgccccagaggtgggtcttcaattcacgagtggaagacaccgcgtgatatatcacaactatatcccaaggcgcacagttatcatatacggttttgtgtctcttcccccacgcaaattttaagggccacttgttgtgtctcacaaaaaagcgtcggtatgtggtccgataacccctgtgggggacattgaccgggcaaggtctgtaaaggaaccaccattgttgctgaata

SEQ ID NO: 513995 - DNA, 1045 bp, Homo sapiens
gcgctatgatgtaacgcgcatgtgcggatggtgagccgctcgcgcgcgaccacctcggcgcgccgcctgcgcggagatcgcccggctcccgagagcgagccccggcgccgcgacaccagccgcgctaaccgccgacaaccgccaccgaggcgcctgagcgagagcagaggaggaggaggcatgagtgaggcgggcgaggccaccaccacacaccacacctcccgaggctccgaggaggcggcgccgggtccccaggacccggcgccaagagcccggtgggcagtggtgcgccccagggccgggccggtgccgcgcgcccacgtcgcaggaaacccgtggtggggacggcgggcccccgcgagccaacgggcactgggccgccgctttttaggcccaccggcgccgggaagagaagacggcggaaggaaaagagttctcgccagcaaaagtcgttggcacttgtcaatgggtcacgcgttcagaaagtggatattggaattaataagttcggagagagtgacaccgaaggagggatgtttttgtgtacattcgggagtggcatcaaggaagaaataccccggagggaatttttctgcgcgggtggtagggaggatgggaggaacgtggaggagggttggatgttgtttgaagggagagagggttgcagaagtgcacaattgtgattgcccgggatgagttcttgtgaagggaagtcgtacggtgcagaatcggcggcgtaacggacgtgatatatggaaggcgcgtggccttcaccggaatgtgctgaattgatagatgaagatggagtccagagggcacattttaggagggttagtgagatgaattacgccaggtagaaggggacttgcagatgccagagtgagagtgaaaaaaaattagcccggggtcagactgttgtcgagagggcccaaaagcgtgcgcgggagctttcggaggaaggagagagaagaggctcagcggtgtgtgagtgtgtcagggagagaattagagaacgagaggagatttatttatattttcgcgggcg

SEQ ID NO: 513996 - DNA, 170 bp, Homo sapiens
cttcctactaccggccaaggattagcctcctgggagcgcgcaccccgctgcctcgccacaacattttcctgggagcggcggccacggaggcaccatgaagaagtcttactcaggaggcacgcggacctccagtggccggctccggaggcttggtgactccagtggcccag

SEQ ID NO: 513997 - DNA, 1242 bp, Homo sapiens
caaaaattatgccaggcgtggtgcggaggtgcctgtaatcccagctactcgggatggctgaggcatgagaatcacttaaacctgagaggcagaggttccagtgagccaagatctgtgcctagcgtgcgattgccagccgtggagtcagagcgagagacaagtactctgctctcaaaataaaagagtaaaaaataatcagggcgacagtggctcatgcctgttaatcctcagcactctgggaggctgaggtgggtggatctatctgaggtcaggagttcaagactcagcctggtgaatcatggctgaaaacccgtcgtctatataacaaataccaaaattagccgggcctggtggtgcagtgcctgtaatcccagtctatctcgggaggtctgaggtcaggagaactagcttgaagccaggaggcatgcggttgcagtgatccaagatcatgcacactgctactccagacctgggacgagcaagaggcagaacctccgtctacaacacatacacacgatacggaacaagaatggacagcgctgagcatgagagttgctcatcgagatttccctctagatcctaaatgtcttcatgtctatcagtctagagcagaccggagagtagggcggggcacattctccgagggccttcgttcctaagctctgtggttggacctctcagcaaagagctgatacaagctgggccaccagttccctgcacatcatcggtgtgtgaattaacccaaaatggcattcctgggctggctcaaggtcaatgatgcaccgggacgcgtgcaccagaggcttcagatagattgtggggactgcgaggacaagctggaatagactggggtcatccacaggaagcatggacgggacccgcgtggcgcaacacagaggaccacgacggtaccgggatcgaaaacaatcggccgtggacaaagagcctcggcacaggacccccggaacacaaagcggaggcactgcagggaggagcaagaagagggtcggagcgccgaggacaaaccgacgagaaccacgaggagacagccggtgaggagcaacagcaagaagaaacagagaatgggagggacgagcacacagccaggcagcgagagcaacaagaccaccacaagagctggagaagaccactacagaccacccagagtcagcgaaacaccgaaacaaggaccgaacactaccaaagctgatacaccacacacaagacgacgcagcgaccaat

SEQ ID NO: 513998 - DNA, 736 bp, Homo sapiens
ggctgagcctagtggctcatgcctgtaatcccagcacactgggaggctgaggcgggcggatgccctgaggtcaggtggtcttgaactcctgaccttaggtgatcctgcccacctcagcctccccaaagtgctgggattacaggcgtgagccaccgccccccagtccaatatgtatacttctttcaagtgtggacatatgaaaaagtatcagtctttagaagatttgtaacagaatttcaactgtgtggcattctacaaggcacctaacattcataagtgctctaaataaaatttgtgtcaaaaagtcaatcattaatattcaacaaagtgtacgataacatacatacagtgtctagcaattttcaaaggcagtgctaaattcatcagtgcttcctctttcaaactagttttttgtaaagagccctctgcttattccagtccccccctttaaaatcttttacaaatttattaataacctattaaccttgtgagcaacttcatctacgacatccacaacaaaatgtgagggacgtacatgtccttgtgtcctttaccttttagaaaccctcaaacatagcttggtatgtgctgtcttacaaactcttctgcacgcatttcaggaatcactttagaaacacgccttgagggagcaacacctttatcctagccacactcaactctatttttgccgtgactactcctatttttccccttttatttccctggattttcatgg

SEQ ID NO: 513999 - DNA, 115 bp, Homo sapiens
cttgtgctctgcggacccttttgacgagacgacctggtgcgagtgtggctggtgacattggcacacgctagaagtttatggcagagctttaccaaatcaaaacaaaaactgggcc

SEQ ID NO: 514000 - DNA, 811 bp, Homo sapiens
atgagaccctcacataatgcccggcaccacttgagactgcagagtcttgaccagcaagaaggtcctcaccagatgcaactcctataccttggactccctgcctccagaactgtaagaaataaaattcttttctttataacttacccactctgtggtattcagtcatagcaacagaaaatgaattaagacagaaagaaagaccatgttcctggataagaaaactctcctaagcaagacaattctacaaaagtaaatttataaatgtaatgtaatccttataaaaacgccgcatgcttttccccagatctagaaaactaattataaagttcatgtgagagaggaagtgcacaagagtgtaaaaatagccaggaaaactctgcaaaagaaatggagaggtcctctgcccccgaaccatctcctggcctccgtaatggaaccacatgacaccaggacccatgtaggcaagcaggcccaggacatgaaaacccggggacagaccccagtgcctagaacattcagtctataaggtagcatatgataccggtgaggcaaggatggcttgttatacaagtggttaacgttaacactggagaagacggaaatgatttgattataccattattagataatcctacggcgcaaggatatgacaaggaatccttcaggggagggcaaattttaattaacttaacgagtgtagaaatgttgggacatataaaaataagaggagaggagaaagagaatgggtaaaagccaaataaaaatcatagtatagtgttttgttttaggatatgtttatttgagaatgggc

SEQ ID NO: 514001 - DNA, 1306 bp, Homo sapiens
cttgtgtgtttgtttgttgtgggtggcgcaacctctgtttttgttgacgcactaccggggggctccgcggtggattagtatgttttctcttggtgggggtgccgctcaatcgtctgtgcgctttgtcctcgcttttgcctcaatatttgtgggttgttggttgaggctgctcgctccttctgatgtaatggtgtgtaatttaaccgaccatcgtgtggtgattatagtacccgcgggcccccactcgttgtgtgcgactctccatgcgttgtggagaatccaccgcctgttggatgcttctcatatggggtgggccagaactcaccccaactagggagcgaccgcttgtgggccgataatgcttgcgcagctgtggcagacaagatttttcgatctcagctaaggtgatatgatgacacccaccacatggtggtcgtacattcgggaaggcgcgacaaatcactgcttgtgggggagaagagatgacgccgcctcaagtaagaatagatattgatgatcgccgactctccaccactgattgttggtcgctgtaggcacaacaatgtggggggcgatatctttgtggtgccaccccccacctgtagaacaattgtgagcgtttgtggcgccacaacacctccccccgtcttataaagatctaagacgacgcttttgtgtagtacacaggagtggtcgagaaagatgtctacatcttctcgagaggtgaacagcacccaccatctgtgggcgactaaaagtcacgtgatgattctcgttagggcaccacatttggttggccgaccactggggcgacaaggtgcgaacagaaagagtgtctcagagggcgccccccaagtgaggagggctcaccactgcgcgctcattctccagcatgtttgtcctcgatggtacagtttctgtatgtgtggggcacgctccccaccggtgtcgcatgtgtcgcgcttctcgccacgagaaaacgcgcaacaaaatctgtggggtacgcacaccacaactgctcacggaggctgcccccgaatctcccgttgtcgagcccccttagttatggcccgtctcccgtccccgtgtaatttggttttcgcgaccaccacggggtgtttagcgcccccaggatgggcccttcttttttcctgccaggataagagttgggtccatcccatcttgccagtttctcttttaaacacccccaaggagcaaaggccacagcaaaaccaacgggtttttgcaacaaatttgaggggcaaccagggcgggcccccaattaagccccttgtaataatttgta

SEQ ID NO: 514002 - DNA, 734 bp, Homo sapiens
aagacttgtgccggagccgactactggagatgacagtgatgctgccacctttaagccaactctccccgatctgtcccctgatgaaccttcagaagcactcggcttcccaatgttagagaaggaggaggaagcccatagacccccaagccccacatgaggcccctacatgaggccagcgccctgagccaagaccccagaacacagccccaggtggctgcaaggaggctgcccgcctcagctgtctgaaggagggggccagacagcgagaacgctggcagcagatgggtcatccaaggccaagatccaacggtccaagagagagacagaagaagttccgataacccgtacctgatctgaagaagagacaagaagaagagtagactacctgaaagccctggcgctaaacacgtgtcctgtccggagcgacacctgggcatctgccaggtgtacccgggcaacgatcgagggctgctagtcctaggatgtcagatggacatggcaaaagaaaggccaagaccactcacgccctagaaaggtaccacaacttcaacagatagaaaccaagaccaccagaagtaaagacccacggaagcagtgaacacacaaggggtggatgctacagaggaaaaggccacaaaacacagaaccatagagccactatggacctccagcagacggcctcaagaaagcaaggaggagaagaaaatgagcacacaccagaaacggagagcaag

SEQ ID NO: 514003 - DNA, 314 bp, Homo sapiens
  misc_feature (135)..(135): n is a, c, g, or t
agcggaagcgaagtagagacagaagcaaaggaaaaagtagcaaaagcccttgacgaacaggccaagtaggaggaaaggagagggcgacggaggcccccttcaaggaaggttcgaggattccaaggattttagganggccccctaccaggaaggttccttaatttcccgaccccaaatttttaacacattcccatttcccgggaaaagatattgggttttgccctatatgcatataaagatagagcacgagagcacgctttccccagagcacaaagtttcacatcacgagagagacacagagccccctatagaga

SEQ ID NO: 514004 - DNA, 156 bp, Homo sapiens
gagatcaaatctgaagtattaaacagaaaagacctgaagaatatcaacttgaatatatttcattccagaaaatatttatgtctatttcaacactgactcattttgctatgatggcagttttgtgtacctggtgacttactcttaatgttagagata

SEQ ID NO: 514005 - DNA, 1273 bp, Homo sapiens
  misc_feature (1)..(1): n is a, c, g, or t
  misc_feature (992)..(992): n is a, c, g, or t
ntgagtccctggtgcgcttcggctcgcttctggtggtggtccgtcgcgctatcgctggggttgttggccggggcgcccccggggggtttgtgggggtgcgcaccgtggtgccctcgtgtgacggtggcgctttgcgccccacgaggggggatgaccatgtgtgcgctggttccccccgtgtggtgcgtggggccacacagagcgggtggggggtgggccccgcgccccaagtggggggccagcgggggtccccccttgtcgggggcgcggagaggcgcgctgcgaagttggcccccccactgttggtgggagccccacggggcccttatgagtgcgcgtttgtaaaattaagcggacattggcgttttgggtattgtgggtcccctctcgccccagtgtgggagggcgtggcccaacaggggtgggaagttgtgccccacgccctttgcgggggagaaagttgagggcgccttggccgcgggttctggggggccgcttttcttggcgtgggccccctgtggagggaccacttgcccacgcgtgtttgtgcccacgcacacgtggacacacttgtttggcgcgacatcgtgtgaaggcgggtctgggcgcttggcgccctctagtcccccgcactggatggggcgtcggtgcacacaggcgtctctcgggcacaaccacacagcttggtggtctgcacgcccacagaatgactctctggggtgggctcttggggtgtatagagagtctataagtgttgtaaagtgggcgagagcccctctgacacaggtgtgaaggtgcttgaagggagaggggggctcgccacggtgtcacgcgtataagagttcttggagaagaccacgacacgtgacacacgcgctttgggaagcggcccacgcggggacactttctcaaaagggcccacagagaagagtttagcaccgcttcggggaaaggaaggcacgtgggcacagaaggcggttgagagggacacncggggccccctaaagttccacgccgagggaaaagctccggtttggggccccctgttacgcctcccgctttggggtgcgccctggaacgccttttctcccacgcgtccctccacgccactcacgcacgcctcttgtcaaagcttttgcctcgccccacagtttaatccccacaaccccacaaatcaaagccacccttttttcaccggtcactatttattttttgttctctttttttttttgtaagaaacaattccaccccacacccatgccaaaacccaata

SEQ ID NO: 514006 - DNA, 1059 bp, Homo sapiens
agacgttcttcgccgagagtcgtcggggtttcctgcattcaacaggtgcttggacggaacccggcgctcgttccccgagcccggccggccgccgcatagccagccctccgggcaccgtctatcagccgacaccctccggactggcccaaggtcccccgaccgtcgctcacagacgaccgcagcagccgaccgctcgaccagtccggccggcctctccattaagtacagccgccatgatggaccagaagttctaacgcttcgtcagggtgcagcacagaagttaccaaccagggacttcatcgagcgccggtctaatgaatacggccagactcaataccttgggagctctaacgctcatcactaaccggttagccgtgatcccaatggtgcttatacctaacctctggcacgcgtccggatggagtgctggccttttggtagagaaagtgtagcgagcgcatagagtatcctatacgtatcaaccaattgtacttccttggacgcgcaggagcgggaactctttgactcgacgtaaaaactgagtgaaaggctggctagaacatcactaggaccgaagtgttgcggcccggtataggtcctttccctataccatggcgagtgattccaatccaagaggcccaaggaaagctggctggatagcactggggcgaataaaggccgtgtgctagatattgacatgactgggacggtttgtgccactttcacatcatcctcgcgggacgccgacacacagttggtgcacttacacggacaccaaactattctgagcagagcttagccgccagaaaagggtgggtgcacgcttggatctgataaatgactggaacgccccccaatttgtggggtgattggaacttacccgttcggacgaaacacacagttcattctcttgggatattcgacgcccacgcggctgaaaaatgcccatttcatctgaacatttggcggttgacccaacttttggaatcatcactttggccggcatacgaatgtggaaagccgttcaggacattcttggcttggccggcgaagcaatcg

SEQ ID NO: 514007 - DNA, 1275 bp, Homo sapiens
cgacgctcctctgttttaagtgtggcacacccctccgctctcagggtgtttccgccgcctctgtggtggtggactctgccccccaattccgcacaaacccccttgtggtgttgtttgcgacccgcgccgcccctcatttgtgtgaaagggacctcccccccccgggggggtccgcgggatgttcctcctcagagctcctctcctcgggggacctgtctttaagaccccttttatgggtcccccgccggggggggcgcccggcgggattatcaccagagatggttgcgcacccaccacgggggtcaaccctagcctttattgtaccccccatttaagggccgctgtaatttttaaggggtggcacccacctttttttgatgtcaacccaagtgttgtggtgcaccacacacataatatacccagggccttggggtggacccccggtccccccgcggagattttcccccccgcgggaaatattcccgtctggacaccccccacaggctgttctcccccccggggggggaagaaatcctgggaagagagaagttcccccgctttctcattcttcgcctggcacacccctggcgtttttttgtgggcgctctgtttgcccacactgggcgccacgatagctctcaagaaccttgggtgccccccccttgtcgccgagtcttgtagccgcttttgtggccccaaaaggtatccacacacccagacgtctctctctcagaaaatttgtaaagagagagagactctggggcccaccccaaaggcgctcaagatgtttgcccgcggccagggaacattctcacggaaaccccctctgggccccacgtataagctctgtggggcacaggcaaagaccctctcgggtgcaccctcgttgggctaacaccacaggagacccctggcccctctcgtggtgcacagctctcacaggcacagtctctcgaggccccccgacccaccacgttgcaaaggggtctccctgcgtaattatgcgcgcccccacccgcccgtggaagttctgtgacccgcgttctccttatgaacttcttaccagaaagcccagcgtcccctggaagccctcgttggcacgctctagctttgcacgtcgtgtaattggccccagtcacttgtttttctcgcctcacctttccccccagtgtctaagaagtcacatgtgagcctcgtgtcatctccggggtggccacccggctagatccccggtggttttgtgctccaaataaaaacccccagtgacccctgaga

SEQ ID NO: 514008 - DNA, 1537 bp, Homo sapiens
  misc_feature (260)..(260): n is a, c, g, or t
  misc_feature (328)..(328): n is a, c, g, or t
gcctgcaacgccgcctttgtggccagtctatgcgtgatgcgtgctgatccatcacatggtgagcataggtatccagccatgatttgatcccagggtatcagaccacggttggatatcgcacagctcggacctgcagggcaccgcgtgtgtgccagacgcaagtacacagctatcgctgcagggagggcgctagaagactcatcacgcaagatagtctggtgcataagtttgacttgtggaacgttgcattgttgttcaanctcgtacaacatgatggcacttggaagatcggtcgtattgcacgtgcgacgctatcgttgagagctgnctatgcgttgatgtccgcatgtatagacttcacattgttgttggaccttaggccaccgttagagtgtgacgcgagtcctatcggacgtggctccatcaaactgtacgcctggtggaccactatgagtgtgcgtggggtctgagagccccgctgcttcttactcatgttcctaggccaattcacatggcgttgtcgtttggctattaggactaattgcgagtttaccgaggcctgctaggggcgtagaagtcggacttcgttgcgtacgcgtccggacttcaccttaatttgagttagatttgctcattgcgaaccgtgctctggattgaggcaagtgcgctctgacaagagcccaacttcgccattttttctattgagcccaggcgccgaaatagccgaaatttctaagtctttgagaaggcgagaaaccttccgggcgcagagttgcgcattagtttgacagaagaagagtgcctttgcaagaggagcggaccaagtgagttcctgaggaggaggttgatcaccccgttcagcgtgctcttgagaaggaacgtcttctggcgaacgagcgtgtcaattgaaccttaaatttggccccagttaaaggccattctgttgggcaccggttttccgttaggggaaatatgttgcaaacgtaacgccaatttagaggttatgaccgcacccctaacagaaatttccaaagggggaacgttaggtgcgacacacccccggataggttttatcggtcggcaggtttcgcgcagggaccaccgattgtgtgagcacaacgcaaagggccattcgcccaggggggtagcaagatttggttggaaacgaggcaagttcggttggggaagggggtggtcctttcatatcgttgagaaaagggaagcacgcgtttgatttcaacttggcgaacgcgccttgacaattccctttgtacgcgcacccactgtggtatagtttttccccccatgtttgaggttccttagtgatgcaaaccatttttggcggtgcacacaggagacacgtctactgtagaggggcccataaggttacagagtgtccccctcatgtggcagagggatactcctatgcggcgaggacacatattcacacaacagcaaacaggggtgtgtagtcgcaaccaggagccactagttgttgtgataaaagtctcttagtagcttgtgcgccaccagagtg

SEQ ID NO: 514009 - DNA, 293 bp, Homo sapiens
accaaaaaatgcaaaattagctgggcacgtgcctgtggtcccaaatacttgggaggctgaggtgggagtatcacctgagctctggcagttaaagctacagtgagctatgactgcaccactgcactccagcctggtcaacagagagagatcctgtaggaagaaagaaaaagaaaacagaagaagagaaagaaaagaagaggaaaaataaagaaaattaaacctaagcaaaccgacaataagtaacaagattgaagctgtaattatgtctcccatcaaagaaaagctcaggacct

SEQ ID NO: 514010 - DNA, 223 bp, Homo sapiens
tggatagggtcaactcctctgttacttaactgtttagtccatagaggaacatctctgaggacactatgcatcattatcttgttgagcagagttaaaaatttatcacccatagtaggcctaaaagcagccaccaattaagaaagcgttcaagctcaacacccactacctaaaaaatcccaaacatattactgaactcctcacacccaattggccccttatcgag

SEQ ID NO: 514011 - DNA, 132 bp, Homo sapiens
ccacccaaatgctgaggtccggggggtctgtctgcataagactcatagtcagtaatcttcttcatcgggggaccgggtggttgtcctcaggcttttgataggcagtagctaaagtcaccaggtgtcttccct

SEQ ID NO: 514012 - DNA, 505 bp, Homo sapiens
  misc_feature (274)..(274): n is a, c, g, or t
  misc_feature (330)..(330): n is a, c, g, or t
  misc_feature (400)..(400): n is a, c, g, or t
  misc_feature (415)..(415): n is a, c, g, or t
  misc_feature (433)..(433): n is a, c, g, or t
  misc_feature (437)..(437): n is a, c, g, or t
  misc_feature (488)..(488): n is a, c, g, or t
  misc_feature (505)..(505): n is a, c, g, or t
cctgttggtgcggatgatgtagttggccgggaagccgccacccatgttgatcagcttcagctcgatgccgtcttcttctttcaggcgctcgaagatcaccttgaccttggcgatggcggcagtcccacacgctgatgtcacgctgctgcgagcccacatggaaggaaatgccgtaaggtaccaggcccaggtcgcgggcgaggatcagcaggtccattgccatgtcggtctggcagccgaacttgcgggacagcggccagtcggcagtggtggngccttcggtcaggatacgcacgtacactttcgagcccggtgcggccttggcaatgntgcgcaggtcggcttcggagtcggtggcgtacagacgcacgcccttctcgtagaagtagcggatgtcctnggacttcttgatggngttgccgtagctgatgcngtcngcgctgacgccacggtccatcaccttgtcagttcgtagatcgaggcgatgncgaagctcgaacctttn

SEQ ID NO: 514013 - DNA, 580 bp, Homo sapiens
tggctcatctgtcaggctacactcatagtttcctcaagttcaagtttagaatctcctggcttacaaaaccgcttttctacttctaacccaacgaatcaagcattcggtcattcggtcatcctccattcatcggttcactcttttaatctattcaaccatccaggcacccattcaggggtgatggataggctccctagggattctatctgggggatctttaaacttccgggctggctatgaaacaaacagtccggactgatgtggcgagatatcaggatgacatggcgccatgtgcactctggaccgcaacactcacactgtctagtgactcccaaagcaggcgctcgctcacataagcggcatgggctcgctaatagcctcgaaacctggtctcagaggatttcatattattctgtacttaaatccgagacatttcatttagtatgatatgttacaaatcacaatttgtgttatatgttatcaatatgtaaaccgtacaatatgttacgaatttacaaaaaagtattaaaaggttaagaatttgccaaaggtacaatatgttacgaattctcattcgtaa

SEQ ID NO: 514014 - DNA, 451 bp, Homo sapiens
  misc_feature (6)..(6): n is a, c, g, or t
  misc_feature (33)..(33): n is a, c, g, or t
  misc_feature (124)..(124): n is a, c, g, or t
  misc_feature (177)..(177): n is a, c, g, or t
  misc_feature (338)..(338): n is a, c, g, or t
  misc_feature (368)..(368): n is a, c, g, or t
  misc_feature (392)..(392): n is a, c, g, or t
  misc_feature (423)..(423): n is a, c, g, or t
aaaggnaaataagatttctcgtaagaaaccgtncccacatctttaaaatgccccatttcgtggctcccaaaagatttacacctccacactgaggccggaagtggttttcccctataaaacatgncgaaaagctttcttgtctccaaggaaacgccacgtaatgagtcaaagctgttngacgcgcagaagtacaagctaccggaagtgatgcgcccctactaaagccttggggttagtaccgtcgcagcagtctcttccgacagttgtgttgtgccaatggtggagaagaaaacttcggttcgtcccaggaccccgggagcgcgggtgctggaccggtnccggcacgtcgcatcaaccggcagctgagncctggagaatgacaacttccaggnatgaccccacgcgggcttccctcagctcggnaagagactgcctcagtttgatgacgact

SEQ ID NO: 514015 - DNA, 835 bp, Homo sapiens
gtgacagagctagactctgtctcaaaaaaaaaaaaaaagatcaggcccaggcattgtagtgagacccctgtctctacgaaaaaatacagaagttattcattggtggtgtatgcctgtggccccaggtacctgggagactgaagcggagccattgcctgagcccgtggaggtcaaggctgccgtgaaccatgatcaagccacttgcactccagcctgggtgacagagaggaagacctgttgtccccccagaaagaagaaacatttagttgcagtcaaacccacgttctgtctccctaccattgtgtagctgtgggaccctacacaggtgaaattgccttttgagccagttgccctcatgttaagatctcgagatgaccattacttaaaattggtcactcgcatatatcttatgttgtggtgttacctgtgctcgtttaatgtaattggtgtaaagaaccgggttatatcccctactccaaaaggagcttgggccatggagagcctttcattcgtgaagtaaacaggacttatctccttctggtcacagttgacgcaatgtgactgcgatgcgctcgacagcttgcccgcagtctacccacacccccagactgagatttgaagaagaagcaagttgacgtattcttagaagaccagcgggagtaaacttgcaaggcttggagaattcgggccactcccgggacaaatcaaggccaatgccaggggcacctggtgctatatacaccgactctgagggaccgggtccaccgggccctggcttggaagtggtctggtcccaaagttggttggagaaggatggccggggtcaaactagggc

SEQ ID NO: 514016 - DNA, 375 bp, Homo sapiens
gtgactagttaacttcttgttcagtttgttttaatactagtgagagacaggacgagctggatttcctaggccgactaagaatccctaagcctagctgggaaggtgaccgcttctacctttaaacacagggcttgcaacttagctcacacccgatgaatcggatagtaaagagacctcactaaaatgctaatttggcaaaaacaggaggtaaagaaatagccaatcatctattgcctgagagcacagcgggagggacaatgattaggatataaacccaggcattcgagccagcaacactacccgctttgggtcccttccctttgtatgggagctctgttttcactctattttactctattaaatcttacaactgca

SEQ ID NO: 514017 - DNA, 1886 bp, Homo sapiens
  misc_feature (1886)..(1886): n is a, c, g, or t
ggaccgccatgcagctgacggtgaagggcgctgcacggccgcgagtgcagcctgcaggtgccagaggacgagctgtgtgtccacgctgaagcagcgtggatcatccgcagaaagcttgtagacgtcccagttgctgccgatgcagctggtatgcatgttctaaggggcaaggccctggcagatgggacacgacatctcggattatatcatcgtggctcctaactccatagcttctaatcttagtgtgtcgataaccccttggtagaaggtgctacttagaaatgaaggtcgaggcccagaggcgtgggcgactcgcccaggccccgagaggtctggacaggtgagtctccaaagtcattggcccgccatcttcagtgctggcagatgccaggtcagggtcctggaacagtgtacagacgggattacggagaggtccctgagttcgcctgactgctggacgacatcgaacggttggcgcagccgcgttcctgcaccctgaagatgactgagaacaatggtagaagggcttctccaaagtagcaattctcgagagcatggggaggtgcccaacgccaggctaccgctgcatgtcgcactaaggtgtgttctcctgttgcgagatgggctcatcatcgatcatagctgggcatgtacctgggcctctggcccaaggtgctagcgcacctccttcacagcattgactgggttatgttcccaacctcaggagaggagacccggacaccagaggcaccggggatgagtgggacagccaggcgaaagcacgggctttaaaggctggttagaaggagaaagggcctgaaactggactccaactaatgtatccccagtgaaatcacacgtacctcccgcctaacggaacagtacacaatgtggtcaaatcaaccaattagaagagatctcaccccttccgtaatttgtctatcccgcgatctcacgacacatcttcttactgacaacaacagaagagacgaaacacaaacaaacaacagcaacacacagacagacacacacagaaacgacaataaaaaaagcaacccagagcgaaaaccacacaacacacacacagggaacgacgcaagcccacgggagaaaagtgcgagcgagagaaggagcgaaagaggaaaagaaaaacgacaggaaaaggacaggagcaaaaacacggagagaagaggaaggagaggcagacaagcgacaccgccacagacagagagacgaacgaggccgcagacaggacggagacgggacggagagagaagaggaggaggggaggagggggaggaggagaggaacagaaggagggagaggacgaggaaacaggagagcgccaacacgcaagagcccaggcaaacaagaaagcagaagagaaaacaagaaaaccaacacgagcgacacacacggcgcgagccgagagagacaacggcagagacgagcgaggcaacagacaagaaagacggaagagacagagcgagcagagaagagagagagagaggagcagagaagagaacgaagaccacagagagacgaaaggaaagaagaagaggaaggcgcacaacgacggaacaacacagaggagcagcgagagcaggcaggacggagcggaagtggaaggagcggcgacagagaggagaagagcgaagaggagacagaagatgaagagagagaacgcgcagaaggcgagtgaacggaagcaaggacagagcgagacggaggagacgaagagaaggaagaacagggagagcaaggaggcgaggaaggacaagaccgagagagcagagaggacgagcgaacagacggggagagggagagcaggggagggagggagagcgagacaaagaacgagcaagacagacacaaacacacgcccn

SEQ ID NO: 514018 - DNA, 96 bp, Homo sapiens
  misc_feature (38)..(38): n is a, c, g, or t
  misc_feature (86)..(86): n is a, c, g, or t
acttctaggccgggagaccctcgggcctggggcgggtnctctggggagggtccactgtgttactggccaccgcaggtcgccaccanccctccctcc

SEQ ID NO: 514019 - DNA, 143 bp, Homo sapiens
tgccagcgaaccagcacgtcctttgggctgaatgcctgcgtgccagtgcacgtcagctgtcaccagctctgtacagtgaccagctcctccgacgtgcggcgtgcagcagtgtggacctcggtgcctggaatgtgtttcctgga

SEQ ID NO: 514020 - DNA, 1397 bp, Homo sapiens
gacagaacgtccacttcattcttggctggcgatggacttctcatcgtcgtgcatcctcctctgccttgctgtgctggtatttagttgtctgaggctgtgccctccgggcacctggtgatagtccgaatgtgtcctcgtgtctggtcgaaagtatctcgagtgctgtccggtcgcagtcctcgcccgtcgatgtggccgttgcttagttgtgccatcaagaggcttgttgatagacgtccttggagaatgccgatattcgtcgtacttcgggatagttgcctagtgcagtcatttgggcatgcgtggttattggcgtttgcaatagtgcattgtaggcgacgtgacatttcagtatgacatgtggcattagtctcccaacgttagggagtactagaacactcctggtaatccttttaggctcggggaaagtgtgccaccttttgcgtctttatccttactctccccactttttcgcaattttaacgatttgattgggcaggcaatgaggcttgtggccaattttgcttatccaggccaccacctcggactccttccccgggacctctcccgcggtgggcgggtttaagcgagtccaattttaggcgccggttacccgtggctctgttgtgttgccacctccctttatgttcccgtgtcattttccccctcttcgatattgggccctttgttccggtgctatcgccacacttgctcgccaaaggggcgacgattcgcaagggtgcaaccctttttcctttccgcgttctcagaggttggcggtctccctttgacatttgtggagccagatagttgggaacttagacggtgcagttccaccatgtgttgttttgatagtccctttacagcatggatagattggcccccgcattgtttgttttcccactttaacaccattggccgactggtggttttcatacccacccgcgtacaactaatttgcattacttggtcctagaaccagttgtctatccggcatttgcaaggattcaaacgtattataaacggattatcgcccttgtgttgacacaaggggccataacaggaactcttagaaactttttagggccaaataggtaccgttgacccgcctcttgcctatggtgagaggcgtcagcacacagcctcttggtagccgcggcttttagaacagctagaacgtcctcttgaacaagaaagctccaggttttacgctgtcgaggtcaccggcccgggccactaattcgagatttttggacagcggtagctggcatagtcaaggttaacttcagagcgacgctcttcggcatctggcacaacacgtatacctcgtgtaggcaacagacaactctacttgtgcaccgcaaggctattgttttccacaccccaataaatttctc

SEQ ID NO: 514021 - DNA, 205 bp, Homo sapiens
tccatgatggaatgtgtgaccttataacaagagaaccagaaagctgtgctctctccatcccctcaccgcatgagaacacagcaaggatggcagccacctataaagccagggaagagagccctcatgaggaaccaagatgggccagcacccagagtctgggcaattcccatgtctccaggagctgtgagaaaatacattttctggt

SEQ ID NO: 514022 - DNA, 1049 bp, Homo sapiens
  misc_feature (304)..(304): n is a, c, g, or t
  misc_feature (391)..(391): n is a, c, g, or t
  misc_feature (403)..(403): n is a, c, g, or t
  misc_feature (444)..(444): n is a, c, g, or t
  misc_feature (510)..(512): n is a, c, g, or t
agacaaccttagccaaaccatttacccaatagtaaagtataggctgatagcaaattgaaacctgagcgcaattatgatatagtatccgcaaggtgacaacgatgaagaaagttagtaggccaagtcgataatatagtcaacggacttaacctccgtatacctctcctggcataactgacatgtaacgtgagaatactagactttggcagagcgatgagactcgaaagtcttaagaacaccctcgtagaactcagcacgaagtcgtaccgtgaagaaggcagactaaaagtagtcacatcgccgntcatattgctagtccataatattaggtcgggcacatgcatgttactgaggctacgacgtgccgatcagaactcgttacctgtaggcnctgggctgtatnatgcttgggattgctcgcatagcatgaggacagtctctagncttcacacatgttcaagagttttagcgcccacacgaaactccgtactgagaatgcccgcttgctcnnnaatttgaactagttgagctcccagagcagcagtgcacacgacgctccttatgcgagcgacgtagcgacatacacatacctcttggtacgaagaagacgtcaatacacacaattctaagcaaccgcattcagtatggggcctaagaatatctggcccagctcaatctgtacagacaacggcgttgtcacagcgtcaatgcagcgcacttaccgtacaaagaactccgcaaatcgatataagctgcaactccatcatcactccaaatctggaccatatctagtcacccatatacgacagaactacatgttgacgtataaacttacacatgcaataacatactcctgcggcatcaagcctgcgctcacatttaaacacgactgaaactgaccaattaagcagcccaatatctacaatcaaccaacaagtcattattaccctcacttgtcagcccacatacccctccccccctacaccgacacacctttgcgccccccctaggcctcccgagacatctctacaacccatcgtcggcgcacc

SEQ ID NO: 514023 - DNA, 133 bp, Homo sapiens
gcttggttcctcccagctgtagagtggcttatacgccagatctcgctaccttcttataagaagaaggtgacatacgctatttggacaatgtgactatgtggcggttgaagggcggtcgactagggggattggg

SEQ ID NO: 514024 - DNA, 271 bp, Homo sapiens
gtactacagactcacagtgctgggcttcaaggcttgcattctgttggagtctgtcagccacacaggacacatcttgtgatgcggatgacgtggaagggtggagccgcaccggatatggaagccactttggcacaactttttaaccatgtacttattggaacaaattcgggcagctccagggcttcagaggacagctgctcatattcatctgacaccatgtggccacaaagcggaaatcatcactttgctttttccgcccaggtcaaaaatg

SEQ ID NO: 514025 - DNA, 1236 bp, Homo sapiens
atggagtctcactctgttgcccaggcctggagtgcaataggcgaaatctcggctaactgccacctccaccatcccaggttcaagcgactactccagacctatagcctcccaagtagactgggattacaggcactcgaccatacttgcctggctaatttttagtatatattgtagagggggttatcaccttgcttggacagacatggatcattgaaccccagaacctcaggtgatctgcccactatcagccatcccaaagtgctgggattacaggcgtcagccacatgcagcccaggacagatgtgatactctctggcattggactataacattctagacaaacagcagcactagtagtagccctgcaccacatgccacatttcacatttcatacatcgtcagccagtctctcttgctaagcaaacatactttctccaaggtgcacatcccaagatttggatctatagtgtttgagggaattccacaggcactcattgccatacctggattatataatcaccagttgtcaaagcaataatctatgggcgaaaggattaaatcaagaaaccagaagtttggaaaagtagagtaaggtggcagcaaaacctcttcgcgcaagacaatctctcaaggcgggtactaggactaggaaaaccatagaagctattacgcttctaataaacgccaggggatcactacattcttgggagcccttacaagggtaaaaccacagcacttacaagaccatgtatcacaatacctgccaatttcggccactacagacatacacaggtggccccaaggcgccccccgggcctgaagacacccaccccgcacgggccacacaccgtaccgccacacatcccaccaaaaagagaaagaaccaggacccccgacaaaaccgaacccgcgaaccgtaaaacccacagagcacaacatccactagtgaacccgcggaaatggcacaggcagggaaccaggaaagacccgcagcctccatgcagcagggcaacagaacagaggcagaagacgagaagagggcagaacgagagagacaacggaaagaacagacaacgcgacagcgacaacactacaagcgccggcagcgcaggctgaccagggcaacagaaaagcggccggcgcaacagcacaaaacacagagaaacgagaaaagagagagcaaaacacgagacagagaaacaagaagatagcgacacccgtaagacacaaaaaaga

SEQ ID NO: 514026 - DNA, 413 bp, Homo sapiens
aatagtcagcaataggggagacagatacagaaatagcagacactctataggaaatacacctatttcatgaaaaaaattctatagagataatttatctattcgacttttcttagcttctacaaatttctataatgagctagtgagtactttagtaataataaaagctttaaaaagtataacaagaaataggcaaggaaaccaagtctgggtacatctttcacatttaggtgctccctcaaatggtccaagatactgagaaaggactatgtacttagaattgcataaagagtttaataacatttaatcccatttaagcctctggataacacaacgaacaggtaatattactatgcagagaaactgaggaacttcacagctctagcaggcagcaggactcaacacttcaagccaaa

SEQ ID NO: 514027 - DNA, 204 bp, Homo sapiens
cggccgcatcttcttttatttaggatctataattcacccaatacattttaagaacaatttacaaactcaagttcatagctggtgggaatacagccacataataatcttttaaatgacaaatcttcataaccagttactaataaataatcatcatcacaatagcttcagtaaaaaaaccaatttaatttaaaggtgctttcttat

SEQ ID NO: 514028 - DNA, 496 bp, Homo sapiens
cccagcccatgacccctaacaggggccctcttctagccctcctaatgaccgtccggtccttagccatgtgatttcacgttcgcactccataacgctccgtcatactaggcctactataccaacacatctaaccatatactcaagtgtctggcgcgatgtaatcacgacgaaagcacagtagccaatggccaccagcagcaccaccgtgtccaaaaaggccttcgatacgggataagtcctatttattacctcatgaagattctctttatcttcgcgcaggtattctctgtctgatgccgtttctagccaacgtccatgaccgtaggcaccgctacccccgccaaaatctaggcagggcgtcactgggacccaccatagcaggtcgatcacgcccgagctgagtattcgccctaataaggtcccatctgcctacaagcactattccctggttcattttaaacctttacgggccatttcaaggggaagcttattcact

SEQ ID NO: 514029 - DNA, 515 bp, Homo sapiens
gcggatcccgcggctgaggaactcgcacgagtattttttttttctttgtagtcaaggtcttttattaacttaaaccggtacttgccttccggcttgttgcaacaagttctttttacaacatttgtcccactaatttctttctaagagactttgcggtaaccccccaacaccacaatttataagaggggccctttttaaaaagcgcctaattttgccattctcatccaccttataaaattttagggcagcccgattaacctcctttttttgggcctatccttctgggaagggggggaaaacttatttttccttttcttaccccccccccaaagttttaccccatcatgaagggttaccctctggccaaattctatatagtttataaaaatccggtaaccttggggggggccctggtccccattacccctaagggggggcggtacaactctcttggccgcgcgttaaaacccccggaatgggaaaaacccttgggtccccaaataaaagccttgaag

SEQ ID NO: 514030 - DNA, 102 bp, Homo sapiens
cccctcataaccgtggtttgggacgagttggctgagtcccttccaactcagttccatatctgtcaagtgagtatacccatgtgcgtcaaaggataacggttc

SEQ ID NO: 514031 - DNA, 796 bp, Homo sapiens
aaggcaagggaatcaataaatttattaatggttactttaacacgaatctacaaagagacctttcgttttgtctggaccccaaaaactaataactgaaaagtcattttcccaaacctgtgagctgtgtttcacctacctgtgctacccctcacagtgtgctaattaactggcaaatggccatttgctggggcttcacacacattccggggtcttcccctttttctggatgtgacttccctcccttaccccacacctccctgcactggtcccctgtctgtgccctgtggtggaaatgccctcgagcctgtttcagcccagacaaagtattcatcttaccagtccatgccctggactcctctggatgtggtcacccttcctctggtaatcacctcttacccggtggtatatggggggataaaggcttggataggaaggctcaggtaactggagtccctgtgggcactttggaaaaccagtggccaccccgatgataaggaaggacagacccggggacttcccattatcgatatgggatatgatcatctggactatgcaccctcactaactggatggggactcctggctggttacccccaaaagctcaaaagaacccctattgggccaggacacagggcttttccaaagtaaggtcaattctcggaaatgtcgagaagagcaaattaacgacctgggaacttttccagaacacaacacaacaaacaccaacacacgcaaaccacacaaacaccgcaacaacacaagagcgcaacaacagaacgcgacacagaagacaaga

SEQ ID NO: 514032 - DNA, 390 bp, Homo sapiens
tacgattggaacacggtgtccgctgcgtcaggacaaccggtcccgtcgcagacggagtgcacgtgccctgcgctacatcctcacgctcggtggagggacccgtgcggcgggacggtgcctacgggtacttgcagctgtgacccatgtggcaacccagagctgcgccctggtggtctctgtgagcgccacgctagctgtgctgaaaatgccggtttaaaaagggataccgagggacactacccgtctcttacataacgcaataattattagtatggggtaatgatagattctttcgaacaaacatatggggtatcaaccaaataagcggtccaggagtgagcagctccgttctagaagatgctactccaaatgttaccaaagacgagcact

SEQ ID NO: 514033 - DNA, 147 bp, Homo sapiens
acctcggacacacgggacccactgcgggcctctgcgcctctgtaccaccacctgctccgaccctctgggacccaccggtcggcggcctcctgtacccgacgctttggcgtccccgtcttcgtgccacgttgccggggtacccgacgc

SEQ ID NO: 514034 - DNA, 123 bp, Homo sapiens
caaagattggacattctttgaatgtctggtagaatgctagcgtgtgaatctgtctggtcttcagcggatgatttctccccttccatccccaactcctgggataacacatcaggtttttcgcca

SEQ ID NO: 514035 - DNA, 219 bp, Homo sapiens
  misc_feature (49)..(49): n is a, c, g, or t
tctctccacactggacagaaaccctacggagtgtgcgtattgtcagagnaagcttcaggaatcagagtagccttgctgttcacaggagagttcacagtggtgagaagccctatagatgtgatcagtgtggaaaagccttcagtcagaaaggaagcttaattgttcacatcagagtccacacaggcctgaagccctatgcctgtacccagtgtggagaga

SEQ ID NO: 514036 - DNA, 200 bp, Homo sapiens
ccctagacaagcatcctatctatgttccacagcagagacattgagtataccattggcataatgtcataagtgacttcaatctgagtgaacacctcgtgggttgcagttaggtgatgatggggttgcaaactttctccagctctttctgttgatgttcaaatccttcctgtacggcagtctgattcttatcaagccagttg

SEQ ID NO: 514037 - DNA, 98 bp, Homo sapiens
tcgctatatagtgagagagatatatctcgctacactgagtagagagagctctctctctctcgcctctctctagagatatatagatagagagtgaagag

SEQ ID NO: 514038 - DNA, 132 bp, Homo sapiens
actaggtgagaccttctctgatctctctcttatgcaaaactatcgttatctagttcctctttgacacctgaggaaatacaatcagtgaattatgggtcattatccctgtacactacatcattaggcctagct

SEQ ID NO: 514039 - DNA, 419 bp, Homo sapiens
ctctagtagtttgcagtatgatatgtcgccggaagctgcactggagacaagcttgtaaatatatacagaagacttgattgtagcgagtctgatcaaagcctaaactgctgacacagaaagatgtgctcaatatgtgccgacattagaagcttcaggacccaaaggataacgtatgcatctatagtctatacctgctccttagctagatcagtacccgctgctgcgctctaatgaagcctcaggatatgcacatgttgactacatctccactggactgtttcacggtgaactcccatcatctgactactatgggaactatgtgctgcttgactgggcttataatgagcgtcataatgtggaacaggccaatggtatacagtctcacaggcaagaccatcaagatacatttgtacctctgg

SEQ ID NO: 514040 - DNA, 844 bp, Homo sapiens
  misc_feature (9)..(9): n is a, c, g, or t
  misc_feature (21)..(22): n is a, c, g, or t
caaaaaaanaacaccaccaannccccaccgcaaaaacacaaaccacaaaacaaaaatattattttccaagagcacgcctaactgttttcaattgcattacgaagaacacagctggaagtctgggcttctttttgtaggaggttatgaagaatacaatggaaacaaaccttttttcatcaaatccatcgttgaaggaacaccaccctacaacgatggaagaatcaaatgtggcgatattcttcttgctgtccccggctcaaccacatccggaacgacacacgcctgctcggcaacactgccgaaagaacctaatggaacacctattactcccattcatcactgaacaccccctttttacccaaccaaatatccgccccgactaataatatattttcctctaatgtatacaagattcaataaagtatttaaacatctcagaacctaattattttcatctttttttcgcccggttcattggcctttatttttttttcctttcgttgtaacaaatttttctcaatacccgcattccattccccacattcttcttttttttccccctcctccttccccttatttcttctttttatttttccccccccccctcccttcatctcgcccataccccctattaccctccctttcacccttacttcccaccctcccctcttcttcccgccccactcacactatacgcccctgtcccacaaaacttcatagcacctcccccaatcgcctactagtttccccccacccatcccacactaacatttgtttaccgcacgatacccatctcatagataattttgccccagctccactaccacacttcttcaaatctccc

SEQ ID NO: 514041 - DNA, 949 bp, Homo sapiens
  misc_feature (1)..(1): n is a, c, g, or t
nacgcgatcgcgaagcggggagcctatctattcgtcatctgtgccctgtgggtcttctccggaattgtttcccccgcgtactacgttctgccaaggacactttgcccagtagcatattttggaggctctcgttctatttcagggggttgttctatttctgtcccgttgtcccccattgcgccaagcaatgtgtccgtctgtggtcgttggtctctcgcgttccattagtttttccgcggtcgagtattcttgtgattgagcctccgtggctacatcctcgggtatagtccccctccgtggacaaatccccgagccaccgaggtgcgtccccccccggcaaatgtttacagcgggacccccgcgcgaaacaaggaacagggaaaatgttatggcatgcgcccccgctgcaataggatttctgtgcggagaccacggaccgttgttaggaatcgggcgagaaattgggttcttgtggtggttcaaaaacgacccgcgttcaagccaccgaagattgctttttcccctcgccgccagttgtattatgagcccaccttggagtggcgagggcgcgacccccattcagtattagggtctccctcaactaaagataggtcccacgagtttgcctcacctggaccaatatgcactaccaaggtgcattcagggctagtcgacccctctgctcccatgttggaggaagaacagtcttgtagagtttctggtatcgtgatgaggacccgaagacccacgattctcccatgagcataacacattcggtgcaccgtgggcaaccggctcaaccaggggcggcttgcccataaaacaaggatgggacatggcgagacatatattcaacaagaactacgggtacaaactgttccctgtacccacaaaaaacgattttcccggggcccaaaaaaaaaaacattttttacaaccacacaaaaca

SEQ ID NO: 514042 - DNA, 124 bp, Homo sapiens
agagatgctgggactaccggtgtgtgcacgatgccaactaattggtaattggttgatagagacgaggtcttactgtgttagccctgcctggtcccaaactcctggcctcaagcgatcccttcac

SEQ ID NO: 514043 - DNA, 127 bp, Homo sapiens
gacagtatcacctatccattaatccttaagcagaaatacggatgcactctatattaccttgagcatgtgtcacacagatggtgccgtgcttatgttaatcaaataaccatgttccacaataacatag

SEQ ID NO: 514044 - DNA, 139 bp, Homo sapiens
gttgccaagatagtaccaaatggaaagagatacgttgtccaagtccatttacccatttgtacagctaaaaattaaagtgaagtagaaatagcataagataacagacaaagtatattattttaggtcacttaacattata

SEQ ID NO: 514045 - DNA, 993 bp, Homo sapiens
taacaggagcaaaacttatgttaggggcttaaaaaccaggggatttggccgggcgcgtggggcgctcatgcctgtaattcccaagggtgtctcgagattcgcacggcgtagacgccattgcacccgggcctgaagcacgtcttaaagataactttttcaagatctttattttatttttccttatagagtggtgcacagacatggttggggcgacatctccccaatctcttggggggtgaaattgggcccacaccacaaaccacagtgtggggccaagaggctatgtggcccacaatttcgtgagcaattctttctttcacaacagcgcgttacgacacatctcaaagccttcctccgagtggaagacgcctcgaagtgcactctgagacacacacccgcggggagccctctctttattacaccgcgtgggccattttccacctcctttgagcggggcgcgtttcaacaaacaccgcttccggtgggaactattttttaccaccactctcttgttaggcgagagaagcggcgagacacactctttacccacccgagaaacctcttctgatacacaccggggtggcggacctgtagacaccaacggtttaccggttgcggagaaatttaaatattttgcagctcacgcggaaggccttctggcgaacaatgtggcgcgctatttagcgcgggccccggtggaacaatctccacgatacaccccccacaagggtgtggctttgtcgtctcgttggatacccgccagttgttgggggggttcttcacaaacaccaccgcgggggagacgctcttaaaacgcaagaggtagaacgaagtgctctatcaccccagtggtggtggggagggcctagtgggtggggcgggcatattttacaagtatatttccccccacagcgtgtgcacgaaaatttgtggcgccacatttctcgagttcttgggggacagagcacaaccccattttacgctctatacaac

SEQ ID NO: 514046 - DNA, 171 bp, Homo sapiens
gcaccctccacctcctgggttcaggtggattctcctgcctcagcctcccgagtagatggattccagccgcctgccatacgccagctatgttgtactcttagtagagatgggatttcctcatatcgggcagtcctgacctcagtgatcaccactttgccttccaagtctggg

SEQ ID NO: 514047 - DNA, 1043 bp, Homo sapiens
  misc_feature (159)..(159): n is a, c, g, or t
  misc_feature (234)..(234): n is a, c, g, or t
  misc_feature (653)..(653): n is a, c, g, or t
  misc_feature (664)..(664): n is a, c, g, or t
  misc_feature (669)..(669): n is a, c, g, or t
  misc_feature (680)..(680): n is a, c, g, or t
  misc_feature (682)..(682): n is a, c, g, or t
  misc_feature (716)..(716): n is a, c, g, or t
atctcaggccatctgcagagaagaaaggtggtacataactttttcttgttagcatttggtaggggtgttttattgaccaaatatgttcccacaacctagttttttgtaactgactaaatatagtagatttttaaattttatcatcaaaatctatagacnatttttgattaaaatagactccacatctatgtcctgcttttcttcttattattaattacattgttgtataaaagnacaagacttcagaatcaagaatatcttgtctcttggcattgaatttatacaaggtgctctttctttaatgctgtctcaaaggacatattttttactcattaaaaaggaagatcagaatctagttgtatgcattgctccaacatattagtaattaaaattaggaggtaaatgtggtcaaagcgatagaaagacttgagatgtcatttatattgattatagcactctacaaacagaaattgttaaataatagtttatataaatattttgtatcatttcaaatatttgagtgcctgaagtttctcctcttgtatagttcagattatcaatttgaagacttactccgttagttaaaatgtttctagtctcgtttattatataaaagcaattttcagttaaatgtgttccgcttacataaaacnttacaaattantgagnatttaattacntnttcatgttcctgtaatgtctttagaagattttcntattattacctatcaatatatgtatgctttgtcaaagaaaaatcaaacatatatatcattgaaattgaaactttttaaaagtacttattaattctattgaaaaaccacatccataggaacaattacaatataatattgtgaacatgtaaacatataccctatgtctattttatgtataagcatgtatgattaaaaatatagtgaagaatttttaaacctagtattataaagtaaaaattagttaacttccgatgattatttgttaattaagataaaattattttgatttgggtgattttaaataaagaaaaatattaaattacatga

SEQ ID NO: 514048 - DNA, 191 bp, Homo sapiens
actctagagtatccccacaccaggctctagatgtctggttttcccagataaaaccttagttcacctttaaattttttactcctctctacaagattaattcctactttccacacagctatacctctttgtacaaacagttaaatttacaaggtgatttagagggttctgtgggcaaatttaccgttaactgc

SEQ ID NO: 514049 - DNA, 1393 bp, Homo sapiens
ccgatggcggcgtcactgacgctatacgatccggtcctcggatcccgagcgcggggagtgcagaccgactgtgagctagcttgtaccccatcctgcgtgaccgtacctggggacacagagccctccgatggtagcccggtggattaggattaggagccaggacctcacttacctcctacatgccccatgacacacctgtcccctacacagcacctggcccaacaaccactgcagcaccagacacccaatgagaacatggcaccatgaggtgagactgattaggagatccaaggttgggtgtccacacatcattcaggaccatgagaaataacaagaaagacaatgacatcatggccctcactgagggagccagtgcaaccccaatcctgacgtcgcgaccagacgactcactgccacaccgcgccgcccctggcagccgcaccaaccaccggataccacacacgatccgacgactgacgcgacagggtaaggcccagcacacgcgggaacgcgagaaaatcgaggaacccccaggcgccacccgaggacaacgcacccactgcacctcctgagtggcttggcaccccgcctgctgcggaagaaatgtagatccaggtgtacatctctttcctcacctccgccttttgtccctaattcaactcgcccatgtgtcactttgtcctccttcttctgcttcgcctgtacacgttttcactcactttggtcgcttgcgccccaccggcccgcacaagaccgggacccaccccgacgcaccgcccccgcacgcgccccccacagccccggcgaacggcacaacccacgccctggcgcccgacccccacggctagcccccaccggggccggtcccatagatgacaacccgctcggcacccccgtccccaccaacccccacccagcaccgcgggccggaccgcgacgccctagcggacgatgagcaactcaccagcgacccaacccgcccggaacccggacgacgccccaggccaggcggcacacgcccccagccgcgcgcgcccgcacaccactcgtacccacgccccgctacacccccccccccccctgaagtccccccagaccagacacggcaaccaggcgcgccaccgcccgcaccctcccagagcccggccggctacccacccgccaccccccaccaccgccaccccccccccccccccggcgccacccaggccagccaccaacccgccggcaccggcccgccccgcccagccaagggggccactccacgcgcaaggcacacccccgcgcctgcacaccaaccacaccacaggcaccgcgaaagacgcacgcgccagagcaccccacaagaggccaacacacagacaccgcgcgcgccacagcccataccaccccc

SEQ ID NO: 514050 - DNA, 797 bp, Homo sapiens
  misc_feature (167)..(167): n is a, c, g, or t
  misc_feature (258)..(258): n is a, c, g, or t
gagacccctatggattgtgaggccgcctgggcggagtcagcagagaagagggactccctgtgaactgcggtctacagcgcagctcattatcaaggatcttggagaaattcattcaatggtctttgggatcacagaccagtttatgcaaggctgaaaacatcgtaacngtgtgtaacaagatacttgaatgaagaaacgtggtctacgagaaatgcgagtacttgaaaattggaagaacatgatccattgaagacaaantgacacatacgtcttcccaaattgtagagacacaaagcgggacagcctcagccatggttctccagaggattgcaaggcatgctaatgacgtcagtctgttagactccaagcagcagtggaacaggaacgaagaaacgattcatagtgaccacttaggtagctagtgagaaacagcatatgctccagtgggacaacttcatgaaggatgcaacctcaagcagaaagtggctgacgtggcctgaagagcacagaaagagccatggaaaggcttaacagaacaatatgctgagatggagaaggacctagcgacattttcaaccttttaagaacttgaaccacaacaatcacaaactaatgagaagatgttcacctctctcctgaaaactattcccaccagaccgtttagcctctgcttcaagcttagcaactatattcacgtggcactcttatatcagaagaaagaagtttctactggcattctgattggatatttaaagaagggtgccacatttttccatgctttaaggtgcctatatatg

SEQ ID NO: 514051 - DNA, 230 bp, Homo sapiens
gagaggacactggcagcgtgctagtactgagggagtgcaccagcattgcagacaaccgtaggagccgacgtcggaacaaccatgggcatagcaaccttagacggatccgtaaggaagggagctacctttagcctgtagtttcaaggggggtctcagggtccacatgctagacaacgggcttcaggtctactaagcggaaacttctacaagatctaaaccacttccaagca

SEQ ID NO: 514052 - DNA, 906 bp, Homo sapiens
tgtggtggctcatgcctgtaatctcagcacttcgggaggctgaggcgggtggatcacctgaggtcaggagtttgagaccagcctgaccaatatggtgaaacctcatctctactaaaactataataattagctgggcatggtggcatgtgcctgtagtcccagctactcgggaggccgaggcaggagaatggcctgaacccgggaggtggaggttgtggtgagccaagatcgtaccattgcactccagcctgggcaacagagcgagactccatctgaaaaaaaaaaaaaaaggaggtgagccatttaacgggagagggaagtctacctagattagcttgggccctgtttggcaggtcccagggctacacattaaagggcgtcgcataattgcagggctcagggccccgtgggagacgtggcaacgggttccccaatggatttctccctcaagaattaccaaagattccattcaaattttatcatctagggggcgggtatgggtccttggtaagtccccggggggacttaaaaagagtggcctactggcttaaagtatcggggctatccaaacaggggcatgcacctcctttcccgtgccctgagggttacacacaaactctcagagtccctgaataagtaggactaacatataggggatcgagcgtaaaaacccccaaggattttaaaagggggaacaggtcccgggccccaaacggggggggagactttatgcccggtgttttccccaaaaaagttgtggggaaggccagggggagggtgaacccaccctgaaggccacggaaatttcgaaaccaggctccacaagcttgtgaaactggctctcttagtagactatacacaattttgtcacgcggcacatccaggaggggatgagggagaaaaacc

SEQ ID NO: 514053 - DNA, 243 bp, Homo sapiens
tgtgtggaacatctattcagatatgtttgagaattcatatatccacaataggataaaaactaaaagagtagaaatctcacacttttccttctacctccctcccctactgaccaaccaggttccaggacattatatcactgtacattaccatattctgctaaatgagagaccccataggcactacatcacactggacaactagcatagtagacataaccgcaccacaacattctaaggtataag

SEQ ID NO: 514054 - DNA, 1205 bp, Homo sapiens
gcgcgagtcataaggtggtctccttgcgtgcgtcgtgtctgtgacgtctgtgcaccagggagtccttgctcccttctcgtctctcttgactgctctctaacgtataccatgtggccttaagtggggcccatgtccaaagcggctttatcgcgcctttataccggtctagtgtcagaccctgggtgctatttcgctagggcgccccccgggaggtgacgttgttgtgcaacttttgcgccgtttcttaggcctgtgtctttgagcctgccgaagccggtgtccgggcacaccacggtggcgtttgacgtcggcccggcggcgtcggcatgccttctccccataaccgtgggcccgggggacagattatacggttagtgttcacttacgcctctcaaaggagggaccaacgagcaatggcagatgagtctcggggaccagcgaagaccaccagcacgtcacctgcaccatctggaggccccaggggaagtcctgatctgtacttcacacagttcaaggcaacgaggtgcggggcgcctgagattgagtacgccatggcctactctaaagccgcacgttgaaacgggaaagtgatgtccctcctgaaaactgaggaattcgaagtgaccaacaacagcagtggctcacaggcccggcggcattcaaagcatgagctgtccaacgctggtgacttgtgcgccaaaggcatcgcgcactgagcatgtgaccagcagccctgtatgcagcggtggcaccttcttcatgctccgcgcgaagctagtaaggggcctagtgtccccgtcgcacaagggccagcaacatctactcggttttctagcgaggcgactcttaaatttatctaccatgggctgtacgttgccattagtccggaggggccctcgcagggtgcatgaagccctggggcagagaaccagagggtccagggcccatcctggctcccaacagcttcttcagttcaccacattcctgatgagctacttctggacatcaggatcgcagatccggggcacaaagagggtggggaacatgcgggctactagctggggaaagcagaccatgcatcccccacgacctccagccgagcatccttcatgagcctgcagaactgctcttcctatcgttacctcagggacctcctttcagatgaactgggaagaagactgatacacttcggatattaaaagccc

SEQ ID NO: 514055 - DNA, 426 bp, Homo sapiens
  misc_feature (67)..(67): n is a, c, g, or t
gcagtcccttttttttgcaaagccaagcccattcagagctttcaaggcattttgggaacattcactncccatgtccgcggaaggccttccttcccctggttaccaaagggagggatggaccaaaaggagttcccccagggtgaaagcaacatgtaacgacccttgttttgagtatcaacagtaccaggaatgcccccccacaaaaggaggaggattttggttaggaggcccaaaaggaggcctaaggcaaagcccccatcccctcagggttttcagttcccttaaccgttttaatcaaatgcccctttcctttcccccaaaaattgggtttgctgcccctattttgttttttgtttttttttttggggggggtttaaaacaaggcctggcccaaaataggcgcccaaaaaaaacttttttgtttga

SEQ ID NO: 514056 - DNA, 2650 bp, Homo sapiens
aaagataaaatggagcaaaaggagaatgtgcccccaggtcctgaggtctgcatcacccatcaggaaggggaaaagatttctgcaaatgagaatagcctggcagtccgttccacccctgccgaagatgactcccgtgactcccaggttaagagtgaggttcaacagcctgtccatcccaagccactaagtccagattccagagcctccagtctttctgaaagttctcctcccaaagcaatgaagtttcaggcacctgcaagagagacctgcgtggaatgtcagaagacagtctatccaatggagcgtctcttggccaaccagcaggtgtttcacatcagctgcttccgttgctcctattgcaacaacaaactcagtctaggaacatatgcatctttacatggaagaatctattgtaagcctcacttcaatcaactctttaaatctaagggcaactatgatgaaggctttgggcacagaccacacaagggtctatgggcaagcaaaaatgaaaacgaagagattttggagagaccagcccagcttgcaaatgcaagggagacccctcacagcccaggggtagaagatgcccctattgctaaggtgggtgtcctggctgcaagtatggaagccaaggcctcctctcagcaggagaaggaagacaagccagctgaaaccaagaagctgaggatcgcctggccaccccccactgaacttggaagttcaggaagtgccttggaggaagggatcaaaatgtcaaagcccaaatggcctcctgaagacgaaatcagcaagcccgaagttcctgaggatgtcgatctagatctgaagaagctaagacgatcttcttcactgaaggaaagaagccgcccattcactgtagcagcttcatttcaaagcacctctgtcaagagcccaaaaactgtgtccccacctatcaggaaaggctggagcatgtcagagcagagtgaagagtctgtgggtggaagagttgcagaaaggaaacaagtggaaaatgccaaggcttctaagaagaatgggaatgtgggaaaaacaacctggcaaaacaaagaatctaaaggagagacagggaagagaagtaaggaaggtcatagtttggagatggagaatgagaatcttgtagaaaatggtgcagactccgatgaagatgataacagcttcctcaaacaacaatctccacaagaacccaagtctctgaattggtcgagttttgtagacaacacctttgctgaagaattcactactcagaatcagaaatcccaggatgtggaactctgggagggagaagtggtcaaagagctctctgtggaagaacagataaagagaaatcggtattatgatgaggatgaggatgaagagtgacaaattgcaatgatgctgggccttaaattcatgttagtgttagcgagccactgccctttgtcaaaatgtgatgcacataagcaggtatcccagcatgaaatgtaatttacttggaagtaactttggaaaagaattccttcttaaaatcaaaaacaaaacaaaaaaacacaaaaaacacattctaaatactagagataactttacttaaattcttcattttagcagtgatgatatgcataagtgctgtaaggcttgtaactggggaaatattccacctgataatagcccagattctactgtattcccaaaaggcaatattaaggtagatagatgattagtagtatattgttacacactattttggaattagagaacatacagaaggaatttaggggcttaaacattacgactgaatgcactttagtataaagggcacagtttgtatatttttaaatgaataccaatttaattttttagtatttacctgttaagagattatttagtctttaaattttttaggttaattttcttgctgtgatatatatgaggaatttactactttatgtcctgctctctaaactacatcctgaactcgacgtcctgaggtataatacaacagagcactttttgaggcaattgaaaaaccaacctacactcttcggtgcttagagagatctgctgtctcccaaataagcttttgtatctgccagtgaatttactgtactccaaatgattgctttcttttctggtgatatctgtgcttctcataattactgaaagctgcaatattttagtaataccttcgggatcactagagctgtcccccatcttccgtgttgaagagtttaaaggaggaagaagaaagaactgtcttacaccacttgagctcagacctctaaaccctgtatttcccttatgatgtcccctttttgagacactaatttttaaatacttactagctctgaaatatattgatttttatcacagtattctcagggtgaaattaaaccaactataggcctttttcttgggatgattttctagtcttaaggtttggggacattataaacttgagtacatttgttgtacacagttgatattccaaattgtatggatgggagggagaggtgtcttaagctgtaggcttttctttgtactgcatttatagagatttagctttaatattttttagagatgtaaaacattctgctttcttagtcttacctagtctgaaacatttttattcaataaagattttaattaaaatttg

SEQ ID NO: 514057 - DNA, 339 bp, Homo sapiens
  misc_feature (19)..(19): n is a, c, g, or t
tgggaagcagaggttgcantgaactgagatcgagccattgcactccagcctgggcgacagagcaagactctggtcaaaaaaaaaagaaacagaaccttgcaaattccattttctaacaaaattaagggatacttgatacttcataaccccaaataggaagaaaagtaggctatataagcggtaaagatcagagagaggttgggtaaaaatggaagagaggatgttggggtctgctgactgaaaaatacaaagccagtagagcccaattctctaaattagatggtgtaccttgacatacaacactcaaattctcatgagcagcaatgagaacgggatcac

SEQ ID NO: 514058 - DNA, 1144 bp, Homo sapiens
aaaggagttccttctcaaattcttatacacgtcactacttcgcagttccctcattctagctacttaaaatgacttggctgatatactctatcttaccggggatgatatgcataagtgctgtaaggcttgtaactggggaaatattccacctgataatagcccagattctactgtattcccaaaaggcaatattaaggtagatagatgattagtagtatattgttacacactattttggaattagagaacatacagaaggaatttaggggcttaaacattacgactgaatgcactttagtataaagggcacagtttgtatatttttaaatgaataccaatttaattttttagtatttacctgttaagagattatttagtctttaaattttttaggttaattttcttgctgtgatatatatgaggaatttactactttatgtcctgctctctaaactacatcctgaactcgacgtcctgaggtataatacaacagagcactttttgaggcaattgaaaaaccaacctacactcttcggtgcttagagagatctgctgtctcccaaataagcttttgtatctgccagtgaatttactgtactccaaatgattgctttcttttctggtgatatctgtgcttctcataattactgaaagctgcaatattttagtaataccttcgggatcactagagctgtcccccatcttccgtgttgaagagtttaaaggaggaagaagaaagaactgtcttacaccacttgagctcagacctctaaaccctgtatttcccttatgatgtcccctttttgagacactaatttttaaatacttactagctctgaaatatattgatttttatcacagtattctcagggtgaaattaaaccaactataggcctttttcttgggatgattttctagtcttaaggtttggggacattataaacttgagtacatttgttgtacacagttgatattccaaattgtatggatgggagggagaggtgtcttaagctgtaggcttttctttgtactgcatttatagagatttagctttaatattttttagagatgtaaaacattctgctttcttagtcttacctagtctgaaacatttttattcaataaagattttaattaaaatttg

SEQ ID NO: 514059 - DNA, 112 bp, Homo sapiens
ctagaggatctttcttcacaaggtcaggagataacggggagttgggaggcgtccagacactggacttcctgattctttaatccagaagggtttgctatgttaacaacctggc

SEQ ID NO: 514060 - DNA, 290 bp, Homo sapiens
gcgtcgactgtctccagagtcctcattttatctagccttggtgttataagcctagattcctgttcctcctttttaggaatctcagtttcatattgaaattgtattttaggttccatgttttatgggagctttgaaagagtgttatacatgtggtgagcggaggggaaaattgggtgaaagttggacaagttaagaagttggacaagaggatctaatttattaacacgccacacaggcaaaagtttaatgattcagagacatgtttatttcccccatatctcctcacaagt

SEQ ID NO: 514061 - DNA, 1901 bp, Homo sapiens
  misc_feature (1177)..(1177): n is a, c, g, or t
  misc_feature (1407)..(1407): n is a, c, g, or t
  misc_feature (1642)..(1642): n is a, c, g, or t
ctatggttgtgtgggtacagtgtacttcgagctgagtgtggtggtggaggattccttcctcttgaggtgtcacctctgtttttgcacgtcgttgtttttctttctgggggagctcactcgctcgttgtgtgttttcttttctcttcctagtgtcgtgtggttctcgttgggtgtcgcccttgcttgttatgtctcgtcgcccatctctgtggcacctgctcattttttgggcgcctgcagcataatactaatactttctgcccctgtgtgttgtttctgtatgctgctgtttattgtggggcctttttttttctaccacggtccctatgtctcccagaagttggttgttctcccgtgagtgtgttgaggttgtccgccgagtgcgggcccaccgtcgttgtgtttaatagggtggggtagtgttttatctagtgggtggtgtctttcctccttgtggtgtgggggccccactcctcctcgtggcggggtgttgtgtgtttatccacaaagggctcgccccacgagttgtccgctaaatttgctttgcgtcaacacacgcatgttgtgtgtctctcgtctgcctcagagtctcctccgggggttctccctcgggatgcagctgttttggggtgggtaatagcgctttgttttgtgtggtgtccccccccttttctttgtgtggtgttcgtatgactacttgtttccgtcctgtgtgttgttgggtctggtccccactcgtgttgttgtgttgtttttaattgaagattctcccgccgcgtgtccccctccagagtggggacatagtttgcctcatacacatctctgcggggttctctcttgctccctagtccaccaacaatacctgcggggggaagatagtagcctccatgttcttgtgtctgtcgccggggtgtcgctatcttctgttgtgtggttgggctgaagacatagcactacagtgcttccctctcgtttgggagaatatgctgctcggcttattatctccacagcgggggggaggtgttggtgttctgtgtggaagagaaaacaaccgccggtgtcgcttttgagaggttagtagtgtcctcccggcgccccccctttgttccacaacatagagaggtgtccctttgtttttttgtctcgcgcgttgtggagacaccacagcggtgtggtngagacacataatatttgtatactcttctcgggtccacgaccttgtgctctacacgacaccgcactagatgattagcacatctgaggtaagtgtattatagagtatagtagtaaatttagtgttttgtggggggtctcgcgctcgctgtataaaactctcgcaattatgtgagacaagcgcgctcacagaaggggtaatttgggccaccactcggcggcgcgctcgcgcgntctctctctttgagtacccggcgctctcacgcgcgcgctggagaccctcacaccgccccctcgggcacgagaggcacactctgggccctctggtcgagagagcttggaactttgtcctctcctctcctctcctctcctctcacttagtaccgcgcggtggagaattatgagacacgtgtgttttataaagaccacaccccctctgtccacaagtgttctcgtgaaacaccacttngtgaaattcggagagaaagaaaggaaaactgtctgcaaaggggtataaactcgtgcacttcaccacacacttggctaacacacactatgagcttctagtcacagtttgtgtgtctcccaccaacccctaaggcttttgtattttttaaattttaaattcactggtaatccctattgtcttttttaataagcaggttgggaaaccccggaggtaattgggcccctccaagtattgccaaaaagtgaccataaagttccct

SEQ ID NO: 514062 - DNA, 448 bp, Homo sapiens
  misc_feature (410)..(410): n is a, c, g, or t
  misc_feature (437)..(437): n is a, c, g, or t
ttttttttttaaattagactctgggatttaaatgggacttaactattttcccatttaaatgacgccagtattggggtcctgcagcctaaccctgctgcttagggagtgagtataaaccgcgactgtcagtcctcagatgccttcctttttaaagactagttctttctcaggtcttcttcttgacacctacaaatggtgcctgaccacaagacgacagtattcatcttcacttttattttttgattgcttgttttctagttaacccagaataatatagcttatgagaatctcccagtcaggaagaaagaaagaaagagaaagaaaagcaaatatgattttcctgatcattggattgggtgggatctccttcttagatgggagatatgttagatctttgtaaagggttaatntttataaagtgagagtagacatggtancccacacttag

SEQ ID NO: 514063 - DNA, 3358 bp, Homo sapiens
gcagccgcatctacggcagccgcacccccggctcggggctgtgagcggctcggggccgggggtgggcggcggtgcggcgggcggccgacgctcctcttcggcggcggcggcggcggcggcccatgcgtggggcggcgcggctggggcggccgggccggagttgcctcccggggcccgcgctgagggccgccgccgcgcccgccgctgctgcttgctcgcttgcgctgttgccgctgctgcccgcgcctggcgctgccgccgcccccgccccgcggcccccggagctgcagtcggcttccgcggggcccagcgtgagtctctacctgagcgaggacgaggtgcgccggctgatcggtcttgatgcagaactttattatgtgagaaatgaccttattagtcactacgctctatcctttagtctgttagtacccagtgagacaaatttcctgcacttcacctggcatgcgaagtccaaggttgaatataagctgggattccaagtggacaatgttttggcaatggatatgccccaggtcaacatttctgttcagggggaagttccacgcactttatcagtgtttcgggtagagctttcctgtactggcaaagtagattctgaagttatgatactaatgcagctcaacttgacagtaaattcttcaaaaaattttaccgtcttaaattttaaacgaaggaaaatgtgctacaaaaaacttgaagaagtaaaaacttcagccttggacaaaaacactagcagaactatttatgatcctgtacatgcagctccaaccacttctacgcgtgtgttttatattagtgtaggggtttgttgtgcagtaatatttctcgtagcaataatattagctgttttgcaccttcatagtatgaaaaggattgaactggatgacagcattagtgccagcagtagttcccaagggctgtctcagccatccacccagacgactcagtatctgagagcagacacgcccaacaatgcaactcctatcaccagctccttaggttatcctaccttgcggatagagaagaacgacttgagaagtgtcactcttttggaggccaaaggcaaggtgaaggatatagcaatatccagagagaggataactctaaaagatgtactccaagaaggtacttttgggcgtattttccatgggattttaatagatgaaaaagatccaaataaagaaaaacaagcatttgtcaaaacagttaaagatcaagcttctgaaattcaggtgacaatgatgctcactgaaagttgtaagctgcgaggtcttcatcacagaaatcttcttcctattactcatgtgtgtatagaagaaggagaaaagcccatggtgatattgccttacatgaattgggggaatcttaaattgtttttacgacagtgcaagttagtagaggccaataatccacaggcaatttctcagcaagacctggtacacatggctattcagattgcctgtggaatgagctacctggccagaagggaagtcatccacaaagacctggctgccaggaactgtgtcattgatgacacacttcaagttaagatcacagacaatgccctctccagagacttgttccccatggactatcactgtctgggggacaatgaaaacaggccagttcgttggatggctcttgaaagtctggttaataacgagttctctagcgctagtgatgtgtgggcctttggagtgacgctgtgggaactcatgactctgggccagactccctacgtggacattgaccccttcgagatggccgcatacctgaaagatggttaccgaatagcccagccaatcaactgtcctgatgaattatttgctgtgatggcctgttgctgggccttagatccagaggagaggcccaagtttcagcagctggtacagtgcctaacagagtttcatgcagccctgggggcctacgtctgactcctctccaatcccacaccatcaggaagaaggtgcctgtcggggctcacttgaagcctgtcagggatgctttgtatctaacacaacgccaacagaagcacatttgtcttccagaacaccgtgccttagaaatgctttagaatctgaactttttaagacagacttaataatgtggcatattttctagatatcacttttattaggttgaactgaaagggtttttgtaaattttttggccaaaattttttaaaacatacttactttggactaggggtacattcttacaaaataaataaacagtttttaaaattgtttagacacagatatttggaattagctatcttagggccaactgctttttatttttttacttcatcaaggtgatgtaagtgactttgtttagacacagatatttggaattagctatcttagtgccaactgctttttatttttttacttcatcaaggtgatgtaagtgactcacctttaaagtttttttagtgttattttttatcactactctgggaaatggtttgtcttcaagatgcaatacttttcttagtaaaggaaaaacagcataaaaagatacctggtctgccttgtacaagaaaaggcaatattagaggaagaaaatttaaagaaaagctagaggaaaaaaaaattttttaaaaaatacttattagaagcaaactgcccttgcatggaaaactgtttatttttttcagtgaaaaggaattctgctttcgtgtttttgggaaagcaggaactgagttcattacatctttaatttggcagaaattagcctttctgtgaaccagatgtggtttggggcagatctgtagtaaacaatggtgattttatttatttttactctctggaaaaggagataatacaattccagaaagtgaactcatatttctaaggttaagattcccttttattgcacctagaatagtgctatgcacagagcgggtgcttgagttgttgtcgttttttgtttgttttttaaatgtaaactggtaaattttgtgcttatcttcaaggctggcttaagtataaaattgttttttaaacacttgaaaaattaaaggatttgttttatattaaaaaaaaacaaacaaaaaaaaaacaaaaaaaaaagaaagaaatagaaccccaaaaaacaggcggggtgaaacaaaaatatacaagagggaggagcgatgactaacaggcgacaagccccgaaacggcggagcgatgagatagaaaaaatagagaaaagcgagcgaagcaaagaaagagagataagcatatcgcgtccacaacaactacaaactggagtaactacagacgcaaccaaagatagcagagaacaaagcaatagagcacacaagcgagaagaaatacaattaaaccaaggc

SEQ ID NO: 514064 - DNA, 376 bp, Homo sapiens
aagaattggaatgctacggaggaacggaagagagggaggggccgggaaaggaaacacccagctggctgggccagcccttgctctcctcccctcctaagccacagggtctttcatttttggaatttcctccctacctttaaacctttcttgatttaaacctttcttgatcagaccttaaaccaagtcaggttgcagctatttacagagtgaaaagtgagaactgaaagaattatataagcctttctcctggcctctggccaaatctagggatgcctcccactgtttctgtgagaggtgggaagttgttggcccatccttcatcctaagaagctccttcacagggctacaggtgtgagcatgcaaagaaggccttcat

SEQ ID NO: 514065 - DNA, 337 bp, Homo sapiens
cgctttctaacctaacaacatgtgggcatactgctatattcgtgacactgggagctctacttgtgacaggacctacataccaactgtcatatactgatatgagatttaaccatacatgaatttccatctgattataatacacacatcacaagactatagaagtatggtacaatattctaaatagcctggaacatacataatcatatgactgcttccttacctgttggctagactgaccttgaacatttcactgatgtgactgcttagcccatcaccaccccttgctttccctccttcgaaccttcccatactactcatatgccataaggggctgctc

SEQ ID NO: 514066 - DNA, 2105 bp, Homo sapiens
gcagccgcatctacggcagccgcacccccggctcggggctgtgagcggctcggggccgggggtgggcggcggtgcggcgggcccgccgctgctgcttgctcgcttgcgctgttgccgctgctgcccgcgcctggcgctgccgccgcccccgccccgcggcccccggagctgcagtcggcttccgcggggcccagcgtgagtctctacctgagcgaggacgaggtgcgccggctgatcggtcttgatgcagaactttattatgtgagaaatgaccttattagtcactacgctctatcctttagtctgttagtacccagtgagacaaatttcctgcacttcacctggcatgcgaagtccaaggttgaatataagctgggattccaagtggacaatgttttggcaatggatatgccccaggtcaacatttctgttcagggggaagttccacgcactttatcagtgtttcgggtagagctttcctgtactggcaaagtagattctgaagttatgatactaatgcagctcaacttgacagtaaattcttcaaaaaattttaccgtcttaaattttaaacgaaggaaaatgtgctacaaaaaacttgaagaagtaaaaacttcagccttggacaaaaacactagcagaactatttatgatcctgtacatgcagctccaaccacttctacgcgtgtgttttatattagtgtaggggtttgttgtgcagtaatatttctcgtagcaataatattagctgttttgcaccttcatagtatgaaaaggattgaactggatgacagcattagtgccagcagtagttcccaagggctgtctcagccatccacccagacgactcagtatctgagagcagacacgcccaacaatgcaactcctatcaccagctccttaggttatcctaccttgcggatagagaagaacgacttgagaagtgtcactcttttggaggccaaaggcaaggtgaaggatatagcaatatccagagagaggataactctaaaagatgtactccaagaaggtacttttgggcgtattttccatgggattttaatagatgaaaaagatccaaataaagaaaaacaagcatttgtcaaaacagttaaagatcaagcttctgaaattcaggtgacaatgatgctcactgaaagttgtaagctgcgaggtcttcatcacagaaatcttcttcctattactcatgtgtgtatagaagaaggagaaaagcccatggtgatattgccttacatgaattgggggaatcttaaattgtttttacgacagtgcaagttagtagaggccaataatccacaggcaatttctcagcaagacctggtacacatggctattcagattgcctgtggaatgagctacctggccagaagggaagtcatccacaaagacctggctgccaggaactgtgtcattgatgacacacttcaagttaagatcacagacaatgccctctccagagacttgttccccatggactatcactgtctgggggacaatgaaaacaggccagttcgttggatggctcttgaaagtctggttaataacgagttctctagcgctagtgatgtgtgggcctttggagtgacgctgtgggaactcatgactctgggccagactccctacgtggacattgaccccttcgagatggccgcatacctgaaagatggttaccgaatagcccagccaatcaactgtcctgatgaattatttgctgtgatggcctgttgctgggccttagatccagaggagaggcccaagtttcagcagctggtacagtgcctaacagagtttcatgcagccctgggggcctacgtctgactcctctccaatcccacaccatcaggaagaaggtgcctgtcggggctcacttgaagcctgtcagggatgctttgtatctaacacaacgccaacagaagcacatttgtcttccagaacaccgtgccttagaaatgctttagaatctgaactttttaagacagacttaataatgtggcatattttctagatatcacttttattaggttgaactgaaagggtttttgtaaagcatttctaaggcacggtgttctggaagacaaatgtgc

SEQ ID NO: 514067 - DNA, 215 bp, Homo sapiens
  misc_feature (33)..(33): n is a, c, g, or t
aaataaacccaataaaatttttaaattttaacnccaataaaaggggaaaataaaggttttcccttacccatcttccgggcccccttttttccctttaggggttggttgatttttgttttaaattgggaggggggccccccccttccccttttcgggagggggggttgggttttttgggaacccaaaaaaagggtggttttttcccctttagggga

SEQ ID NO: 514068 - DNA, 3272 bp, Homo sapiens
gcagccgcatctacggcagccgcacccccggctcggggctgtgagcggctcggggccgggggtgggcggcggtgcggcgggcggccgacgctcctcttcggcggcggcggcggcggcggcccatgcgtggggcggcgcggctggggcggccgggccggagttgcctcccggggcccgcgctgagggccgccgccgcgcccgccgctgctgcttgctcgcttgcgctgttgccgctgctgcccgcgcctggcgctgccgccgcccccgccccgcggcccccggagctgcagtcggcttccgcggggcccagcgtgagtctctacctgagcgaggacgaggtgcgccggctgatcggtcttgatgcagaactttattatgtgagaaatgaccttattagtcactacgctctatcctttagtctgttagtacccagtgagacaaatttcctgcacttcacctggcatgcgaagtccaaggttgaatataagctgggattccaagtggacaatgttttggcaatggatatgccccaggtcaacatttctgttcagggggaagttccacgcactttatcagtgtttcgggtagagctttcctgtactggcaaagtagattctgaagttatgatactaatgcagctcaacttgacagtaaattcttcaaaaaattttaccgtcttaaattttaaacgaaggaaaatgtgctacaaaaaacttgaagaagtaaaaacttcagccttggacaaaaacactagcagaactatttatgatcctgtacatgcagctccaaccacttctacgcgtgtgttttatattagtgtaggggtttgttgtgcagtaatatttctcgtagcaataatattagctgttttgcaccttcatagtatgaaaaggattgaactggatgacagcattagtgccagcagtagttcccaagggctgtctcagccatccacccagacgactcagtatctgagagcagacacgcccaacaatgcaactcctatcaccagctccttaggttatcctaccttgcggatagagaagaacgacttgagaagtgtcactcttttggaggccaaaggcaaggtgaaggatatagcaatatccagagagaggataactctaaaagatgtactccaagaaggtacttttgggcgtattttccatgggattttaatagatgaaaaagatccaaataaagaaaaacaagcatttgtcaaaacagttaaagatcaagcttctgaaattcaggtgacaatgatgctcactgaaagttgtaagctgcgaggtcttcatcacagaaatcttcttcctattactcatgtgtgtatagaagaaggagaaaagcccatggtgatattgccttacatgaattgggggaatcttaaattgtttttacgacagtgcaagttagtagaggccaataatccacaggcaatttctcagcaagacctggtacacatggctattcagattgcctgtggaatgagctacctggccagaagggaagtcatccacaaagacctggctgccaggaactgtgtcattgatgacacacttcaagttaagatcacagacaatgccctctccagagacttgttccccatggactatcactgtctgggggacaatgaaaacaggccagttcgttggatggctcttgaaagtctggttaataacgagttctctagcgctagtgatgtgtgggcctttggagtgacgctgtgggaactcatgactctgggccagactccctacgtggacattgaccccttcgagatggccgcatacctgaaagatggttaccgaatagcccagccaatcaactgtcctgatgaattatttgctgtgatggcctgttgctgggccttagatccagaggagaggcccaagtttcagcagctggtacagtgcctaacagagtttcatgcagccctgggggcctacgtctgactcctctccaatcccacaccatcaggaagaaggtgcctgtcggggctcacttgaagcctgtcagggatgctttgtatctaacacaacgccaacagaagcacatttgtcttccagaacaccgtgccttagaaatgctttagaatctgaactttttaagacagacttaataatgtggcatattttctagatatcacttttattaggttgaactgaaagggtttttgtaaattttttggccaaaattttttaaaacatacttactttggactaggggtacattcttacaaaataaataaacagtttttaaaattgtttagacacagatatttggaattagctatcttagtgccaactgctttttatttttttacttcatcaaggtgatgtaagtgactcacctttaaagtttttttagtgttattttttatcactactctgggaaatggtttgtcttcaagatgcaatacttttcttagtaaaggaaaaacagcataaaaagatacctggtctgccttgtacaagaaaaggcaatattagaggaagaaaatttaaagaaaagctagaggaaaaaaaaattttttaaaaaatacttattagaagcaaactgcccttgcatggaaaactgtttatttttttcagtgaaaaggaattctgctttcgtgtttttgggaaagcaggaactgagttcattacatctttaatttggcagaaattagcctttctgtgaaccagatgtggtttggggcagatctgtagtaaacaatggtgattttatttatttttactctctggaaaaggagataatacaattccagaaagtgaactcatatttctaaggttaagattcccttttattgcacctagaatagtgctatgcacagagcgggtgcttgagttgttgtcgttttttgtttgttttttaaatgtaaactggtaaattttgtgcttatcttcaaggctggcttaagtataaaattgttttttaaacacttgaaaaattaaaggatttgttttatattaaaaaaaaacaaacaaaaaaaaaacaaaaaaaaaagaaagaaatagaaccccaaaaaacaggcggggtgaaacaaaaatatacaagagggaggagcgatgactaacaggcgacaagccccgaaacggcggagcgatgagatagaaaaaatagagaaaagcgagcgaagcaaagaaagagagataagcatatcgcgtccacaacaactacaaactggagtaactacagacgcaaccaaagatagcagagaacaaagcaatagagcacacaagcgagaagaaatacaattaaaccaaggc

SEQ ID NO: 514069 - DNA, 419 bp, Homo sapiens
acactttatgccggggtggaagagaatggctgcgtggctgatgcgtcccggtgatgggaagggtactaggttgccggggcagctttccactcttctctggctgattgtcccttccctcccttcctctcccaccatgcgacgcagcatccttccaggccccgcgtctgccgagcctcagctcaccaggtttggtttctgagtgcctatctgctgctcttccctccctctgcgggcttctcttgctctgcagcctccctctccccattcccatccagctccctttccccctgggcttcccttgcgcttcctgcagcacacttgggccgctctctgccccttgcctaaaagcctgtacctctggattggcggaagtaaatctggaaggattctcactcgtatttcccacccctagtggccag

SEQ ID NO: 514070 - DNA, 3139 bp, Homo sapiens
gcagccgcatctacggcagccgcacccccggctcggggctgtgagcggctcggggccgggggtgggcggcggtgcggcgggcggccgacgctcctcttcggcggcggcggcggcggcggcccatgcgtggggcggcgcggctggggcggccgggccggagttgcctcccggggcccgcgctgagggccgccgccgcgcccgccgctgctgcttgctcgcttgcgctgttgccgctgctgcccgcgcctggcgctgccgccgcccccgccccgcggcccccggagctgcagtcggcttccgcggggcccagcgtgagtctctacctgagcgaggacgaggtgcgccggctgatcggtcttgatgcagaactttattatgtgagaaatgaccttattagtcactacgctctatcctttagtctgttagtacccagtgagacaaatttcctgcacttcacctggcatgcgaagtccaaggttgaatataagctgggattccaagtggacaatgttttggcaatggatatgccccaggtcaacatttctgttcagggggaagttccacgcactttatcagtgtttcgggtagagctttcctgtactggcaaagtagattctgaagttatgatactaatgcagctcaacttgacagtaaattcttcaaaaaattttaccgtcttaaattttaaacgaaggaaaatgtgctacaaaaaacttgaagaagtaaaaacttcagccttggacaaaaacactagcagaactatttatgatcctgtacatgcagctccaaccacttctacgcgtgtgttttatattagtgtaggggtttgttgtgcagtaatatttctcgtagcaataatattagctgttttgcaccttcatagtatgaaaaggattgaactggatgacagcattagtgccagcagtagttcccaagggctgtctcagccatccacccagacgactcagtatctgagagcagacacgcccaacaatgcaactcctatcaccagctccttaggttatcctaccttgcggatagagaagaacgacttgagaagtgtcactcttttggaggccaaaggcaaggtgaaggatatagcaatatccagagagaggataactctaaaagatgtactccaagaaggtacttttgggcgtattttccatgggattttaatagatgaaaaagatccaaataaagaaaaacaagcatttgtcaaaacagttaaagatcaagcttctgaaattcaggtgacaatgatgctcactgaaagttgtaagctgcgaggtcttcatcacaggcaatttctcagcaagacctggtacacatggctattcagattgcctgtggaatgagctacctggccagaagggaagtcatccacaaagacctggctgccaggaactgtgtcattgatgacacacttcaagttaagatcacagacaatgccctctccagagacttgttccccatggactatcactgtctgggggacaatgaaaacaggccagttcgttggatggctcttgaaagtctggttaataacgagttctctagcgctagtgatgtgtgggcctttggagtgacgctgtgggaactcatgactctgggccagactccctacgtggacattgaccccttcgagatggccgcatacctgaaagatggttaccgaatagcccagccaatcaactgtcctgatgaattatttgctgtgatggcctgttgctgggccttagatccagaggagaggcccaagtttcagcagctggtacagtgcctaacagagtttcatgcagccctgggggcctacgtctgactcctctccaatcccacaccatcaggaagaaggtgcctgtcggggctcacttgaagcctgtcagggatgctttgtatctaacacaacgccaacagaagcacatttgtcttccagaacaccgtgccttagaaatgctttagaatctgaactttttaagacagacttaataatgtggcatattttctagatatcacttttattaggttgaactgaaagggtttttgtaaattttttggccaaaattttttaaaacatacttactttggactaggggtacattcttacaaaataaataaacagtttttaaaattgtttagacacagatatttggaattagctatcttagtgccaactgctttttatttttttacttcatcaaggtgatgtaagtgactcacctttaaagtttttttagtgttattttttatcactactctgggaaatggtttgtcttcaagatgcaatacttttcttagtaaaggaaaaacagcataaaaagatacctggtctgccttgtacaagaaaaggcaatattagaggaagaaaatttaaagaaaagctagaggaaaaaaaaattttttaaaaaatacttattagaagcaaactgcccttgcatggaaaactgtttatttttttcagtgaaaaggaattctgctttcgtgtttttgggaaagcaggaactgagttcattacatctttaatttggcagaaattagcctttctgtgaaccagatgtggtttggggcagatctgtagtaaacaatggtgattttatttatttttactctctggaaaaggagataatacaattccagaaagtgaactcatatttctaaggttaagattcccttttattgcacctagaatagtgctatgcacagagcgggtgcttgagttgttgtcgttttttgtttgttttttaaatgtaaactggtaaattttgtgcttatcttcaaggctggcttaagtataaaattgttttttaaacacttgaaaaattaaaggatttgttttatattaaaaaaaaacaaacaaaaaaaaaacaaaaaaaaaagaaagaaatagaaccccaaaaaacaggcggggtgaaacaaaaatatacaagagggaggagcgatgactaacaggcgacaagccccgaaacggcggagcgatgagatagaaaaaatagagaaaagcgagcgaagcaaagaaagagagataagcatatcgcgtccacaacaactacaaactggagtaactacagacgcaaccaaagatagcagagaacaaagcaatagagcacacaagcgagaagaaatacaattaaaccaaggc

SEQ ID NO: 514071 - DNA, 1700 bp, Homo sapiens
tgctgaaacttgggcctctcctctggatctaaggcccagcaacaggccatcacagcaaataattcatcaggccagttcgttggatggctcttgaaagtctggttaataacgagttctctagcgctagtgatgtgtgggcctttggagtgacgctgtgggaactcatgactctgggccagactccctacgtggacattgaccccttcgagatggccgcatacctgaaagatggttaccgaatagcccagccaatcaactgtcctgatgaattatttgctgtgatggcctgttgctgggccttagatccagaggagaggcccaagtttcagcagctggtacagtgcctaacagagtttcatgcagccctgggggcctacgtctgactcctctccaatcccacaccatcaggaagaaggtgcctgtcggggctcacttgaagcctgtcagggatgctttgtatctaacacaacgccaacagaagcacatttgtcttccagaacaccgtgccttagaaatgctttagaatctgaactttttaagacagacttaataatgtggcatattttctagatatcacttttattaggttgaactgaaagggtttttgtaaattttttggccaaaattttttaaaacatacttactttggactaggggtacattcttacaaaataaataaacagtttttaaaattgtttagacacagatatttggaattagctatcttagtgccaactgctttttatttttttacttcatcaaggtgatgtaagtgactcacctttaaagtttttttagtgttattttttatcactactctgggaaatggtttgtcttcaagatgcaatacttttcttagtaaaggaaaaacagcataaaaagatacctggtctgccttgtacaagaaaaggcaatattagaggaagaaaatttaaagaaaagctagaggaaaaaaaaattttttaaaaaatacttattagaagcaaactgcccttgcatggaaaactgtttatttttttcagtgaaaaggaattctgctttcgtgtttttgggaaagcaggaactgagttcattacatctttaatttggcagaaattagcctttctgtgaaccagatgtggtttggggcagatctgtagtaaacaatggtgattttatttatttttactctctggaaaaggagataatacaattccagaaagtgaactcatatttctaaggttaagattcccttttattgcacctagaatagtgctatgcacagagcgggtgcttgagttgttgtcgttttttgtttgttttttaaatgtaaactggtaaattttgtgcttatcttcaaggctggcttaagtataaaattgttttttaaacacttgaaaaattaaaggatttgttttatattaaaaaaaaacaaacaaaaaaaaaacaaaaaaaaaagaaagaaatagaaccccaaaaaacaggcggggtgaaacaaaaatatacaagagggaggagcgatgactaacaggcgacaagccccgaaacggcggagcgatgagatagaaaaaatagagaaaagcgagcgaagcaaagaaagagagataagcatatcgcgtccacaacaactacaaactggagtaactacagacgcaaccaaagatagcagagaacaaagcaatagagcacacaagcgagaagaaatacaattaaaccaaggc

SEQ ID NO: 514072 - DNA, 1059 bp, Homo sapiens
gcagccgcatctacggcagccgcacccccggctcggggctgtgagcggctcggggccgggggtgggcggcggtgcggcgggcggccgacgctcctcttcggcggcggcggcggcggcggcccatgcgtggggcggcgcggctggggcggccgggccggagttgcctcccggggcccgcgctgagggccgccgccgcgcccgccgctgctgcttgctcgcttgcgctgttgccgctgctgcccgcgcctggcgctgccgccgcccccgccccgcggcccccggagctgcagtcggcttccgcggggcccagcgtgagtctctacctgagcgaggacgaggtgcgccggctgatcggtcttgatgcagaactttattatgtgagaaatgaccttattagtcactacgctctatcctttagtctgttagtacccagtgagacaaatttcctgcacttcacctggcatgcgaagtccaaggttgaatataagctgggattccaagtggacaatgttttggcaatggatatgccccaggtcaacatttctgttcagggggaagttccacgcactttatcagtgtttcgggtagagctttcctgtactggcaaagtagattctgaagttatgatactaatgcagctcaacttgacagtaaattcttcaaaaaattttaccgtcttaaattttaaacgaaggaaaatgtgctacaaaaaacttgaagaagtaaaaacttcagccttggacaaaaacactagcagaactatttatgatcctgtacatgcagctccaaccacttctacgcgtgtgttttatattagtgtaggggtttgttgtgcagtaatatttctcgtagcaataatattagctgttttgcaccttcatagtatgaaaaggattgaactggatgacagcattagtgccagcagtagttcccaagggctgtctcagccatccacccagacgactcagtatctgagagcagacacgccccactatcactctcttcacctattatctgtttcctcgtatagagcagcgcaccgtgagagctgcatgcccg

SEQ ID NO: 514073 - DNA, 172 bp, Homo sapiens
tggcacgagagaccaaaaaattttacaatattttttttttacaatatgttttgtagtatgtttaccctctttaagaagtgaattaccaatgctttgaaaaaagttcacttaaacattcctggacagaaattacgattttgtgatttcagtaataaaatgatattccttggga

SEQ ID NO: 514074 - DNA, 351 bp, Homo sapiens
agatatatagaccaatggaacagaacagaggcctcagaagtagcaccacacatttacaacaacaaacctgcacattctgcacatatatcccagaacttaaagtataattttaaaaaagtcaaaacagtcaaaaataataatagctacaggttttcaagaaatatataatataaaaaatgtaaatagtgaaataagtgaaaaaattgtgtggggggcaggtacaagtctaatgtttctgtatgcaacagaatttatgttatcagtgtaaaatagtctattatacttatgagatgttttatttcagtcctaagtaaacacaaagcaaaaaaccatagcagatacacaaacaat

SEQ ID NO: 514075 - DNA, 263 bp, Homo sapiens
aagatttgcggtgccgaccatctgtcgcagactggtcggtcatttttgttttgtgcgaaaaactcctgttgacccattttaaaacggctgtttaagggcgtactctagcccggccatccctattgagtcgtcgaggacctgctggtcatgaaatgccgtgaaggctgtggcgcctgctgcattgccccctccattagttcgccactacccggaatgccccagggcaaacccgctggcgtccgttgcgtgcacctgtcggtgga

SEQ ID NO: 514076 - DNA, 367 bp, Homo sapiens
  misc_feature (1)..(2): n is a, c, g, or t
  misc_feature (22)..(22): n is a, c, g, or t
nncgactttagaggaccccccncacaaaatgattatttatattaaattttttttagatctctaaagttattaaaatccaatctttcttaaaaagactttcttggaatgaggcaacatgtgctttacctctttaactctacctaaaacctaaagttatttctatagtataaatttcaaactccctggcacggaatgtaaatgctaaccagctaggtatttatagtcatgcgccgcattacaacttttcaaagacagaccgcgtatttgacagtggtcccgtaagattataataccatattcttactgtatgttttctatgtctagatacacaaataccattgcgctacaactgcctacagtattcagt

SEQ ID NO: 514077 - DNA, 884 bp, Homo sapiens
attctcggatgtctggggagctgatgtgtatcacaatgaatgttctcctgggcagcgtatgggatctttgccaccttcgtgacttttgtgcgaagtgcgctcgagtgctatattcatacctcaatgaggggagttccaggacgcgtgcaaccacggaaatgctatgggatctcgaaaggacaacaaacacccaggtaaactcggagtggcagactgaccactgtgagacatggcacttgctgacggaaacagaaatttcatgtttgcgaccctctggtgttctacacctgtgggttatgacgaaagacaactgccaaagaatcttcaagaaggaggactgcaagtatatcgtcggctggagaccgaaggacccaaaaaggacctgttctgtcagtgaatgggtatctaatgtgcttctagataggcatcagggctcccaggccaggctcattctcctctgggcctctaatagtcactgaatgtgtacgccatgcctatcagtaacaacgacttttcggagacaaataaacagaggtttatcaactaaatacaggcgcgacttttttcgaccccccgggcacctgtggagaagcgtttcggaatcaccacaccccgtgtgtgaacttggggcgacaccattatgtaataggaacaccgggtactgtttcgcggccaccgaaaaatcgcgcggacagcacactctgggggcggctacctcccccatggaaaacggccggtatgataacccccgggttatcgaaaagagctagtgttcgatcccccccgttgtgtgctacactgcgggagatgcagcccggctaatatagttcctgcgtgaggcgagtttcttacagacgatttctatatgcggcaaacacatatgt

SEQ ID NO: 514078 - DNA, 368 bp, Homo sapiens
tgtctcagttcgggacgggcagagggaatgcacatcagtgttggaaggacagaggagctgcagaaatggacgggcagagtggaatgcacatcagtgtgggagggacagagggaatgtacatcagtgtgggagggagagaggagctgcagatatggatggacagagggaatgcacattagtgtgggagggacacagatgctggcagaaatggagagcagagggaatgcacattagtgtgggagggacacgagatgctgcataaatggaggggcagagggaatgcccatcagtgtggcagggacagaggagctgcagagtgtgggtagcctgagggatggcccttccgggtgggaggtccatcaggtgct

SEQ ID NO: 514079 - DNA, 316 bp, Homo sapiens
gaatttaggcaggaaagacgcatcctattcctctattggttcacaacctgctgtggagacagcaggtatcataaatggtgtggtagaggtggaagttgcattaggtagtgtgggagcagagaaaaggagcatttgtttgagagtgggtcagacatgactctgtagaacatggggcatgaggtgaagcttgaagggatagaagtaagtagttgaagatgggactggaatagaagattggaactaagtcagatattttaatgtgatttcaactaatggactttatattgtaggaactgagaattcattcatggaatag

SEQ ID NO: 514080 - DNA, 315 bp, Homo sapiens
gtacgccttctggccgctgcgcacggcctggttctgtggctgctgtaccccaatcatgccttgcgtagagccgccttgctgctggttaggcatcatgggctgtaaaccaggctgctgggatggctgacggcaagctgctgaccacgattgggggctatatggccaccggcgtgcagagagaggtcgatcattgctgagttgcagttaggatattgtccaggggtgatagtaagaaacctggatctgttgagggggctgcatgtacccctggggtggcagaacttgctgagtaggtcgtgcatggctagaggtgga

SEQ ID NO: 514081 - DNA, 535 bp, Homo sapiens
  misc_feature (1)..(1): n is a, c, g, or t
nacactgggtgcacgactagcatggcaccgatctggtgcagtatgaaagactgtcagtggtcagggcctccatgacgggctcagtatcagtatcaggccctctttccccaggcgatggtccgcaacacgcagatttgtgctcctctgaacgccccatgttgtttggacacaatgaaataggagttttctttcatcctatagatacctctaaatctctcaaacagtcgtgagtggagctttttaggaagagtatagaataaattgctttaaaatagcacaggtcttgattatgagagcttcagtcctcctgctcaccgataagcaacaaaagtatagtctagcaccagttggtgcacataattacggtgccagttgcaggcaattatttgccaataagtgaaaggggccttttacccgcggcgtagcccatccatgacggaaaggggcatctgaggtttagaaggccgctttcaaaactccctccattcagggaggtcctgtccaagacaacaaacaataaatgtcattcctaaaa

SEQ ID NO: 514082 - DNA, 2348 bp, Homo sapiens
agctaaggctgaagaaaaagatgaattactacactttttccaaatgtgactgattctctcttctggctttgggaggccatgtgaacttattcagaatgtactacaaagtgatcatttcttacatttactgcaagctgacaatgtccaaataggatctgcagtcatgatgatgctacagaatatattacagatcaacagggtgatctactcagaataggaagaaaagccctgtattcaattttagatgaagttattttcaagcttttttcaactcctagtccagttataagaagtactgctacaaaactcctactgttgatggctgaatcccatcaggaaattttgattttactgagacaaagtacctgctacaaaggactcagacgtctactaagtaaacaggaaactgggactgaattcagtcaagaacttagacagcttgttggccttttaagcccaatggtctatcaggaagtagaagagcagaaactacatcaagcagcatgcttgattcaagcctattggaagggttttcagacaagaaagagattaaagaagcttccatctgctgtgattgctttgcagaggagtttcagatccaaacgatcaaagatgttgctggagataaataggcagaaggaagaagaggacctcaaattacaattgcaacttcaaagacagagagccatgagactttcccgagaattgcagctgagtatgctcgaaatagttcatccaggtcaggtggagaaacactatcgggaaatggaagagaaatcagcactgaatatccagaaacattggagagggtacagggaaaggaaaaattttcaccaacagaggcagtctctcatagagtataaagcagctgtcacacttcaaagagcagcgcttaaattcctagcgaagtgccgtaagaaaaagaaactatttgctccttggcgaggactccaagaactcactgatgcacgccgagttgaactgaagaaacgagtggatgactatgtcagaagacatttgggctctccaatgtcagatgtggtcagtagggagctccatgcccaagctcaagaacgactgcaacactactttatgggcagggccctagaagagcgagcccagcagcacagagaagctctgatagcacagatcagcaccaacgttgaacagctaatgaaggcaccaagtctgaaggaggcagaagggaaagaacctgagctcttcctaagtagatccaggcctgtggcagccaaggccaagcaggcccatctcacaaccctgaagcacatacaagcaccctggtggaagaagcttggagaagaatctggagatgagattgatgttccaaaggatgagcttagtatagaattagaaaatttattcattggtggaaccaaaccaccttagtgagtaaccctaagaattgacacaaatctcatattttaggagattatattggttctgcctctggcatgctggtagactagggccatcctaacttattattttccagaggttctcctccagacaagacctgcagtaagcaaagagttatattctacctctctctcaattttctttttcttttctctgtatcctcatccttagccacacacagatttgtgtggcttttattgtagaactaaacttagcatagtgttctgttgtttacatgaagtgtgtttttctttggtttcttctgttttccaactaaatatttttttctaaataaatattttcaacaattgatttgaaaaatttgtcaggattatttcaacttttcacatttgttatctgaaattcctatttcctgttaacataggaggtgtgtgcagactttattaatgtgaggaaaagaaatgctcaattgaaggacatttccctgttttctataaagcaatggttgaactcattttctattttgttatttctaaaaggaactgcataccaaaaaaatgcattctttctattaaactgtgagaactacaaaaactactgtttccctttttgtcttttctcctaggaatctcaaagctaaatataatgtttaatttttgttacaatcctaggtacctttatgattatttggttccaacctaatacttttcagtttccctgtttactttaaatatgttttaataccataacattgaagccacttcaatttgtgtttgtaacaatatggaatttaagttaaaatcaattaacaaatcatgactccatatcataaagaatctggaagatgttctttgtaaaatgagtgaaaataccagtatttctggatgtaaagaccaaattgtataatattgcgcaatctctaatgttaactttagtaaaattctaatcaa

SEQ ID NO: 514083 - DNA, 771 bp, Homo sapiens
cccggcgctctcctggctacccttctgccccagactcccgtctcggcggcggcgtggcagttgcagcggtgcagaatggctgacctcagtcttgcagatagcattaagcagaaccatctccagacccttgacgggagacgactaaacgcgggacttcacttgaccaccactagacggcagacgggcctttgactgactgtcgtgggatgacacactctgttggacacaacactcagaccctacctactatcctactacctggactgtccgacctgactgaacacacccgggacaccctcacgacggtacaacacgacacgaacactccgatgacatcacgacacaccgtacgacccacgcacttcgacacgcactaccatcacatgtacctcctctacccgacgcacacacgcaaccgtaccctacggcgccaacctgggacggggctacaacctcgggacacgctcaacgacaacgcgggaccgcccgaccttacaccgtaaccccaacgggggagtaacatcccaacacacgccgagacaccttatcccccacttgggcacaacgccacggacacacaccacgtggggcccccattacaccccgacggcggcaccaacattacaccccacacagcacgcataccggcccaacggcaaaacacgatgggggccccaccgtgaccacggcaacatacccacaccaccgccctccgcccgcggtacgcagccacccacacaccacacaaggaacaccacccaccggcccgag

SEQ ID NO: 514084 - DNA, 2230 bp, Homo sapiens
attaaagagattgtctagacagattttttttttatcagataccacaattgagcacgtaagaattctcaggagggaggaatatcttaaagatttcaacctggaattctctgagaaaaggaaaaagaaaaatcatatgattaatcttgttttcatttgtttttaagccagactttttagcttcaaattaatactgattagataacaaaatcatattttattattataataatagttgtaccttttgctattccatttcaggactcagacgtctactaagtaaacaggaaactgggactgaattcagtcaagaacttagacagcttgttggccttttaagcccaatggtctatcaggaagtagaagagcagaaactacatcaagcagcatgcttgattcaagcctattggaagggttttcagacaagaaagagattaaagaagcttccatctgctgtgattgctttgcagaggagtttcagatccaaacgatcaaagatgttgctggagataaataggcagaaggaagaagaggacctcaaattacaattgcaacttcaaagacagagagccatgagactttcccgagaattgcagctgagtatgctcgaaatagttcatccaggtcaggtggagaaacactatcgggaaatggaagagaaatcagcactgaatatccagaaacattggagagggtacagggaaaggaaaaattttcaccaacagaggcagtctctcatagagtataaagcagctgtcacacttcaaagagcagcgcttaaattcctagcgaagtgccgtaagaaaaagaaactatttgctccttggcgaggactccaagaactcactgatgcacgccgagttgaactgaagaaacgagtggatgactatgtcagaagacatttgggctctccaatgtcagatgtggtcagtagggagctccatgcccaagctcaagaacgactgcaacactactttatgggcagggccctagaagagcgagcccagcagcacagagaagctctgatagcacagatcagcaccaacgttgaacagctaatgaaggcaccaagtctgaaggaggcagaagggaaagaacctgagctcttcctaagtagatccaggcctgtggcagccaaggccaagcaggcccatctcacaaccctgaagcacatacaagcaccctggtggaagaagcttggagaagaatctggagatgagattgatgttccaaaggatgagcttagtatagaattagaaaatttattcattggtggaaccaaaccaccttagtgagtaaccctaagaattgacacaaatctcatattttaggagattatattggttctgcctctggcatgctggtagactagggccatcctaacttattattttccagaggttctcctccagacaagacctgcagtaagcaaagagttatattctacctctctctcaattttctttttcttttctctgtatcctcatccttagccacacacagatttgtgtggcttttattgtagaactaaacttagcatagtgttctgttgtttacatgaagtgtgtttttctttggtttcttctgttttccaactaaatatttttttctaaataaatattttcaacaattgatttgaaaaatttgtcaggattatttcaacttttcacatttgttatctgaaattcctatttcctgttaacataggaggtgtgtgcagactttattaatgtgaggaaaagaaatgctcaattgaaggacatttccctgttttctataaagcaatggttgaactcattttctattttgttatttctaaaaggaactgcataccaaaaaaatgcattctttctattaaactgtgagaactacaaaaactactgtttccctttttgtcttttctcctaggaatctcaaagctaaatataatgtttaatttttgttacaatcctaggtacctttatgattatttggttccaacctaatacttttcagtttccctgtttactttaaatatgttttaataccataacattgaagccacttcaatttgtgtttgtaacaatatggaatttaagttaaaatcaattaacaaatcatgactccatatcataaagaatctggaagatgttctttgtaaaatgagtgaaaataccagtatttctggatgtaaagaccaaattgtataatattgcgcaatctctaatgttaactttagtaaaattctaatcaa

SEQ ID NO: 514085 - DNA, 291 bp, Homo sapiens
tactactactaaattcgcggccgcgtcgacctcattcggaatggacacacacaggcggctccagtacagagaggggctctaggccctgaaatgctgtgctcctcgcaggacacacaactccacgtgacggggataacacgcgacacagctcctgcatcgatgctccccagttcctgcctggctgctcccccagctcctgcctaggttctcccctatctcctggccttatgctccccagttcctgcctttgtgctcccccagcaccccgtcgacgcggccgcgaatttagta

SEQ ID NO: 514086 - DNA, 2206 bp, Homo sapiens
catcctagagtcctttccctctttgacctccgtatccagttgatcattaaattatatcagtttcttatacttcgcccaaatacgcccccctttttgattaacaattctgactgccttatttctgtcacatatgtagcatgtgaaccctgggctgtactcgctgagcaactccaagaaagcaaaaagaaagtcatctgtataactgactgagtgacttaagagaaatttggaagcatgtgagtagagaacacatacacacatttgccctttccctctggtggtactgaatgacttcttaatcatgtacttaggaatttttttttttttttttttagtgttctttgtattggattttcagccattttcttattactctaccacaaaaatattatatgagttctttctgtgaagaagctgcataatctgggaaagctttgtttctaaaatcttagaaccatggtaaaataatagaattgggaaaattagtgaacaatattgacaaaaagaatgcaagattattattatcattgtcctgattccagaacttaagaaagcatggcagtgagtatgttgtaatagtgtctatcatctttttaggtcaggtggagaaacactatcgggaaatggaagagaaatcagcactgaatatccagaaacattggagagggtacagggaaaggaaaaattttcaccaacagaggcagtctctcatagagtataaagcagctgtcacacttcaaagagcagcgcttaaattcctagcgaagtgccgtaagaaaaagaaactatttgctccttggcgaggactccaagaactcactgatgcacgccgagttgaactgaagaaacgagtggatgactatgtcagaagacatttgggctctccaatgtcagatgtggtcagtagggagctccatgcccaagctcaagaacgactgcaacactactttatgggcagggccctagaagagcgagcccagcagcacagagaagctctgatagcacagatcagcaccaacgttgaacagctaatgaaggcaccaagtctgaaggaggcagaagggaaagaacctgagctcttcctaagtagatccaggcctgtggcagccaaggccaagcaggcccatctcacaaccctgaagcacatacaagcaccctggtggaagaagcttggagaagaatctggagatgagattgatgttccaaaggatgagcttagtatagaattagaaaatttattcattggtggaaccaaaccaccttagtgagtaaccctaagaattgacacaaatctcatattttaggagattatattggttctgcctctggcatgctggtagactagggccatcctaacttattattttccagaggttctcctccagacaagacctgcagtaagcaaagagttatattctacctctctctcaattttctttttcttttctctgtatcctcatccttagccacacacagatttgtgtggcttttattgtagaactaaacttagcatagtgttctgttgtttacatgaagtgtgtttttctttggtttcttctgttttccaactaaatatttttttctaaataaatattttcaacaattgatttgaaaaatttgtcaggattatttcaacttttcacatttgttatctgaaattcctatttcctgttaacataggaggtgtgtgcagactttattaatgtgaggaaaagaaatgctcaattgaaggacatttccctgttttctataaagcaatggttgaactcattttctattttgttatttctaaaaggaactgcataccaaaaaaatgcattctttctattaaactgtgagaactacaaaaactactgtttccctttttgtcttttctcctaggaatctcaaagctaaatataatgtttaatttttgttacaatcctaggtacctttatgattatttggttccaacctaatacttttcagtttccctgtttactttaaatatgttttaataccataacattgaagccacttcaatttgtgtttgtaacaatatggaatttaagttaaaatcaattaacaaatcatgactccatatcataaagaatctggaagatgttctttgtaaaatgagtgaaaataccagtatttctggatgtaaagaccaaattgtataatattgcgcaatctctaatgttaactttagtaaaattctaatcaa

SEQ ID NO: 514087 - DNA, 2081 bp, Homo sapiens
attaaagagattgtctagacagattttttttttatcagataccacaattgagcacgtaagaattctcaggagggaggaatatcttaaagatttcaacctggaattctctgagaaaaggaaaaagaaaaatcatatgattaatcttgttttcatttgtttttaagccagactttttagcttcaaattaatactgattagataacaaaatcatattttattattataataatagttgtaccttttgctattccatttcaggactcagacgtctactaagtaaacaggaaactgggactgaattcagtcaagaacttagacagcttgttggccttttaagcccaatggtctatcaggaagtagaagagcagaaactacatcaagcagcatgcttgattcaagcctattggaagggttttcagacaagaaagagattaaagaagcttccatctgctgtgattgctttgcagaggagtttcagatccaaacgatcaaagatgttgctggagataaataggcagaaggaagaagaggacctcaaattacaattgcaacttcaaagacagagagccatgagactttcccgagaattgcagctgagtatgctcgaaatagttcatccaggcgcttaaattcctagcgaagtgccgtaagaaaaagaaactatttgctccttggcgaggactccaagaactcactgatgcacgccgagttgaactgaagaaacgagtggatgactatgtcagaagacatttgggctctccaatgtcagatgtggtcagtagggagctccatgcccaagctcaagaacgactgcaacactactttatgggcagggccctagaagagcgagcccagcagcacagagaagctctgatagcacagatcagcaccaacgttgaacagctaatgaaggcaccaagtctgaaggaggcagaagggaaagaacctgagctcttcctaagtagatccaggcctgtggcagccaaggccaagcaggcccatctcacaaccctgaagcacatacaagcaccctggtggaagaagcttggagaagaatctggagatgagattgatgttccaaaggatgagcttagtatagaattagaaaatttattcattggtggaaccaaaccaccttagtgagtaaccctaagaattgacacaaatctcatattttaggagattatattggttctgcctctggcatgctggtagactagggccatcctaacttattattttccagaggttctcctccagacaagacctgcagtaagcaaagagttatattctacctctctctcaattttctttttcttttctctgtatcctcatccttagccacacacagatttgtgtggcttttattgtagaactaaacttagcatagtgttctgttgtttacatgaagtgtgtttttctttggtttcttctgttttccaactaaatatttttttctaaataaatattttcaacaattgatttgaaaaatttgtcaggattatttcaacttttcacatttgttatctgaaattcctatttcctgttaacataggaggtgtgtgcagactttattaatgtgaggaaaagaaatgctcaattgaaggacatttccctgttttctataaagcaatggttgaactcattttctattttgttatttctaaaaggaactgcataccaaaaaaatgcattctttctattaaactgtgagaactacaaaaactactgtttccctttttgtcttttctcctaggaatctcaaagctaaatataatgtttaatttttgttacaatcctaggtacctttatgattatttggttccaacctaatacttttcagtttccctgtttactttaaatatgttttaataccataacattgaagccacttcaatttgtgtttgtaacaatatggaatttaagttaaaatcaattaacaaatcatgactccatatcataaagaatctggaagatgttctttgtaaaatgagtgaaaataccagtatttctggatgtaaagaccaaattgtataatattgcgcaatctctaatgttaactttagtaaaattctaatcaa

SEQ ID NO: 514088 - DNA, 845 bp, Homo sapiens
ccttctagatattcccaaaaagaggctgagacaggaggttattttcaattttattttgggaattaaatacttttttccctttattactgttgtagtccctcacttggatatacctctgttttcacagatagaacataagggcaaggtctatagcttctattccttggccattgtcaacggagagctggccaagtcttcacaaagccttgcaacattgcctgaagttgatggaataagatgtattctcactcccttgatctcaagggcgtgaactctggaagcaacagcttgactaccaggtctatttttaccaatgattttcaggtggacctgggccgttaagtcatttaaactgggtcttttataaatagtaagaaggccgaacatttaagttattttgcgaaagcaacctacagagctaaagatgtaatgtttcttgcaatgtcacatcttttgtgtctcctgaagacttccctgtagaattgagctctgcagtgaaaaatcagagagaccaaagacatcttcgaatccatatttcagcctggtagaattggcttttctagtcagaacctttccaaggttctattattgggattcattaccatcccagaatcggttttgtggccaggcttccttcaatactggtctatcagaggggctcggcgacggggaacattgactttcggggcacgccatgtcttgcgactacgataccctggccgttgccttttgtgtgctttccgggggcgccctggtcgggttgcgggatgcctgtcttttggggtgcgcccggctggtttgtttgggcccccggtgtttttggcgcttgggcgctttggcgggcg

SEQ ID NO: 514089 - DNA, 1801 bp, Homo sapiens
agctaaggctgaagaaaaagatgaattactacactttttccaaatgtgactgattctctcttctggctttgggaggccatgtgaacttattcagaatgtactacaaagtgatcatttcttacatttactgcaagctgacaatgtccaaataggatctgcagtcatgatgatgctacagaatatattacagatcaacagatccaaacgatcaaagatgttgctggagataaataggcagaaggaagaagaggacctcaaattacaattgcaacttcaaagacagagagccatgagactttcccgagaattgcagctgagtatgctcgaaatagttcatccaggcgcttaaattcctagcgaagtgccgtaagaaaaagaaactatttgctccttggcgaggactccaagaactcactgatgcacgccgagttgaactgaagaaacgagtggatgactatgtcagaagacatttgggctctccaatgtcagatgtggtcagtagggagctccatgcccaagctcaagaacgactgcaacactactttatgggcagggccctagaagagcgagcccagcagcacagagaagctctgatagcacagatcagcaccaacgttgaacagctaatgaaggcaccaagtctgaaggaggcagaagggaaagaacctgagctcttcctaagtagatccaggcctgtggcagccaaggccaagcaggcccatctcacaaccctgaagcacatacaagcaccctggtggaagaagcttggagaagaatctggagatgagattgatgttccaaaggatgagcttagtatagaattagaaaatttattcattggtggaaccaaaccaccttagtgagtaaccctaagaattgacacaaatctcatattttaggagattatattggttctgcctctggcatgctggtagactagggccatcctaacttattattttccagaggttctcctccagacaagacctgcagtaagcaaagagttatattctacctctctctcaattttctttttcttttctctgtatcctcatccttagccacacacagatttgtgtggcttttattgtagaactaaacttagcatagtgttctgttgtttacatgaagtgtgtttttctttggtttcttctgttttccaactaaatatttttttctaaataaatattttcaacaattgatttgaaaaatttgtcaggattatttcaacttttcacatttgttatctgaaattcctatttcctgttaacataggaggtgtgtgcagactttattaatgtgaggaaaagaaatgctcaattgaaggacatttccctgttttctataaagcaatggttgaactcattttctattttgttatttctaaaaggaactgcataccaaaaaaatgcattctttctattaaactgtgagaactacaaaaactactgtttccctttttgtcttttctcctaggaatctcaaagctaaatataatgtttaatttttgttacaatcctaggtacctttatgattatttggttccaacctaatacttttcagtttccctgtttactttaaatatgttttaataccataacattgaagccacttcaatttgtgtttgtaacaatatggaatttaagttaaaatcaattaacaaatcatgactccatatcataaagaatctggaagatgttctttgtaaaatgagtgaaaataccagtatttctggatgtaaagaccaaattgtataatattgcgcaatctctaatgttaactttagtaaaattctaatcaa

SEQ ID NO: 514090 - DNA, 653 bp, Homo sapiens
atcaggggcgggcctcggccaggggggaaaaaccaccccacattgccccgcccccagagggcgcgcgacgacgccacataaaagaggcgccgcaccgccctcagaagacagcccccctgttgatatctgggagggcgaggagcatttggggcgcgcacgtggcctgtgtctgtgagaggagagaacacgtctgtctcgtcgacccgagcaggggggagcgcgagacaaaacaggaggcgccctctctctcttctggccccacgtggcaggtgtgtgacaaatacactcgtctctgtttcctggcccgctcttgtctcttcacaggcaggtggcaccttcttcatcctggtgtggccatgtatctacaccttttggcacacgcaagcttttttataataggacgccgttcgtgtttctccctcccgcgcatccgactcacctccagggaaaacaaaggacacaacaataataatagtaacccagagatggtattttagccctcgatctctgttgttgtacgagttggcggaatcaacaactcctccccccgccgtgttttaaatagacgattgacatgtgttctattaatccctttgtacctccttatgtattcattagcggcatcaccaacagaaaagatcaagagacaaaga

SEQ ID NO: 514091 - DNA, 168 bp, Homo sapiens
agtgtggagtgagtgaacccagtgaagaagagtcaggatcacaggaagcgagcctccctgtcggagaagaagagccccttcctgtccatcgcggagggcgctgtccccaaactggtcaaggaggggaaagttctcaaaaaccaaaaaaaacaaaaacacttgcggccg

SEQ ID NO: 514092 - DNA, 2294 bp, Homo sapiens
agctaaggctgaagaaaaagatgaattactacactttttccaaatgtgactgattctctcttctggctttgggaggccatgtgaacttattcagaatgtactacaaagtgatcatttcttacatttactgcaagctgacaatgtccaaataggatctgcagtcatgatgatgctacagaatatattacagatcaacagggtgatctactcagaataggaagaaaagccctgtattcaattttagatgaagttattttcaagcttttttcaactcctagtccagttataagaagtactgctacaaaactcctactgttgatggctgaatcccatcaggaaattttgattttactgagacaaagtacctgctacaaaggactcagacgtctactaagtaaacaggaaactgggactgaattcagtcaagaacttagacagcttgttggccttttaagcccaatggtctatcaggaagtagaagagcagaaactacatcaagcagcatgcttgattcaagcctattggaagggttttcagacaagaaagagattaaagaagcttccatctgctgtgattgctttgcagaggagtttcagatccaaacgatcaaagatgttgctggagataaataggcagaaggaagaagaggacctcaaattacaattgcaacttcaaagacagagagccatgagactttcccgagaattgcagctgagtatgctcgaaatagttcatccaggtcaggtggagaaacactatcgggaaatggaagagaaatcagcactgaatatccagaaacattggagagggtacagggaaaggaaaaattttcaccaacagaggcagtctctcatagagtataaagcagctgtcacacttcaaagagcagcgcttaaattcctagcgaagtgccgtaagagagttgaactgaagaaacgagtggatgactatgtcagaagacatttgggctctccaatgtcagatgtggtcagtagggagctccatgcccaagctcaagaacgactgcaacactactttatgggcagggccctagaagagcgagcccagcagcacagagaagctctgatagcacagatcagcaccaacgttgaacagctaatgaaggcaccaagtctgaaggaggcagaagggaaagaacctgagctcttcctaagtagatccaggcctgtggcagccaaggccaagcaggcccatctcacaaccctgaagcacatacaagcaccctggtggaagaagcttggagaagaatctggagatgagattgatgttccaaaggatgagcttagtatagaattagaaaatttattcattggtggaaccaaaccaccttagtgagtaaccctaagaattgacacaaatctcatattttaggagattatattggttctgcctctggcatgctggtagactagggccatcctaacttattattttccagaggttctcctccagacaagacctgcagtaagcaaagagttatattctacctctctctcaattttctttttcttttctctgtatcctcatccttagccacacacagatttgtgtggcttttattgtagaactaaacttagcatagtgttctgttgtttacatgaagtgtgtttttctttggtttcttctgttttccaactaaatatttttttctaaataaatattttcaacaattgatttgaaaaatttgtcaggattatttcaacttttcacatttgttatctgaaattcctatttcctgttaacataggaggtgtgtgcagactttattaatgtgaggaaaagaaatgctcaattgaaggacatttccctgttttctataaagcaatggttgaactcattttctattttgttatttctaaaaggaactgcataccaaaaaaatgcattctttctattaaactgtgagaactacaaaaactactgtttccctttttgtcttttctcctaggaatctcaaagctaaatataatgtttaatttttgttacaatcctaggtacctttatgattatttggttccaacctaatacttttcagtttccctgtttactttaaatatgttttaataccataacattgaagccacttcaatttgtgtttgtaacaatatggaatttaagttaaaatcaattaacaaatcatgactccatatcataaagaatctggaagatgttctttgtaaaatgagtgaaaataccagtatttctggatgtaaagaccaaattgtataatattgcgcaatctctaatgttaactttagtaaaattctaatcaa

SEQ ID NO: 514093 - DNA, 1209 bp, Homo sapiens
ggtcgattctagagcactgcacatcgcatccgcttatacagcgccgaacctaaagagaacacatgctcatgaacctgagctcttcctaagtagatccaggcctgtggcagccaaggccaagcaggcccatctcacaaccctgaagcacatacaagcaccctggtggaagaagcttggagaagaatctggagatgagattgatgttccaaaggatgagcttagtatagaattagaaaatttattcattggtggaaccaaaccaccttagtgagtaaccctaagaattgacacaaatctcatattttaggagattatattggttctgcctctggcatgctggtagactagggccatcctaacttattattttccagaggttctcctccagacaagacctgcagtaagcaaagagttatattctacctctctctcaattttctttttcttttctctgtatcctcatccttagccacacacagatttgtgtggcttttattgtagaactaaacttagcatagtgttctgttgtttacatgaagtgtgtttttctttggtttcttctgttttccaactaaatatttttttctaaataaatattttcaacaattgatttgaaaaatttgtcaggattatttcaacttttcacatttgttatctgaaattcctatttcctgttaacataggaggtgtgtgcagactttattaatgtgaggaaaagaaatgctcaattgaaggacatttccctgttttctataaagcaatggttgaactcattttctattttgttatttctaaaaggaactgcataccaaaaaaatgcattctttctattaaactgtgagaactacaaaaactactgtttccctttttgtcttttctcctaggaatctcaaagctaaatataatgtttaatttttgttacaatcctaggtacctttatgattatttggttccaacctaatacttttcagtttccctgtttactttaaatatgttttaataccataacattgaagccacttcaatttgtgtttgtaacaatatggaatttaagttaaaatcaattaacaaatcatgactccatatcataaagaatctggaagatgttctttgtaaaatgagtgaaaataccagtatttctggatgtaaagaccaaattgtataatattgcgcaatctctaatgttaactttagtaaaattctaatcaa

SEQ ID NO: 514094 - DNA, 409 bp, Homo sapiens
  misc_feature (41)..(41): n is a, c, g, or t
  misc_feature (95)..(95): n is a, c, g, or t
  misc_feature (123)..(123): n is a, c, g, or t
  misc_feature (144)..(144): n is a, c, g, or t
actttttagtcatgggctgcgcatatttatagatcaaatantcaaagcacagccaaacccagtaaaaataaacaagtgggctgtatcaaactaanaagcctcgcacagcaaagaaaacaattncacagagtgaaaggcaacctnccagaatggaaaaagtatttggaaatcatatatttgataaggagttaatttccaaaatatataaggaactcttacaactcaatggcaaccccctccaataacctgattgtaaaatgggctaaggacctgaatagacatgttcccagaaaagacacaaatatccaacaggtatatgaaaagatgctcaacatcactaatcattagggaaatgcaaattaaaaccacaatgtgttattacctcacctctgttagagtggatattatc

SEQ ID NO: 514095 - DNA, 2121 bp, Homo sapiens
agctaaggctgaagaaaaagatgaattactacactttttccaaatgtgactgattctctcttctggctttgggaggccatgtgaacttattcagaatgtactacaaagtgatcatttcttacatttactgcaagctgacaatgtccaaataggatctgcagtcatgatgatgctacagaatatattacagatcaacagggtgatctactcagaataggaagaaaagccctgtattcaattttagatgaagttattttcaagcttttttcaactcctagtccagttataagaagtactgctacaaaactcctactgttgatggctgaatcccatcaggaaattttgattttactgagacaaagtacctgctacaaaggactcagacgtctactaagtaaacaggaaactgggactgaattcagtcaagaacttagacagcttgttggccttttaagcccaatggtctatcaggaagtagaagagcagaaactacatcaagcagcatgcttgattcaagcctattggaagggttttcagacaagaaagagattaaagaagcttccatctgctgtgattgctttgcagaggagtttcagatccaaacgatcaaagatgttgctggagataaataggcagaaggaagaagaggacctcaaattacaattgcaacttcaaagacagagagccatgagactttcccgagaattgcagctgagtatgctcgaaatagttcatccaggtcaggtggagaaacactatcgggaaatggaagagaaatcagcactgaatatccagaaacattggagagggtacagggaaaggaaaaattttcaccaacagaggcagtctctcatagagtataaagcagctgtcacacttcaaagagcagcgcttaaattcctagcgaagtgccgtaagaaaaagaaactatttgctccttggcgaggactccaagaactcactgatgcacgccgagttgaactgaagaaacgagtggatgactatgtcagaagacatttgggctctccaatgtcagatgtggtcagtagggagctccatgcccaagctcaagaacgactgcaacactactttatgggcagggccctagaagagcgagcccagcagcacagagaagctctgatagcacagatcagcaccaacgttgaacagctaatgaaggcaccaagtctgaaggaggcagaagggaaagaacctgagctcttcctaagtagatccaggcctgtggcagccaaggccaagcaggcccatctcacaaccctgaagcacatacaagcaccctggtggaagaagcttggagaagaatctggagatgagattgatgttccaaaggatgagcttagtatagaattagaaaatttattcattggtggaaccaaaccaccttagtgagtaaccctaagaattgacacaaatctcatattttaggagattatattggttctgcctctggcatgctggtagactagggccatcctaacttattattttccagaggttctcctccagacaagacctgcagtaagcaaagagttatattctacctctctctcaattttctttttcttttctctgtatcctcatccttagccacacacagatttgtgtggcttttattgtagaactaaacttagcatagtgttctgttgtttcaatggttgaactcattttctattttgttatttctaaaaggaactgcataccaaaaaaatgcattctttctattaaactgtgagaactacaaaaactactgtttccctttttgtcttttctcctaggaatctcaaagctaaatataatgtttaatttttgttacaatcctaggtacctttatgattatttggttccaacctaatacttttcagtttccctgtttactttaaatatgttttaataccataacattgaagccacttcaatttgtgtttgtaacaatatggaatttaagttaaaatcaattaacaaatcatgactccatatcataaagaatctggaagatgttctttgtaaaatgagtgaaaataccagtatttctggatgtaaagaccaaattgtataatattgcgcaatctctaatgttaactttagtaaaattctaatcaa

SEQ ID NO: 514096 - DNA, 876 bp, Homo sapiens
tgtgcccgttccaagcacttttttggcccccctccataaggactggggccattgtagagtagcattgtggttctcccgtgcggaggaagacccctccttttttcgtgggtacagacgcgcgcacctccttgttttttaacaccagggcctcctctcacagcgtacttcttcgcctgtggccaatgagatggcgccccccccacgagattgcattgtgcggaataccatttcgctcgcgctgtctcgatctgctaggttgaccccacgctccgcgcgcacgctctcctctatagttgcatgtattctttatacacgcctgcgcgtgccccccgcatttttctccggtttgccctggcgcacgaccttcactcacttcggtgtaagcccccccccgcggtgggcacacttactgtaccccactcgctctgcttatacatacgttatggcgcgcgaagctcccttaacgcgccccgcattttttgtctagatataaccctcaaacaacgctttgcgcccagcgtgtgatggacatcacacgcagccactccatacgcaaaacaacgctctgcggcgtgtagcccctctctattatctcggcggtgtcagccaccaagaatcatgggagccgcactcccgcggggcggtaacaacttatttggtcgcgctcctttttgtgagatggtagataacaatggtgatcgtcacaaagaaatgatgacagtgccattaacagattctggtttagcacacacacattctttcgtgcgggccgcacattttctgggacacccgctaatctttgtgcgagcaaaacaaaaacagcaacgtagaaggcagtgtttgcggaataaaaacccttttgttgcgacaaaacac

SEQ ID NO: 514097 - DNA, 310 bp, Homo sapiens
  misc_feature (15)..(15): n is a, c, g, or t
  misc_feature (25)..(25): n is a, c, g, or t
  misc_feature (37)..(37): n is a, c, g, or t
  misc_feature (82)..(82): n is a, c, g, or t
  misc_feature (175)..(175): n is a, c, g, or t
  misc_feature (304)..(304): n is a, c, g, or t
tcaatggctatgctnttgcgggcgngctgtgagcttnccatgatgtgtgatatcatctatgccggtgagaaggcccagtttncacaggcggagatcttaataggaaccatcccaggtacgggcggcaccaagtagactcacccgtgctgttgggaagtcgctggcgatggagatngtcctcaccggtgaccggatctcagcccagggacgccaagcaagcaggtcttgtcagcaagattttgtcctttttgagacactggttggaaggaagccatccagttttgcagaaaaaatttgccagcanttttaa

SEQ ID NO: 514098 - DNA, 1822 bp, Homo sapiens
catcctagagtcctttccctctttgacctccgtatccagttgatcattaaattatatcagtttcttatacttcgcccaaatacgcccccctttttgattaacaattctgactgccttatttctgtcacatatgtagcatgtgaaccctgggctgtactcgctgagcaactccaagaaagcaaaaagaaagtcatctgtataactgactgagtgacttaagagaaatttggaagcatgtgagtagagaacacatacacacatttgccctttccctctggtggtactgaatgacttcttaatcatgtacttaggaatttttttttttttttttttagtgttctttgtattggattttcagccattttcttattactctaccacaaaaatattatatgagttctttctgtgaagaagctgcataatctgggaaagctttgtttctaaaatcttagaaccatggtaaaataatagaattgggaaaattagtgaacaatattgacaaaaagaatgcaagattattattatcattgtcctgattccagaacttaagaaagcatggcagtgagtatgttgtaatagtgtctatcatctttttaggtcaggtggagaaacactatcgggaaatggaagagaaatcagcactgaatatccagaaacattggagagggtacagggaaaggaaaaattttcaccaacagaggcagtctctcatagagtataaagcagctgtcacacttcaaagagcagcgcttaaattcctagcgaagtgccgtaagaaaaagaaactatttgctccttggcgaggactccaagaactcactgatgcacgccgagttgaactgaagaaacgagtggatgactatgtcagaagacatttgaggcaccaagtctgaaggaggcagaagggaaagaacctgagctcttcctaagtagatccaggcctgtggcagccaaggccaagcaggcccatctcacaaccctgaagcacatacaagcaccctggtggaagaagcttggagaagaatctggagatgagattgatgttccaaaggatgagcttagtatagaattagaaaatttattcattggtggaaccaaaccaccttagtgagtaaccctaagaattgacacaaatctcatattttaggagattatattggttctgcctctggcatgctggtagactagggccatcctaacttattattttccagaggttctcctccagacaagacctgcagtaagcaaagagttatattctacctctctctcaattttctttttcttttctctgtatcctcatccttagccacacacagatttgtgtggcttttattgtagaactaaacttagcatagtgttctgttgtttcaatggttgaactcattttctattttgttatttctaaaaggaactgcataccaaaaaaatgcattctttctattaaactgtgagaactacaaaaactactgtttccctttttgtcttttctcctaggaatctcaaagctaaatataatgtttaatttttgttacaatcctaggtacctttatgattatttggttccaacctaatacttttcagtttccctgtttactttaaatatgttttaataccataacattgaagccacttcaatttgtgtttgtaacaatatggaatttaagttaaaatcaattaacaaatcatgactccatatcataaagaatctggaagatgttctttgtaaaatgagtgaaaataccagtatttctggatgtaaagaccaaattgtataatattgcgcaatctctaatgttaactttagtaaaattctaatcaa

SEQ ID NO: 514099 - DNA, 215 bp, Homo sapiens
gtctctccctggctacagatgctaggtgttcaaggagcatgcaaagttattcctggggaaaatcccgccagcttgcccgattttttgtttggacccgtattgcttggggatttttcaattttggcagcattgccaccaggcaatttgtccaaaggtcacatgttccacaccaggcggaggtccattttcacaggccttcaagggagtttccccca

SEQ ID NO: 514100 - DNA, 1014 bp, Homo sapiens
attaaagagattgtctagacagattttttttttatcagataccacaattgagcacgtaagaattctcaggagggaggaatatcttaaagatttcaacctggaattctctgagaaaaggaaaaagaaaaatcatatgattaatcttgttttcatttgtttttaagccagactttttagcttcaaattaatactgattagataacaaaatcatattttattattataataatagttgtaccttttgctattccatttcaggactcagacgtctactaagtaaacaggaaactgggactgaattcagtcaagaacttagacagcttgttggccttttaagcccaatggtctatcaggaagtagaagagcagaaactacatcaagcagcatgcttgattcaagcctattggaagggttttcagacaagaaagagattaaagaagcttccatctgctgtgattgctttgcagaggagtttcaggtaaaaaaatttggtgaggggattgatgatcatagaatcttactagagtacagttgaattgaaatttaggtgatttttttttaatttcctagtatgtttcttgttatcttttcattttttttccatacgtttctgggtaccagcactccagtaaccagatgcactttcaaagcaaaggatgtaagacaggaatctgatgtgtcaaatatgcaatcctatccacttaataagatatttggggaggggccaagcctacaaagggagccaatgatagttatattattaaaccctctaaaccaacagttatcataatttcgtgtgtataattataacaataacatgtatgcgtataagagtttaagtctgttaacctgattttcctgaataaatatggcatggatggatatcttcattgaattatgatatagttcggcatttatttcaagtagactgaaaaggaaatactgaagacatagcccactttctgcaatgacttaaccaatccagatcctccaaggtcacagaacaaaaaaaaa

SEQ ID NO: 514101 - DNA, 754 bp, Homo sapiens
  misc_feature (114)..(114): n is a, c, g, or t
  misc_feature (118)..(118): n is a, c, g, or t
  misc_feature (136)..(136): n is a, c, g, or t
  misc_feature (142)..(142): n is a, c, g, or t
gccggagggcgggcgcgggtcttggcgaacggtcttcggaagcggcggggcgcgatgaccacgctacgggcctttacctgcgacgacctgttccgcttcaacaacattaacttngatncacttacagaaacttatnggattnctttctacctacaatacctcgccactgccagagtatttcattgttgcagaggcacctggtggagactcaatgggtatataatgggtaaagcagaaggctccagtagctagggaagaatgcacgggcacgtcaccagctctgtctgtggcccccagaatttcgacgcctttgttgtggctgctaaaacttatggagtcactagaggagattccagacaagaacggggtgcatttttggtgggatctcttgtgtaaagagtatctaacccaagtttgcagttaccatgtacaaggcagtgtgggctcacagtgttatataaggacggtcatagagtacctatccggccaaggcaacgggggagcgccttgatgagggacggcttattgatatgagcgaaacgcactttcccaggactactggagaagcaatccatcataccattacctcatcctgtgaggcctgaagacttgaattaaccctgggcagtggtccttaggcaggtacctctagatgctttatggaccatattattttccatggatgctcctggagctctattaggagaaacgtcactccattcaggtctcacagccttccacgaaatacggtcca

SEQ ID NO: 514102 - DNA, 159 bp, Homo sapiens
cggttggctgcatagatctcttcttttagagaagtgctgttcatatcctttgcccactttttgatggggttatggtttttttttcttttctggaaaattggtgggattccttggaaaatccggaatataaccccttggggggaactcctctaaaattca

SEQ ID NO: 514103 - DNA, 429 bp, Homo sapiens
gaacaaggccgctatccatttgtgttgttcgccagttatgtgtgtcctcgtaccgcttcgttcggacgagctcgcgcgtacgcatagccttgatagagggttagcgctagccttaagagtgcgaatcccaggagcagcgacagactcgagaccacgctccttgctcgtgaaggaggcggctcctcgcgtttgaggcccgcctgcggttgaggcccgactgcgcttgcggaccgactgcgcttgactgagcagtaaccaacatgtcatggagggagtcatattacagaaccgagggcgatgatgctgaggaggaacaagaagagaaccttgacacgagcggagactatcgatattcacgaagagatagttcgattcttttggatgaagccttcgacgctctgttgagtctcactagtgatagatggctgg

SEQ ID NO: 514104 - DNA, 103 bp, Homo sapiens
caaaaaaaataaggccttcttcccaaagcgccttcccccgtaaatgatatcatctcaacttagtattatacccccccccccccaaaaacagggtttgttaaga

SEQ ID NO: 514105 - DNA, 391 bp, Homo sapiens
  misc_feature (264)..(264): n is a, c, g, or t
  misc_feature (266)..(267): n is a, c, g, or t
  misc_feature (374)..(374): n is a, c, g, or t
  misc_feature (391)..(391): n is a, c, g, or t
ctgattagcaggctcaaaaatgatacatacaaataggagaactgatctctatactagtatcttatcatttatgcaaataactctcggatctgctcatcaatttaacaacaccaaatatataaactagcatggcatccccttgtgagcggcgcagtgattataggctttcggtctaagattaaaaatggcctaagccacttcttacacacaaggcacatctacaccccttatccccatactagttattattcgaaacccatcagncnnctactcattcaaccaatagccctggccgtacgcctaaccgctaacattactgcaggccacctactcatgcacctaattggaagcgccacccctagcacatatcaacncattaacctttccctcn

SEQ ID NO: 514106 - DNA, 432 bp, Homo sapiens
ttcgagggaacattgaatactgagtagtaggaactagacagtcagacctccaggactaacatgaagtgagccgagaggacatcgtatcatatgaatgcttctgtcgttagccggatgcagtgctgtgtgtatctagttccacctaattgagaggctgaggcaggaggattgcttgagtccagaaagtggcagttgcactgagcggagatcgcgccactgctctccaccctgcgtggcagagcgagaccctgcgtcaaacataaacaaaaacagaaggcttctgtcagttaacaatctttattagagggtgtctagtctttttttctcagctgtatgccatatctggctgaaccctgccaactacccccctttattatcccctcaaaaaaaaaaccacacaactgcccctcttctgctctcacgcgctggcac

SEQ ID NO: 514107 - DNA, 151 bp, Homo sapiens
tgaccgctaccacacaagccgcatcaggtgagccgacacctgccgaggactcttcacacagggatacgggggtctcagagagagacgacacctctcttagccggtttccattcgtcagcctatcctgccgaatggtctacggaggtccttt

SEQ ID NO: 514108 - DNA, 262 bp, Homo sapiens
tacaaatttctaacaccgaatcctattaaagaaaatgcctttcaaggacaggtatgctcagaataagtgtattctagagagtagcaacaaggaacactcttggcaatgagccagtgcccccgtagagtcaacatttgaacaatagtagcggagttcacccccttctctgtgggacttatgtgcattagtacaggtatgacatcactactttcaaaggaatgataaaactattagtgaaaaactagagtcacaaacagaaatg

SEQ ID NO: 514109 - DNA, 716 bp, Homo sapiens
  misc_feature (535)..(535): n is a, c, g, or t
gggaacataaaaatattaatttattaatcgtggccttaggcattaaagatatatccttgtgtcatgtgaagtagcataagcatttagttggaaacaaagtatcatagtgcttgagaaaagtattgtaagatgtttaagtctgagctgaaccatcacttttttatggatcattatttttatctagaataatctctgaaagcaacttgtggccatacagactagtctatttagcattctctagatattattcaagaggcttagtcactttaaagaatcaagctattggctgggcacagtggctcactgctgtaatctcagcactttggaagtccaggcaagtcagatcacctgaggtcagaagtgcaagacaggcctggccacattggtgaaaacctgtctctattaaaaatagagaatttagctgggcgtgcaagcaggtgcctgtaatcccagctacttgggaggctgaggcaggagaattgcttgaatccaggcagcagaggttgcagtgagccaagaccatgccattgcaccncagcctgggcatcaaagagtgaaactccacctcaaagcaaaaaaacaaaaaaacaaaatccagctatatcagtatttgttgccagtgattcaattcaagctttcaagcaaaaattcatcctgtgtaagacttcagtttgccatcatgagcacaatagtttcccaacacttcaagacctttc

SEQ ID NO: 514110 - DNA, 1586 bp, Homo sapiens
tattaaaagcccctggatccggttaatttgggcagagaaaatagaaacatcccacaagcccaggagggacggggtggacttaaatctcctctcctctcctctcgttcgctctctccggccccaggccccaccctgtgcgccctttttgtggctttttctccttcttctcacgcgtgccggggtgggccacccccgcgatggggactgagtgcgcgcaagacgaagaagagtctcagacgtgcgtgacctcttcgcgtggagaaatcctcacagcgcggcggcaacacaagagacagagagacgcgagagcatcgtgtctcacacacacacaccctgtggctgtgtgggcgagacccgcgctgaaacaagcgcgccgctgccgtgccgcgcgcactcacccacccctcctacgaccgcgagtgcgcgcgcgcagagtgagcacctctgtgcgcctctaccatgccacaacagtcactgcgaaaccaacaccccgtcgcgcgcctgcgcgcaaccgcgagcccctcctccccatctcatagagacacacatctcccctcccatatctctcacccaagcgcaccaacgcgcacgtgcgcacactcacccgacgcaccatttccacatatgtgtgggcaacccaaacaagttccccaacgaacccccccccacacgcgagcgccgcgaaccacaatgcgagaagcgcgccgcccaccccagcccggcgcggtccccggccaccaactgccgaccacccacgaccaccccccccgccggcgcacacactcaccccccacctcccactgactcccctaccctgcgccgcaccgctcccccccgcgctgctgcgtgcgccccccctgcggtcgcggagctccttgtccgccgcggccccttcgcccctcccccccctctccgttgcggccccactcgccctccctcccctccccgccccccccgtccggctctgctgcgctctcatcgcgacggtgtaacctccccctccatctcatacctttcccctgcgtggtctctcccatccggccgccccaccgcgacggcgctgcccgccggctgcgcccctccagtaccaccgcccgcgggacacaagacctccacacccgcgcgacgaccacgggggcggactacccagcaggccccgtcgcacccgcacccacaccccaaccatcctacatccactcacaccgcatctcctacacacccaacccaccacacccacacgcccccaccctcccgcacagcccacacccatccacacagccccaccatctcttactcacacatcgccaacttccacacacgttcactactcccacacccacctcatcacctgtctccgcccctatacacgtcgcgcaacctcagggacccctcctcaccaactaacggcacctcttttacaccacacaacactccacgcctcaccaccaccatctcccaccacaacacatcctgctaacacacccacctactgacccacagcagacactcttcctatccctcacacccacccttcatcaccactaccctgacgccacccactctacctctctcccaccacactctcc

SEQ ID NO: 514111 - DNA, 237 bp, Homo sapiens
tagatagtgcatggtgtgcaatctgtgagggtggacggcgcagtggatgtgctcaatgggcttgtgattcacctgtgtagcatgctcacgctgtgtgagtcttttcacactctctggcaggctgagttataatgttcagtatttccccagtcactttgtggtgtccccatgttcccactgccgttggacaccagtgtgatcttattggttgaagtcaagggatcattgatctcctct

SEQ ID NO: 514112 - DNA, 124 bp, Homo sapiens
agatggcgactgcgcgtgctcgagctgtaagggggtcatcgactacgccgtgaagatccgagtaagcctgacagaaccgctgtggtcacagatggtgttagcactccatgaacccttttgagat

SEQ ID NO: 514113 - DNA, 167 bp, Homo sapiens
ggaaatgcctccgctgaaggccccgaggcgaaggtacccaaagcacagtaatcactggtgtcgatattgtcatgaccatcaccttcaggaaacaagtttcacaaaagagcctacaagagtcatcaaggtttcatgaatcattcaaggggactttgaggcaagaccga

SEQ ID NO: 514114 - DNA, 268 bp, Homo sapiens
cttcaagacacaatgctgcatctccaaacaagaacaacggttcaactctcattgcgcccacatagtgtgtgctataaacttaagatttagaaataggtcctcgaatcccaatgaactaggggaaaaaggaaattatagcctagaatgtggaaggtggggcacactggcacggatggaggctggtgagtaagccaacacaaaaagacggacaaacccgagggcatctgtccagtctaggcgcaaacatgtatcggtctcagaatatctc

SEQ ID NO: 514115 - DNA, 338 bp, Homo sapiens
ggtggtgggcgcatgtaatgtcagttagtcaggaagctgacgcaggagaatcgcttaacctgggaggcggaggctgcagtgagccgagatcgtgccactgcactccagcctggcacgagagactccgtttacaaaaaaacaaagataagggggccacttgaaacacccttgggttgaaaatttaattcctaaaggcccatctcattcctattcacactgcccctcattataaaatgtgacccataaaaatggaattcttactttttgacccctgatagaccaatttcgggtacatttctctcatttcactgataatttcagagttcaactacttgcag

SEQ ID NO: 514116 - DNA, 692 bp, Homo sapiens
  misc_feature (184)..(184): n is a, c, g, or t
gctctgcgggtgtatgtggaccgctgtgtggcaactccagtacctgatccgaaagctctgccaagatattccttcattgagaatcatggatgcctggtggatgccaaggctacaggttccagctccacttcttgcccataaccaagaagacaagctccgttttcagttggaggccttcatgttncaggatacacccagtcctttaatctacattacatgcattgttaaggccactgttgctgctagacatagtgaccatctgcacaagtcctgctcctttgccaatggatggtttgccaatgatggacaccatggagcctgtaactgctgcgactctacatgtggtgttgaaggccaacttactggggatggctttaaaggcattcagtgggaaggcaaggctttggttggtcctgtagtggtcaaagacacgcaaaggaatcttgtttgataatgagtaaactatagtaggtgttattaaaaagctttttaaattgctcgtgtttttctacttaagcatgaatgtcagtatacttgggtacaaaactcccatcaataacattgtgaatccccattacttctagtaatgcacaaaccccccacttttgcaagctcggagccctacttgcattgtcttggatgactgtcaaatttttgattacttgaataaaccctcataaaagtaaagaaga

SEQ ID NO: 514117 - DNA, 782 bp, Homo sapiens
tgtactccagcctgggtgacagagtgagtgagactctgtctccaaaaaaaaaaaaaaaaaagaaacggtcgattatccgggggggtccatccgaggtgctggcctctgggcaaggaggactatgtgctgggagctctcttccaagctggtggcgtagttcggttccatttttatttctggagtggttttccctaagggtggtggagccaacggtctctttggcccgatctggcccaatttggtgttggggctggaatctatggtccccccaaacaaatggtccacaaggctggaagccaatcaatccccaagggcacttgggatatggtaacctggtggttgtggtgagagatacagatgggttcacaaaccgttggattaaggttaacaatgggggtcatatggggaggggccctaattttaatctctggattggtggtcctggataaaaagagaaagaaattcgggacacacaaaaaagacccccaaggggtgcaccacgggggagttaacgggccaaggtgagggccacggggagaaaggcaggggcttgccaagcttgcggaagaaaaggccctcggaagggaaccagttctggccccttgatctcgggactcctggcctccagggaactggggggaaaatcagtggtcgctgggtgggcccaaagccggtcagaggcagctttggaagaccccgtggttcggtttggcacttggttcgtggttaacccttaaaatggcccataaaaatattcggggtcaagaaacaacacacacttt

SEQ ID NO: 514118 - DNA, 114 bp, Homo sapiens
tctacaggatccctatgcgtgtacaacattaatcaggaataagatcactgtgaacactgtagctgaaatggcataatgaggagggccgaagattgtcttcagtccttaatcctg

SEQ ID NO: 514119 - DNA, 407 bp, Homo sapiens
  misc_feature (1)..(1): n is a, c, g, or t
  misc_feature (130)..(130): n is a, c, g, or t
  misc_feature (141)..(141): n is a, c, g, or t
  misc_feature (149)..(149): n is a, c, g, or t
  misc_feature (261)..(261): n is a, c, g, or t
  misc_feature (369)..(369): n is a, c, g, or t
  misc_feature (373)..(373): n is a, c, g, or t
  misc_feature (375)..(376): n is a, c, g, or t
nggcactgtgtccttcaccgcaacccgccgcgcaggcgacaatcggcagcccgctgagccaagggttccgcgaacaccatgcccataagccctcgtggcgcgacggcagtacgaacacatcggcgggttncgtaagccgcngttcaaangcatcgctgcccatctcaccggcaatggtgacacgatcctgcaggcggtgttgcgcgatcaaatcctgcacccgccgcacgacagcgggatcacgctctaaactccccaccnagtacgtacgccatgccaggtcggtggagttcgccagcgcttcgatcagcacgtcatggaccttgcggtaggtcagtgtcgccacggtcagcaggcaaggtggtgttnttgntnngacgcgcgctcggatccgtcgcccgccgcca

SEQ ID NO: 514120 - DNA, 1130 bp, Homo sapiens
  misc_feature (370)..(370): n is a, c, g, or t
tctcgagttcctgcgcgggactgcaatgcactgaccacggtgccggaaggctgcaggcccagtgggcaagcgaagaaatgaagccacctgcaacgcgggcgcttcggggcggggccgagtgcgaacctgagccccaaatcccgacccaggcatgggtgctggtggccctggagcggggcctttgtgaggccctagcccagctgcggagactgtctccgcgtggcgtcacgggcaccgacttacgtgcacccaaccacatggccgcagaccagcgcccgaaggccgacacgctggccctgaggcaacgggtcatcagctcttcctgcagactcttttttcccgaggatcctgtcaaggatttgtccgtggncccaagggcgcaggtaccattgttaccgatgaacaggggggcaagaataccattcgatttgccaatcagcaattgtggccgcaacggttgggcgcaacttggcaaccccttctcggtggttccaaggccaggcactatgacgccagaaccagcgtgctcaaacaaccaaaacagccgggtaccttgcattgacaaaccattcgtggccacttattgcgccagaaggcctgtccagcagaaccttgccggagccagcttcttgtggttgttacctattttcccttgaaatttctggggtccaagaacgcccaattgaccgttggcccttgtaggccttggcttcgccacttaacgccggggaccaccaggaccgggtgggtgggtatcaagatcaatgccgtatcacgggcccacctttgagctgcccttgatttggacccttcgggtccgcttaccagtttcccgcaaacctgtggattgggcccagacaggacggtggggtccaaggttgggacccttcttcccagagagcttacggggggccccttaagcggggaggaaccaacccaagcacaaggataatgggcttatgccaaacggagggtgaaacggttgtggtcaggaagttgcccaggacacagggcagtgaagtatggcagcgattttcggataagttcttctggccatgttggaaagggaggatataatccccgctgttggaaattctccaaggggacgagaattcggaagggcggagggg

SEQ ID NO: 514121 - DNA, 206 bp, Homo sapiens
ggcggcggctgctgctgcggtcgactctgcagcatcccctgtcatcgatcaacccgatccagctcccactctcttgctcgcctatataccgccatcttcagcaaaccctgcatgcaaggctaccacagtaagcgccagtaccccgtaaagacgttaggtccaggtgtagcccatgcaggtggcatcgatcacaccgggtaccgagc

SEQ ID NO: 514122 - DNA, 411 bp, Homo sapiens
tcagcacccaggtcactgatgagccaggtacgccaggcaacgaaggcgatatcgttaaggtcaccattacggctgaccaggtatcggtcgccgagaacgtgaagccgaccttcaccgtacacgtcaatcagccgctggatcacgacctggtcgtgaccctgagcaacaatgccacggtcaccatcaaggctggggagaccagtgcgccgtacgagcacgctgcacaaggtgacgacgtctaccaagacgctggcgaaatcagcctgggcatcaagtcggcggtggacgccacgggcgctaccttcgagaatctgcagttgggtggtgatgcttcggtcaaagtgaccgacaccatcgacgaagtggtagccaaactgaccgccacgccttcggtcacacgaggcggcgaga

SEQ ID NO: 514123 - DNA, 261 bp, Homo sapiens
taggatccccacaaatgttgactcagtcattacactcctagaccagaccccccagtgaaaaagtttacacactagttgaacaaaagagaaacaacaagaccgaaccctgtcagtctgtatttgctagcaatactactattgggatatatgaaaatacccgagtcttgctctagtcgcccaggcatggagtgctgcatgtggaaccatctctagctcactgcaaggctccacctccccaggttcacagccatatcttctgcc

SEQ ID NO: 514124 - DNA, 167 bp, Homo sapiens
gagtgaagctaggagaccggattctcatgcgaaagaggagcggtggtcagtgcaaagtgaacaacacagactacaagcgacagtacctgtaaaatgtataagcaatcacgccgaatagcgatttatgtcaaaccgacagacatatggtacggactgcaatcgcagtc

SEQ ID NO: 514125 - DNA, 146 bp, Homo sapiens
ccagcactgtttattttaatattttttcgtgagatatgtaatatccataacttcaaagcacatccgcccaagcctctttacagccagctccttcagaatcaggagccataagcattcaatgtctacttcccttctgtcgtcttctc

SEQ ID NO: 514126 - DNA, 1320 bp, Homo sapiens
taaattaagtaaactccatggtttttcttttttccaagaatggccgagtgttttgtggtttttcttacgaaagctcaggtgctttactttagcctcacttaacgagcgcgtgcgtgtggggggctgtgcggcgtgcgtgcgtgtgtggcaggatttttcaagtggtgggtggtgtttttcaacgcctctcacctctcaccctcatctctcctctctcatatctcacacaaaaaacattctcaagcatctcctgtgtgcaacaactctcctctacactttcacaggggttttctcaaaaaagatgtggagagagattttctccagggtggagggctccctcagagggtgttactcatatccccccggagtggtgtcacacgagatactccaagccttgtgggtctcttttcaaagtttctcctctcaagatccttttgtggtgtgtgcccacattgtttagcccagagggggtgtttgtcggcctctgtggtcaagctcttctcgaaaatcctccgcggccccttttacaggttataaacaaattcacagtggggatttccagtgtgggcacataaaactatatcttaaaagataaattttctcaaggataacatttccttttcccccaaaagtggcgtgtataacatataagtgtcccccctatatttttaggttccccaagacagagaccacacaaagccattaatataactctcccatctccgtgtgtgtgtgaaatcccctcaaagatttctcccaagcccaaagttggctggtctccaaatgtgcacagaagaccgagcaacactaaacacttttcataacactcagtggggggtgtgcttcaccccaaggtcaattccaaactttcgcgggggggtgtatcacagttatactatccctatgaaatcccccccttataaaaattccccttggtgaaaacaagaattccccacataaataagaggatttccacaaagcagaagtttttaccccttttaaaacattcaactttcacagaacaaatttccaccccagtttgtttccataaaagctctcggaagctttggtgccccctccttgccgggctcctgtgaaaaagagcccctgtttataaacaaagcttttctcatataacaaacaccctctataacataatctttcttaaaaacgttctccctccaaaaatatacacagggggcgaaaatatcccccaaaaccattgtacgggaaactctgggggactacaacaaacacctgtgtgaggagcatgtcattattcccccaaaattttcccaaaaaagttcgttgtttttatcc

SEQ ID NO: 514127 - DNA, 140 bp, Homo sapiens
aaacatataacctaccaagactgaatcactaagaaataaaaataggccagtcacggtggctcacacctgtaatcccagcaccttgggaggccaatacaggaggattgcttgagtccaggagtttgagatcagcctgggca

SEQ ID NO: 514128 - DNA, 1285 bp, Homo sapiens
  misc_feature (319)..(319): n is a, c, g, or t
  misc_feature (356)..(356): n is a, c, g, or t
  misc_feature (482)..(482): n is a, c, g, or t
  misc_feature (1285)..(1285): n is a, c, g, or t
acccatcggatccgtgtaacaacccagcggtttgataaaccagcggatcgatccatctccggttccatccggtcgagcggctgggtggagccttcggacagcggctagcaccgatcacctggcggttggaccgaccaaccgcgcctatcagacactcggcggaaccacaccggagtcgccaccgacacgacacacgtggttgactccacttttctacacgacacacgacttggtactgactgtgacacacgcaccctgctactgttccactactacacgacacactacttggacacacgaccgctcgtcaccacggacnccacacggacacccacacacacttgcactctgactgngtctcaccgggatccgtgtgtttgacacgtgacgtcttgactgactttgaacgacactgactgaccgtttgactttacgacacacacttcacacgctgacttacctgacacgactgtatcacgggntaccacacacctgggccctgaccctacacgcttcccactgggacactggaactactatacccccagtgacacacacactggtgattcacccggattcaccacacacacactggggcacgacgcaccttgactttgatcacgctcacccggtttgactcgtcacacgacctacaccagtcctgggtatcccttgtgacctatcgtactgggattctggtggattcgggtcttatcccatacacacacaccccgagctctcaacacctaccatcatcgcggagacccatcgcctactatccttgctaccgagcccacaccacaccgagttccgacaccacacactcccggggacaccgacacggactggacgtgggcacacccttaacttgacacccggacgaacggggtggaacgacccacacatctgaacacttggacaccccgacacggtggggttcccccttacacaccttgtgactttgccccgatccaccgggaccttggagtaccaaaacggaccacctacgaacacaaacgggactggggcccaccttgactacttgttacttgccgttcctacaacttgaactggttcttcaccgcgttaacgaccaaccgggtaccctccctggttgagaacgaaaccggccccaacggttagggaccctggggggaccaccgcctacctgggacgcttcacctgcggtagaccgggacagtacgttttctgggacacccggccactgtggggaacgcacgaccacggggtggataaccggttaggccctagccatatgactggn

SEQ ID NO: 514129 - DNA, 618 bp, Homo sapiens
catgctgctgcagtgatggcgccaacccgtggcagtcccagagctggagtgcatggaggatgtgatcctcatctccatgggaatgtgtcatgctgatgtgtgctgccatgtggaaatgctgtggcatggctgccttggctatggtgtccatctacatagttgctgtgtttcaacaatgtccatttatccttcacccctgaggctgtgttctaatgtggtggctgcaaacacctccccggtagaggcttggacctgagtgaccacttcgccacctgtgccactgtcccttaccatgaagtcctagccaccagtccatacactccatgagtacccggacagcctctgggtacatgcccttccctggtcacccatctgccctcatctacgtcatccagggacccagaccctgcaccttccatgtgggcccacagatccttgggaagtgtacctgagtgtgcaccatatgacattgtcggatatggggttagcatccagaaagaagaactgcgcttacgctctgtgaaggctgaactcagtcttcagggaagaaaggagactggattgcaccttgcttcctctgagacgggctccctctgagtgagtaccggcccctatcaa

SEQ ID NO: 514130 - DNA, 185 bp, Homo sapiens
  misc_feature (22)..(22): n is a, c, g, or t
  misc_feature (25)..(25): n is a, c, g, or t
  misc_feature (53)..(53): n is a, c, g, or t
  misc_feature (87)..(87): n is a, c, g, or t
  misc_feature (119)..(119): n is a, c, g, or t
  misc_feature (150)..(150): n is a, c, g, or t
ggccacttgattctcggtcaanacncctgccttctagtcccacttagttacanctttggtggcgcaggacgcccagcctctctctancttggtgttctctgtctgtaagatggagagcncctcacaagatgtggggtgtgtgggaacaanccaacatctggggtatttttaagaggctgggattt

SEQ ID NO: 514131 - DNA, 832 bp, Homo sapiens
  misc_feature (44)..(44): n is a, c, g, or t
  misc_feature (63)..(63): n is a, c, g, or t
  misc_feature (65)..(66): n is a, c, g, or t
  misc_feature (68)..(68): n is a, c, g, or t
  misc_feature (84)..(84): n is a, c, g, or t
  misc_feature (86)..(86): n is a, c, g, or t
  misc_feature (94)..(94): n is a, c, g, or t
  misc_feature (98)..(98): n is a, c, g, or t
  misc_feature (102)..(102): n is a, c, g, or t
  misc_feature (119)..(119): n is a, c, g, or t
  misc_feature (126)..(126): n is a, c, g, or t
  misc_feature (128)..(128): n is a, c, g, or t
  misc_feature (151)..(151): n is a, c, g, or t
  misc_feature (160)..(160): n is a, c, g, or t
  misc_feature (162)..(162): n is a, c, g, or t
  misc_feature (181)..(181): n is a, c, g, or t
  misc_feature (203)..(203): n is a, c, g, or t
  misc_feature (208)..(208): n is a, c, g, or t
  misc_feature (210)..(210): n is a, c, g, or t
  misc_feature (226)..(226): n is a, c, g, or t
  misc_feature (228)..(228): n is a, c, g, or t
  misc_feature (236)..(236): n is a, c, g, or t
  misc_feature (241)..(241): n is a, c, g, or t
  misc_feature (249)..(250): n is a, c, g, or t
  misc_feature (375)..(375): n is a, c, g, or t
  misc_feature (380)..(380): n is a, c, g, or t
  misc_feature (545)..(545): n is a, c, g, or t
  misc_feature (551)..(551): n is a, c, g, or t
  misc_feature (565)..(565): n is a, c, g, or t
  misc_feature (579)..(579): n is a, c, g, or t
  misc_feature (632)..(632): n is a, c, g, or t
  misc_feature (634)..(634): n is a, c, g, or t
  misc_feature (662)..(662): n is a, c, g, or t
  misc_feature (700)..(700): n is a, c, g, or t
  misc_feature (722)..(722): n is a, c, g, or t
  misc_feature (759)..(759): n is a, c, g, or t
  misc_feature (762)..(762): n is a, c, g, or t
  misc_feature (766)..(766): n is a, c, g, or t
  misc_feature (770)..(770): n is a, c, g, or t
  misc_feature (819)..(819): n is a, c, g, or t
gcaaagcggccaaaaaacaccccccacccccccccgcccccccncccccccccccccccgccncnncngccccccggggccggncncgggggtnaacngggntgggcgaccaactggcngggccgngnccacagctgccgggggggtgggncggccgggngnaggggggtggaagggtggncaacagagggggtgaaagcgcnggggncnccggggccaccagggncngggggcanggggntcgggggnngggggcgggggggggtggggggggaggggggggatggaggttagagaaggacactgatcaaagtgtgtgtagacccagcccaagcctcagctctgccttttctcatggtgtggccttaaacaagncactncccttcccgggctccagttttctcatctgggaaatgagtgagtccagagattctccaaagtctctttcacctgtgagaatctatgaccctctaaataagaggcataatttcaatttggacattccatactaagcgatatatgtacataacgtgattagacaagcngatgtntttcaaaggccagncatagccatcagcntgggagtgtagtgtttagtcacataaaaatataaaccaaatgaaaggggaaantncaccctccccctcgtgtcagcccccccngggctgccataacaaaatactacagattggatggcttnaacaacaggaacttatttctcnagttctggagctggggaagtccaagatcaaggtgtcngcngatncagnttctggtgagggctctcttctaggcttgcagacagccaccttctctgtntcctcacatggac

SEQ ID NO: 514132 - DNA, 314 bp, Homo sapiens
tcagctgagaaataagcattatgaaaatacgcttaatatcatagtcattagaaagttacaaatagaacaatgagataccactacacaatcatttagaatggccaaaatccaaaacactgacaacactaaatgctggtgaggatgctgagcagcagagactcttattggttgctggtgggaatgcaaaacagtagagccactttgggacagttcggcagtttcttacaaaaactacagcatactcttgcccatcctaatccagtcaatctgctgctccattggccatttacatcaaactacgcaggaaaatctta

SEQ ID NO: 514133 - DNA, 377 bp, Homo sapiens
gacatctgcacctgccatgctcgttccagcactattcacagtacccaagattggaatcaacctgtgtctatcagcaaatgaacagataaaatgtggtatatataccccgtggaatactatttggccattaaaaaaacaaaattctgttattctcagcaacatgtatgatcttagaagacattatgttaagtaagccaggcacagaaagataaatactccatgtactgtacttatgtggaaggtaaaaaagatctcatagaagtagagagtggctcatgcctctaatctcggtgctttgggagtctaaggtgggaggatcacttgaggcctggagtttgagaccagcctgagcaacatctctcaaaattaaaaaaaaa

SEQ ID NO: 514134 - DNA, 301 bp, Homo sapiens
acgaccttcgggttatgagcccgacgagctaccagactgctccatcccgcgtctgtgtgtcggcattctacagaggaacgcgagtgtgtcaacctgtgaatcgaagaaaagcgcttttgcttcaatcggttagcgcttgatgaggggcttcttgagggcttgaagctaggcagggcaaggctttcagctctattgggatgctggattcgattgagaaaatatattcgtctacgaaatttcctaccgctcagacagaagattcaaactactggtgctatatacaggggtgagtgcgatactt

SEQ ID NO: 514135 - DNA, 1008 bp, Homo sapiens
cgcagcgctgccgctcgctcggcgctgtagccgccgctgccgccgctgctcttggctcggtggacgcggtgcgggcgctccgagaggctctggtgcctgcggctgctgctctcctccgtgcgccctggggctgcggcgctccgggtcccggcccctgtcccggcatctctctggtgtccactgagcccctgtgcccctggtgtccctgctgtcctggcctggtagagaacctgctactcagcgtgctcgtagccagcccctgtggctcgctgccccctggtgccattgacagagtggtgccctgtgtaggctgctgctgctgtgagttcggtgagcgacagaggcaggcgaggacgtggaggcctgagcgaggcagggtgctgctgtggagtgcgcgcaggcattgcctgccgctgtgctggcatgccctgccggactgccaaccacgctgggggttcccccgggggacccttgaattccagaacccgaggttggagcccggcgctgggcgctgcagtctgtccggcgccgtcccgaccaggtagctggtgtcacttcggtgtggttggaacgaagactttctccccagctgcattcccggaggcgccctttcgacctggaggccgggtctgctggccacaggggctgccgcactggctgggactgccagctgggccttggagacgctggtggctgtggactccccagctttggagcagtccctcttatgaactcaccccttggagaagcagcccatggaaggtgcccaggcatgcaatgttcctggaaggccggtcctccatccttgcccttggacctccattgccatccaagtacacggccatccgacaaccttcaaccggcaaagtacgttcacacctggacccgggctggcagaaggccgggcctgaccgagcgacttgtccgaggagaagcccaacttcgcactaaaagcttttcggaaaaaccaagatcatcatcctgcccaacagacgcagcggatactca

SEQ ID NO: 514136 - DNA, 591 bp, Homo sapiens
aaggcctgagatcagacacaactcacttgtgttgggtaaataatcagaactcccggtcagcccaggctagcagctgtccaatgacaacaggaccctccatctactcagtgtcccaaggaatgagtgaggaccctatgagtgaggaatccagaccaaattaggtgttgaccaaggcgacccaatcatcctgaatgtcctatatacccagacaaccccaccatttacccctcatacacctattaacgtccagggatgaacctcagcctctcctgccatacagcctctaaaccacctgcagaatatactaggctgattgatggcaacatacagcaacacacacaagagctctttatctccaacatcactgagaagaacagcggactctataactgccaggccaataactcagccagtggccacagcaggactacagtcaagacaatcacagtttctacggaacttcccaagcccttcatctttcacaagaacttcaaacccgtgtagtacaaggatgctgtggccttcacctgtgaacctgagcctcagaaacaaagctttctgtggtgggtaaatggtcagaacctcccaata

SEQ ID NO: 514137 - DNA, 121 bp, Homo sapiens
cgtctctctgtggggtggtgatgcagtgctgcggaaaagctgagaagcggaaattggaccctgcagagctggccattgtggctgcagcacagaaaaaggactttccccacagagagagcgt

SEQ ID NO: 514138 - DNA, 291 bp, Homo sapiens
agcagcagcctgaacttctatctatcaatctcttcaggatctcatgtagaagtacagatcaggcatgacctcccatgggtgtacacgggacatggtgccacgcttgcgcagaacttcccgagaccagcatccaccacatcaaacccactgagtgagctccctacgttgtagcatgggatggcaatgtccacaatagcgcagaggcgaatctgtgtaacacagcgcaatggtaaggtaggtttttatataagatgcctaccgataattaaacatagaagaacagcacctagg

SEQ ID NO: 514139 - DNA, 916 bp, Homo sapiens
gttcttccgccgctccgccgtcgcgtttctctgccggctgagcgccccgacccggggcctgagctggactgtcgtcaggccctgcgccctcgccgcaccccgcgctgtgcccccgcttccacgcgtgcccgacggcctcgtcgcgccttcacccggcgaacaaaaaggcgtgggtggggcccggcggtcaggtcgcaagtggaacgagagagatcgccgcgactggtcatttgacaactggctccgagcaatgtgcgataggcgtggttgatgctgggtggatcggacagctccccagatgcacgtgttttcctcttccattcagatccggggcgccccctaggagcaactcaagtggctgttccataggttgcggcattgaggcccaagaatggacttcctaacagtaggcgctgaacgaaggtaccacgagacaattctgtagtgcaattccttgaaaccttgaatgtatccccagttggacgcattggcactcgtcaacgcagaccttggttgacgaccatggtaggaaaggcatcatgagcacacgatcagccctttcatagcaagcggagcatgcgggacaggtgagacccccgttggagagagcaaccaccaggttgcattgcgtggaccctgcagtgcctcctctctgaaatcccccacatgggccaatacgaggaggaaggacaggaatgcactcaaagaattcactgttctgaggaacactttctaaaaaacccacaggtgccatgtaacggtggtccatgccaaggtcccgatgcatagtgccctacttacgggcctcttggggcggcaacccacgtggacgattgtcatggaactctgggagagcgggggtacaacccaaaccgggtggccccatctaacggaggggctaacgccccatccccac

SEQ ID NO: 514140 - DNA, 978 bp, Homo sapiens
gatgatcgaacggttgcaggcgtagcgagagtggtcgtcgtcgtctcctagtgtctcagccggtcgtcgtgatgttcgaccgcctcgctcggatgctcactggagccagaaagcaggtagagtttcttccttcccagctttggatgtagcgagagttgttgcacacatccgttcaacatgttcgaggcgcgccgtggtccagggatcaatccctcataagaagggtgttgagatggcacctcaaggaatgtctatcaagcagtagtgccctgcttggtgaatggttagcctgcgagcgctgtaaaaccttgtcatggagacactggaatcggtccgacgtcgtccttgggcgctcgagtcaccctgcggtctttggggggcatcgagatgcttaccggctgcggaccgcaagcctggacgatgggcggctgaatctcgtcacacagtttactggtcacaattatttacataaatatgcgccgtgtatacgaataaatactcatttacacataggggtccggaagggattaatagcgaaatgtccattggtgggcgtcgttatttgagagcaccattgaccaggaagaagaggtttcagactatgaaatgagagttggaaggattacgattgtttgaacaactgtggaaattccggaagagtgaggacatgcgtgtgttcgtgaaagatgccttctcgggtgaattggaggtatatgtcgtgatgtgagccagtattggagattgggttgaaattttcgttggtggaagacgggtgaaatttgtctgagggggaactggggagtgactttaattgtgcacgcagtaaggcgctgagggggagtgtcctaagcagatggcccgtaaaactttcggaggtttggattttgaagaaaccccttagggggccagtggaggtcctcggggggtaaaaaggggcgtgaaaaactgtcccaaaggcaggggggttttttaaaaagg

SEQ ID NO: 514141 - DNA, 195 bp, Homo sapiens
ttttttgttttttttccctattattacaaagatttattattattttttattcaggatgacaaggccatcaggaggtcaacaacacaagcacagaacagaagggaaaagaaggccaaacgtgcgtgaagtgctcaggcggccgtgttcgtggagaggggcgtgaggctttcggtccctcgggaagtgctaaagcca

SEQ ID NO: 514142 - DNA, 372 bp, Homo sapiens
tctagaggatctccttccatggcatcagctgctgccagagctttctgtgcatttcagtgcggccgatggcgggctgcgggcagcgtcaccctctggtgccgggctgtgctgagcctgctgcgggcctgttgcggtttggcccctgtacgcccagaccctgtccccccgatcccccagctcaggaaggaaagcccagccctttctggatcccacagtgtattggagcccctgactcctcacgtgcctgatctgtgcccttggtcccaggtcaggcccaccccctggaactccaactgccccagccattgcactccggccagccattgcactccgggcagccattgcactccaggcagccaattgcactccgga

SEQ ID NO: 514143 - DNA, 917 bp, Homo sapiens
atcagaaaactttttactcactgttccttcctttacacagagagttaaacgacttcaaaccactttcgttattatccaaccttagttcattctttaagacaacgaaagaagtccctcttttatcactcctttgacagtctgtttacgtgtttcagcaaactttttacgctctttattctccgtttaaagcaatgttgttctcttctttgattaagacagctgctgttgctgcttccttgatcggctcagttactgctttgccagctcaccaacacaaccaacacaagcgtggtgttgttgtcgtcactgagaccgaagttgtctacgttaccgcgggtgctcctcaagaagtcagtggtgagtccaccaccgttctttggagtctgtcgtttctaacgccgcagctaccactgctactgagtctgcctacacactccaggctccagttgctgatgcttctactcacaccactgcttcaactgtggccacctcctccacctctcaagccactgcttcttccaccggagatggttctcttccagatgatgactcttccagcttcgctgcggtgccaagggtattacttactctccatacacctcttctggtgcttgtaagtcactttctgaagtcaagtctgaccttgctgagctctctttctacagtcttattagatgtcgggggttgactgtgtacccagtgtgaacgttttgcgcgctaagggtctggtcaagcgtttctgggggtctcctccgggcccaatgggccgggtcccacaagggctgcgtcagccccacgggtgggcaggttacccggtctctcgtacaactggcccggggtcttcggtgcccggcccttcccggaaatttggcgggcaggccgttggccgcctaccccgggtggttccgtctacccgc

SEQ ID NO: 514144 - DNA, 694 bp, Homo sapiens
  misc_feature (115)..(115): n is a, c, g, or t
ggggaagcggctccggggggtttttaccccaaaattttatataatagggggggaggggtgttggggtgttaactactggatgggctgttgagtagacaagtgggtacaaggaccnctgagacattgtaagctcacggtcatcttagggcctcaatcctcgggggtatgggaaaagttgtcagaaaaaatggggtgtgtggtcctatcgaggccctcaccccttaagttcataatacaggctggcactggcaagggcctctcatgtgtcacacacatgtgtcgttgtgagctcgccccatggtgggtctgtggtgagagtcagctaggatccctgctctagcagcacaaaggaaggggccatacgtggcctgtaggcattgtttcagactcataggaagaaagtagagccgggagcctgagcctgggctggagccttctcccctccccagttggactagggacagtgttaattttgacaaggtgtgggccccagtgtcctcttccaggggtccaaggttacaggagaggtctctgggcctgttttatccatcctagtcctgcatctcccaccccgtgtatcatagggaactttcaccttacaatcttgctaagcaaagtgcgaatagaactcttcctccctatgagctgtagtctcatgtcgcaaataaaagggcaacatgtttctgttaaaaat

SEQ ID NO: 514145 - DNA, 847 bp, Homo sapiens
  misc_feature (364)..(364): n is a, c, g, or t
  misc_feature (679)..(679): n is a, c, g, or t
ttacatgggagaaatcaagtttttctctgctgttttacaagttacacattctaattttgtcctgtggtaacatctgccagctcacaccgggctcacagaaccttatgcctcgcagccgcctcgtaggcccctcgcaggcatgcgctccacacgccccgctctgcgccaccccagccctggagtctgagctctcctgcggggcgctggggccacttggtttcctgtccatgtcttgctctcttatggcttcttctgagctctttctcctccttccttcagtgactcccccaacactttctgtgtgggcctgggatagaacgaggctgcatatcccgcctgtttaggaagccctgtgcttgtatcnctgtaggtattggaggtttatgtttaacatgttttgatatgaagatgtagaaggatttgtgtaggtttggccttatccatattctgtcttcatcggcctcctcgaagaacttcattctgtcctaaaggaagcagtcgcagcttaaagagtgtgagcacgcgcccactccccacagacacacccggcctgccccgcccagctgccctgcctgagaaagcgaggtccttcctttcctggagacgccggccacagttcttcagtgaaacgcttcactctctggtcatagaggtaggaactatagtgtccaataaatgncaggacgaattagcccagctggtcacgctcacagtcaacggttcacaagaaatgttgcggacccggaccgagggttgcccgtgaactgggaaggcaagaaaggtttcggaagcctcgggcgcactttggaaaacaatgcggctgggaccgaagaaccggtttccaaaa

SEQ ID NO: 514146 - DNA, 677 bp, Homo sapiens
  misc_feature (28)..(28): n is a, c, g, or t
  misc_feature (478)..(478): n is a, c, g, or t
  misc_feature (482)..(482): n is a, c, g, or t
  misc_feature (558)..(558): n is a, c, g, or t
  misc_feature (570)..(570): n is a, c, g, or t
  misc_feature (598)..(598): n is a, c, g, or t
  misc_feature (600)..(600): n is a, c, g, or t
  misc_feature (607)..(607): n is a, c, g, or t
  misc_feature (614)..(614): n is a, c, g, or t
  misc_feature (623)..(623): n is a, c, g, or t
  misc_feature (635)..(635): n is a, c, g, or t
  misc_feature (673)..(673): n is a, c, g, or t
actcgcaccaggctgtccgtgtagccanccaacagagtctggccatcaccagaccaggccagggaggtgcactggggtggttctgccttgctgctggtactgaaaacttcttgcttcagtccaactacaatgatctttccctctaaatcccagaccttgaagctggggcctgtggcagcacaaagccagtagcggtaagggctgaagcacagggcgtggatgaagtccccaccacctagcgtgtaaaggtgtttgcctccgttgagaacccataacaaggcctggccatccttgcctccagaagcacaaagggatccatctggagaaaaagtaaccgtgttcagaaagcctgtttggccaatgtggttggtctccagcttgcagtaagccaggttccataccttgaccagcttgtcccagcaacaggagaggatgaaagggttgctgccgtggggcgagaagcggacacaagaaaacnactntgagttgcttttatcctggacagtttatttgcacacacccagggtattccatagcttgatggttttatcttgaganccagaaaaaatntgccggttgttagaggagaaggccacantnagcacanccttggnatggcccanaaatcgcctcgnggtggtgcccgttgttagaacccagaagcgcagggttncatc

SEQ ID NO: 514147 - DNA, 234 bp, Homo sapiens
cacacacactagtagacataacacacacacagatcatagaaacacacacagacatatacacccagcacacagacacacacacacacacagacacacacacagcaacacaggcacacacacacacacacacataacacacagacacacatatacataaacacaacacacacaaaatactgacacacacacacacacagatatatacatctaacacaaaaacacatatatacatac

SEQ ID NO: 514148 - DNA, 303 bp, Homo sapiens
  misc_feature (9)..(9): n is a, c, g, or t
  misc_feature (11)..(11): n is a, c, g, or t
cctcgcggngngcttgtttctgtttgttacttacaggactgagacatcttctggaaactggtaaccctgggggcttttggaacccggggttagggcttctggcttgcttgtggccttttccaagcccaagttctgtgcaaggaactggttgggtgacagcaaggtcttaattcagccgggggttgcaacggaatcaggcaagccaagcctgtgaaagatggagctgacttgctgcaggggaactgatttatagggcaagagaagtcacactccggcctctcagaattcacttgaggttcaatt

SEQ ID NO: 514149 - DNA, 204 bp, Homo sapiens
tatatattgtttatttttattacattatttaatgattgaggtattcttagtgagctacctgcacctgtagccttcttctgcaaatgcaaagagtacaaatgcacctcctgcaagaagaactgctgctcctgctgccccatgggccgtgccaaatgtgcccaggactgcacctgaaaaggggcattgtataagtgcatctgacgt

SEQ ID NO: 514150 - DNA, 735 bp, Homo sapiens
agcggagctgaagctggcgaattgggacgactggcggatgcaggccttgcggcagcgtcgtgtgcgccctgctccggcggtgtggacagccgccgtggccgcgctgatgctgaggcggagagagttcaccaagtgacagggtgatgctttagtgaagaagatgggaactgacatgggatgaaataatgggtgtctgtatatgaacgacgagaagtagtgatgtaagagtgctttacggaagtttgctcagagtgcattatatatctctattgcagacaagtgtgtcctgagcgtaagaggagtattggaatcgatgtgttcagggagcagatggaatgtgtcaaaggtcaaatatgtcaaagaacttcagctggatgattgtaacaaagtcttttgaagtcaggaatgcagcggattaaagaatgcccgacacgggtctctcttctacgatatactcgggttttagacatgcttatgaaaactgcgcagtgtgtgaccctaggatgctcctgagtgattgaaccatctattgctactggggggattagagcgagagagtttgtaagggaaagatcgctgctgagaatagacttcatcattgtgcttgatgaagatagagagaggatggtgcatgtgtggtcatcggggaaggaggagttggagaaccatctacctgtacttacagtaatgtggatgcctcgatcctggaacaatttatttccatagaatgactat

SEQ ID NO: 514151 - DNA, 541 bp, Homo sapiens
agcggagtgggaactgaagaagatggcgtgcctgggcttcctcctccccgtgggcttcctcctcctcatcagcaccgtggccgggggaaagtacggcgtggcccacgtggtgtcggagaattggagcaaggactactgtatcctgttcagctccgactacatcaccctcccccgggacctgccaccacgccccactcctgcccctgtatgatggcaccaaggcaccctggtgcccgggtgaggattccccgccagcagtgcccagctccgctcctccctagtcagcggcaactcccgtcagatcactgccatggtcatgaaggggtaaacattgcacgcttccagcaacgaataaggctgggctggcgtcagggccaagggtgcccagctgggctgctcactcgtgagccgggtcatgtgagacaacagtgtctcaagacatgcaccctggaaccccaggatccaccgccaggacccctggacaagacctcgctcatccctgtgggtaatggtccactatgactgacattgctggacatgc

SEQ ID NO: 514152 - DNA, 137 bp, Homo sapiens
gagcatcaggtcttacaacgcggaacgtgcccacatgtgccactggaagcctgcagtgagacgtgactgctatactggaacgcaggctgatccttgaaatcacactggttccctgaccactacccatcgatgtgtga

SEQ ID NO: 514153 - DNA, 198 bp, Homo sapiens
tagtcatcatattgacagcttgtttcacaaagggaaacaagtacagagacggattaactgggtgagaaaggcaagtgacaagtatagttgaaaaccgtgctggcccaagggtcagttgattcattccgttattccagacatagttgagttcctgaagagtccttaaccactctgactcccgttacgtgttcatcagta

SEQ ID NO: 514154 - DNA, 134 bp, Homo sapiens
ataacctccaaagaccggttccgtataggaaaagctagaccaatgccttgggtagaaacacccaagtccgaagtcaacaacaagcaatgatggcgatggcgattctagttaataaaaagggaggttattggcat

SEQ ID NO: 514155 - DNA, 456 bp, Homo sapiens
acggaaccggccatacaagatgacactagtgtccaaccgtaaagatctaccagtcgtgatcggaagtcgtgggttgaagctattgtatgggggaatcaccagcatatcagcagcaattgaggacatcaggatgaatgactccataatgggagtaaatagaaaggaaagagaagtgaatcaaagatggaccgatggaagcactgatactgacaggcatgagcaatcgtcgagaaattctcaagagagtcggacaagacagagtcagagagagaagtaaatgaaacagccctgtagtggtggctaagaagccatggactgggttgggaacaaatactagagctcccagaaggcaggcacagattgagtcacaattcacaagaaagccctctgaacaaccaaaaccccaggaagtatagtatagcctatgtaagtaagcttttgagacagaatctaact

SEQ ID NO: 514156 - DNA, 369 bp, Homo sapiens
gccaaacggacccaggccctttctttttccccagcaccaattctttcccacacttgttcacttcccgccaacttccatttcaactttctttttacactgtgatgtttctatcacaacctgtaggaccactatcccaccagcaagtcttccctgtacacacatttacgggggcacatatcctttagagtctatagggttattgtgaagccacctcatgctttgtgatggtgcccagcccaaatccttctttgtaatatggtacagagtgaattgtcaagacctctaatcttgtattacttgtgtcaagaggacagtctttgtacaggtaactgtgtgtggaaattactcgtgaggcttagtgcacactag

SEQ ID NO: 514157 - DNA, 1107 bp, Homo sapiens
gcaaacccactccaccttactaccagacaaccttagccaaaccatttacccaacataacagtcatcaggcgcatagacacattgacaaccatggacgccaatcagcatcatagtacctgcaagggcaacagcatgcacaacacattcataaccacagcatcaatatagccaaggcactaacccctataccttctgcatcaatgaattaactagaaataactttgcaaggcagagccaaagctaagacccccgaaaccagacgagctacctaagaacagctcaaaagagcacacccgtctatgtagcaaaatagtgggaagatttataggtagaggcgcaccaaacctaccgagcctggtgatagctggttgtcccaagatagacatcttagttccaactttaaatttgcccacagaaccctctacatccccttgtacaatttaactgttcagtccaacagaggaacagctctttggacactaggaaaaaaccttgtagcagagagtaaaaaatttaacacccatagtaggcctaaaagcagcaccaattacagacacgcgttcaagctcaacacccactacctaaaaaatcccaaacatatcactgaactcctcacaccaattggaccaatctatcaccctatagaagaactaactgttagtatacgtaccatgaaacatactcctccgcataagcctgcgtccgcattcctaccacttgcactgaacattaacagcacaatatctacactcaaccaacaagtcattataacctcacaggtcaaccaacacagcgcattgcctcattacgcacagggttcccaacaacgtacagggacttcggcaattatacccgtctgcttttccacacacatcactatttacattaaccacatttgacgcaccgacattccaaatacacactgtttaacggaccagcgacccctacaccgccaaggatgcatatcatttacaaacaaactacaataacatagaccactattcggcgccaccacgtcaaatctgacgtactacactacctcaccaactgttatagataacgccacataacagatcatataacactaacacaatacatagactaaca

SEQ ID NO: 514158 - DNA, 114 bp, Homo sapiens
ggatcgctccacagacaaggtgaggatataagtagagtctaccaatgcgacttgtgtctcggagatcaccacattcatgtcatgcgagagtcactacgccaattaaagagatgt

SEQ ID NO: 514159 - DNA, 327 bp, Homo sapiens
ctttgtgtctctttggagtgttttagggtgggcaggcggtgtgtgtgtgcgagaacgcactgatcacacgtgtttctttttggggcaggaaggtttgccactaccagcaaagttggaactgctgatgctggttgtcaaggcagctcactctcagctgtgcgtgctggtgtgcgcctgtggtcccagttactcaggaggctcaggtggaaggatcacttgagcccaggaggtcgaggctgcggtgagttatgattgtgccactgcattccagcctgagtgacagaagagactctgtttgtttttttttctccgtccccgcccaaaaaa

SEQ ID NO: 514160 - DNA, 178 bp, Homo sapiens
  misc_feature (65)..(65): n is a, c, g, or t
taaaggggcggtgaacagctacccatactctttataaggtcttaatcctatttatgaggcagggnacttttgaattaatcaactcccccaaaagttcaatttctaataccattaccttgagtgatcaggtttcagcatgaatttggagggacacatacactcaaatcatagcagttcc

SEQ ID NO: 514161 - DNA, 400 bp, Homo sapiens
ggggcgggatgtaaccggctgctgagctggcagttctgtgtcgctaggcttctgccggccgccgccgcacataagccacgaggaggagctttacgacttcccggtcttcggcgccgggcggcaagggccagactctgcgctagagcgctgcgcgaaccggccggcacctgtcgagaaggtgaacgatcgactgtccgcagaagctctaatggcacgcagctgcagcccggcgccactcgctcattgagctgggaaatctggattgggaaagttgacattatcaactattattctcacagatttgtattctccagagtatccaggtccttctcagagaattaaaaagcctgtacaggtctagatattggtatttttaattgatgataagctggaataatat

SEQ ID NO: 514162 - DNA, 120 bp, Homo sapiens
gactctgaggatcccaacgtcagcactacttgggcagaaagttctcctcctgggcgtcaccttgttcattgtctctcttgtgtagcagcttgcctctctcctaccaagaaggagtcccgc

SEQ ID NO: 514163 - DNA, 498 bp, Homo sapiens
ccagcgtccgattcccgacacagaacccaagatggaagaattcaaggcccaattccctgctgatgagtgcaccaagctgaaagaagagatttcccaaatgagggggctcctggctagaaaagccagcgaaacaggagaaaatattagacaggcagcatcctcttttcagcaggcatcattgaagctgttcgaaatggcatccaaaaagatggcatttgagcgaaaaggctttggaagttctggccctggggaccaaaaggaagttccaaaggggggaaccccgtaataatagccgaaatttttgacgcccgaaggcccccatatgaagcttaggagtgaaaagacttcctgagcaaaaatgggcgaacttcagtctttttactgggtttttgcagtattctaaaaaaaatttccttaatttgtaaatttagggccccttagctagtgatcatttaatggccagtgattttaccagtataaagttcccaatatttttta

SEQ ID NO: 514164 - DNA, 358 bp, Homo sapiens
  misc_feature (12)..(12): n is a, c, g, or t
ccctcccaactnaaactccccaaaaaaccttcctttggtaacattttggatactttcccacccctaatggcagctcctcccaaaaatagctgcctttaaaactctgaatttaaattttcaaatatttggtttcatttttcaaacaagccaagaggcctctggtaatgaagtgctatatatatatatatatgacggagtctcactgtgctgcccaggctacagtgcagtggctcgatcttggctctctccaatctccgccttgcaggttttcaagcagttctcctgcctcagcctccttagtagctgggaccacagacatctgtcaccacacccagctaactttttgtatttttggtgg

SEQ ID NO: 514165 - DNA, 300 bp, Homo sapiens
cacgatccccggttttcgagttaagcgattatctactccatacccaagatcataccatctatgcgctatatatattgtggcccatagcttctatcctacggataagatagtgaaatgctgttcccccacaacctttctctctggaacttttaatttcatcccgagttgacgaatgcgggaatagcatgctttaagacccttgcatccaataagctaagaacttttggcccattttttttgggccggtaggttggagtgtgtgctgttgttctgcctttatcctcgcttctctctaaaccc

SEQ ID NO: 514166 - DNA, 622 bp, Homo sapiens
aggagagatatcccacgagtgagacattgtacgtgttggcacatgagatatgcgcgtataaggccataatgagagactcaagtatgagaaccagcttggcatgtgatggaacaagggacacattgtacctcgaggcaactggaatagagcacaggagagctctgatacctggagcaaatggcatggagcggtgatagtgtgaggtataaacctgatgagcccagggttaagagcacagacaagtcaaacgtatgcgaggtgctcacagacagttctggagatcttagtgctggtcttggctatgctggaaccacagggctccaaggacgtcacaagtgtcaagccatcatgtactttgacccagatcacgtgcctgacgtgcaaccacgtcacctgtggtatatgacatgcaaaactcggagccattgtgtgagggtgcacaatatgccatgtgcaagatatgcacgatccgaatgctttaggatgaaggagaacgtgcacagttatcccatagatggactttgcaccaagccgttatgtgtgagaagctccacactgagacataacccctgtagttgtgcaagccggacctctgttgctcggttctgttctggtatagccg

SEQ ID NO: 514167 - DNA, 818 bp, Homo sapiens
  misc_feature (161)..(161): n is a, c, g, or t
  misc_feature (226)..(226): n is a, c, g, or t
  misc_feature (238)..(238): n is a, c, g, or t
  misc_feature (242)..(242): n is a, c, g, or t
  misc_feature (245)..(246): n is a, c, g, or t
  misc_feature (281)..(281): n is a, c, g, or t
  misc_feature (327)..(327): n is a, c, g, or t
  misc_feature (329)..(329): n is a, c, g, or t
  misc_feature (343)..(344): n is a, c, g, or t
gagctgtttccgttcctctgcccgccatgccgttcctggagctggacacgaatttgcccgccaaccgagtgcccgcggctggagaaacgactctgcgccgccgtgcctccatcctgggcaaacctgcggaccggtgaacgtgacggtacggccgggcctgncatggcgctgacgggtccaccgagccctgcgcgcattgtccatctcctccatcggcgtagtgggnaccgcgaagganaacnganncacagcgcccacttctttgagtttctcaccaaggnagctagccctggccaaggaccggatacttatccggttttccccttngnagtcctggcagatnngcaagatagggacggtcatgacttttttatgatgtgggcaccggggggaatccaggccatctgtgaactgctgttctcccagagagatctctgtgcaagagtgaggcctggagataaccagttgtggattatcccggatgcaacattcctggtgatcacattaatcctcttcttcatcctcatatgaaattaaatgaagagagttcctcattcttaaaaaaaaaaaaaaaaaaaaaaaatggtggggcgccgcgaccagagaaatgttttaaaccactcggggccgcgggcccatgagtaatggaccctggcaacgttgacaaggaacgggcggcagggggtccccaaaaacgcggcgccgggttcgacaccaggtcgggcacgtcaaggcagctatccccccccgcggcggggaaaccacagcgaaaacaacgcactccacaacgaacagccccacagcagccaagcaaccga

SEQ ID NO: 514168 - DNA, 489 bp, Homo sapiens
  misc_feature (122)..(122): n is a, c, g, or t
  misc_feature (136)..(136): n is a, c, g, or t
  misc_feature (259)..(259): n is a, c, g, or t
  misc_feature (282)..(282): n is a, c, g, or t
cagcaagggacaccagaatcaaattgctgaaaaccagtgacaaagtgtgaacccttcaagcagccagagaaaaagcaggtagagagatgaggatgaggatgacgacagacaaaccataaagncggcgcagtccagncatcggtgaagatgcatccttaaggagcaaggtgggcagttagactggaattctttatccagggaaaaggccattcagaactggaagtggaataaataaacactgacagaacccagcacaccngcaatatgagaacacagaagggnactcttcaggcagaaggagtgtgatgtcagatgaaaactaatctacacaaataaagaaggccagacatagtacatatgtagtaaataagaaaaatgtttctcttccttttaatcttttaagaagataattgatgttaatatggttctggtcactctatctgtaatagtgtcaatgaaaataaaattaaattgagattttaaaaggta

SEQ ID NO: 514169 - DNA, 138 bp, Homo sapiens
aagtagcgtgcatgagaaccaatctaacacagaagcttgtgctcagtgttggcaaactcttgagtcacctgagcttgtggtttgacctttcaataacggtgaatatatcactttgggctgtacttgatcatgggataa

SEQ ID NO: 514170 - DNA, 1203 bp, Homo sapiens
  misc_feature (868)..(868): n is a, c, g, or t
gctgcgacgctggtcgttcttcggtggctcggtgtgttgtgtggcgggttgtgggctcgtggccctgttgttggtgggtgtccacgccgtgttctctctcccttcgatgggtcttcgggtgtggggcgcctgtttgtcctggggtgccgagggctccgtgaccgatggggcgtgtggcgcacgtgcggcaccgcgcggccggatatgctccgtttttgccctcgggtgttggcctatccgtgtcagaccttgccccgaagtgggacaacccggtgttttttgaccctctgcttttgcccttccgcgcagaacccacttcgtggaggggtgaactttaccgcgccttttggtggaactttgtacgtgtccgccgcacttggcggatccattgaggtccctccgcaagcgcctccccgcttggtatggggccctacctccgcactccacgcgccacttcactgggctcagagaccggtctatacacacttcccgatgacctgcccccttcataggttttcccagccactgtcaccttcctcagcgtcatcggtgctcttcagctacacaacacatgggttttgggggggcaattctggccccgaaccccgccttcttctttgcacggttaaacctcccggaaaagaggccgcagtttccccggacacgtgagagttcctcccgcgaggattcttctgtctcactcacatcccgggtctctgaaggccccggagggagtcccactcccgcccatccaggatgtctcaccagaaggattggtcgaagacgccctcgagagatccccccacgggaccagaagggtcaagctcgtccggagcgagggaggaccaccctgagtcccgccaggccncctgaggtcggaggacacgatggaaggcctatgatgcctgagggccccgctgatggcttccggctcctcgggaagactcccgctttgctgactcgcgagggcccaccctgcctgctcctgctcctcgcgttttgccttctgcccctgtcctagagatcttctgggcacactctgaacctgctcgacggggtccttctccgacagccccccaccctgctttagttcctgtaatgaaaaaggggcacgactacctcaccacttccagacacactttcccaccctgactcctctcccctcgtttttccttccataaactattttgtgtcccgccttta

SEQ ID NO: 514171 - DNA, 399 bp, Homo sapiens
ctgattaatctccactatgaacttttttttgctcctctctcaaaaatcacttgaacatactctgttcatctcgtttttgcattttctactctatttcattgatctgttgtatttcccccagtcttataatatattgtcttgattactatagctatatgataagctttgaaatcaggtacactgatgattgcccctttattctctttttcaaaattgtttctggttattcctagttccttcgtcttttcagataaatctgagcatacacttttctgtatctagaaaaaaatcttgctgtgattttgataggaattgcatcaaatctttggaagaattgacatctttactgtgttgagtcttccaatctatgaacatggtatgtctcaccatttgtttacc

SEQ ID NO: 514172 - DNA, 352 bp, Homo sapiens
cacctacggattacctcaacgatattacaaatagatattactcattattgatccagacaaccctatcttctagtgtatcattatgcaaacagaactgaaagcagggtcttgaagctggtatctgcacacccatgttcatggcagcattatttactataaccaaaaggtgaaagtaacccaaatgtcctgaatggataaagaaaatgtggtttacacaaataacagaatattattcagcctttaaaaggtaggaaattctgacatatgctgcaatgtggattaaccttgaagacattacactaacggaaacaagccagttataaaaagacaaatactgtatgacgccacttat

SEQ ID NO: 514173 - DNA, 191 bp, Homo sapiens
  misc_feature (70)..(70): n is a, c, g, or t
  misc_feature (77)..(77): n is a, c, g, or t
tctagaggatccctgtgctcctcttatccaaacactttcctttgcctgagactcagaatcttcctttaanccaagancctgtctcttccactccaccctttcttcagggagccttagatcacatccactctcaccctggcaggcccaggttaggaatacgtggtgcggacggcaaggggaaagggctgggc

SEQ ID NO: 514174 - DNA, 875 bp, Homo sapiens
cctgcggtaccgcaagtcgagcgcctggagcatggagcttccagcccgtgtgaacctctcagctgccccagtccccgagtctctgcgtgtgcccaccggcgctacactccaagatggaccaggctggagggtgcaggtgctggcccaggtgctggcactggagaaggagcgtgtggccctcagtcacagcagccgaacggcagagcgcaggaagtggaaaaggagttggaccgtcctgacagggctcgtgtggctgagctggagcacgggtcctcagtcctacagtcctccacgatgccttcaatgatcagcatccccatccgtaacaactacattgtacgcccgcgtgcggaagggctctgcccgatctctatgcattcaccgactgcatgtggctgcggtccaggtccagcggcaccgggcaggcagccccttctcctactcagtgcccgggctgggccaacgagattgtactgctatacgtgctgggccatgagcccatggacgctgtctgatcaacgacaatgtggcccaggtgcccctgagcctgaaaggacactgtgctgctcatcacatctgcatcggctggaccacaagggatggcctatggtcttgcctatgcatggacggggagctgcatgggcttccgggtgacgaacctggctgacttggcagccgcatcaatgcctctatggtgatcccttatcttgggccggagcgtgataccctgggttggccggttttggtgccagccaggccctttgtcggtgaattgcccggtttagcctgggggaacgcggccttaccggccaggttctgggttgccactgatgcgccatgtggggtctcccgggagccctgggggggcctggggg

SEQ ID NO: 514175 - DNA, 120 bp, Homo sapiens
tatggaatactctgctgctcgagactgtattgaggctctcatggaggagctgctctaatgaagaagaaccacgaagaggaagtaaaaggctacaagcccagattgcagctctgggttgac

SEQ ID NO: 514176 - DNA, 395 bp, Homo sapiens
  misc_feature (65)..(65): n is a, c, g, or t
  misc_feature (219)..(219): n is a, c, g, or t
  misc_feature (304)..(304): n is a, c, g, or t
  misc_feature (361)..(361): n is a, c, g, or t
tggtggccaggggacaaatcacattcatatgatatggatcagaacggggaaattcccgaataggngcttaagttgaaagtatcacgttcgggaacggaaatgcaccatcgccaggatgcgcgaacaatatatgcatccgagcggggtaatccattgaggaacgcgccgcgggaggtacgacatgccgcaagtacagcggcggccaagagaattggtggngtggcgcaggtaaatgcgtggtgggaagtgattgaccggcaacaagtagcggatcgatagcggcgttagaacggtcgtcatcggngcgacagcaacacggtcgtcggcaccggtcacggggggtggagttattgttcgtcgngccggaaacagcagtaaccaagcccgtcatcgca

SEQ ID NO: 514177 - DNA, 179 bp, Homo sapiens
gtgggtagaccgtggcttgtggggtgaccgtggcttgtgggttgaccgtggctagtgggttgaccgtggcttgtgggtagaccgtggcttgttggttgaccgtggcttgtgggttgaccgaggcttgtgggttgaccgaggacttgtaggttgaccgagacttgtatgttgaccggaga

SEQ ID NO: 514178 - DNA, 259 bp, Homo sapiens
aggtgatccccaacctacccacccactcctgccttctcaccctggcattcccctacactggggcatcaagcctccacagatctaaggcccttcccttccattgatgccagacttcaatactaccctttaccatagctctctcttacttttcttctatcgtttgtcattaaactcaccctaagcaatccattttccccagcataaaatatagttatatcacagattccacaaaagagagaaaacatacactagtcgacgc

SEQ ID NO: 514179 - DNA, 1360 bp, Homo sapiens
  misc_feature (289)..(289): n is a, c, g, or t
gcagagactgtagtatcagggagcagggaggacgggggcgatggcctgcgtcggggccagtgcccagtggactcccgggtgtcgggaggacccgatggttcccggggatctccgtggatgcggggactcgcgcggtgccaaggagcggtgggaggaagcgcgttggacaacggaagactggagggacgcgacgatggagcctgattgtgagacagagtaaagtgtacttgggagtgctccgatctacccatggtaagtcgccagacttgcgtgctgacgcgtgcagtgntgccactaccatgtcccctagcggaggtcacgcactactagttatgatatgctgatgtgacggtctccaaagggagacttcacgtgttgtatctcgactctaccttatctgcggaggcaatcatcattaccgagactggaggtgccagggccgagaagcattcttagtgacgcggcgccggaagccaaaggctggcatgccaggtgcaacgaggttaaggtttcccatcccacgagtgtgcctgggggggtgagtccccgtcacgtttatttgctgagggggcacccttaggtaaggggcgttcaagggctccgtgtgcatggagtcctgggtatgaatccgatcgccttgcgaaaagggaacgcgattgaggcgcgattcggaagcaaaattgccgattggtttccccttggtcgggtcgcgtggcacgcaaagggccctggtgtccccactcgggtccctctacgtgtggacggccatagcaggggccttaccctgggagggggaaaagccaaaggaattcgggggcgaaaggccccgcatacaagctcgtttcgcgctttggccaaatgggttgaaccacggggccaggatttgctgggccttcctggatgagcgtgggtagcgagccctccaatcgcgcctggccaacgcccaagggggggcccactggggcgcatcggggtcttcacgggcaccccttggttgcgccttaaagaaaagcttggcttccaatggactgggacatagggttagtcgacttgaaccgttggcttagcgagccttcgaggccccgggtgggcattggcaacttggccaaaccccttgggggacaaaccttttccgggcccagagggacgcaaactctttatagaagtggcccaatttttcgtaaaggaacctttaaccagaggtaccgttggagccccccgaagcctcctggggaaagggcagaactggtatttcaccacaaaggttctccccttaattaagaggaggttccaactggagccaaccttcggttctaagaaccccaaaagcccaagaaggtcttccggtgcccagggggac

SEQ ID NO: 514180 - DNA, 234 bp, Homo sapiens
tggaaccggggggccccccagtaagtcccctttgttaggcatcctgtccctggatttgacccccccctttttatggggggcatttttttacaaatttgcatttgattgtgatacccaaccctgctttgcaagtgaatacaagggtttccccccttaatttgggccgttgctagttttatttatttatttatttatttatttatttttccgaggccgggtcttgctttgtttcca

SEQ ID NO: 514181 - DNA, 208 bp, Homo sapiens
gttgggtgagcttgtttgtgtccctctggtggacgttgttagtgatttgcaggatacttgtatccgctaacaggtcaaatgcagatcttcgtgaaacccttaccggcaagatcatcacccttgaggtggagcccagtgacaccatcgaaaatgttaggtcaagatccaggataaggaggcattcccccgaccagcagagctcatcttt

SEQ ID NO: 514182 - DNA, 548 bp, Homo sapiens
gaacatgggtatatcagtgtgcccatatggagtggtgtcaacgttgctggcgtaactctctagtcactgaacccagcaatagcaactgactcagataaggaacactggaaaaatgttcacaagcaggtggtggaaggcggctatgaggtccttaacatgaagggctatacctcttgggctatcgggctgtctgtgactgatctggcgcgatccatcttgaagaatcttaagagagtgcatcctgttaccacgctggttaagggcttccatgggataaaggaagaggtcttcctcagtatcccttgtgtcttgggacaaagtggtatcacagactttgtgaaagtcaacatgaccgctgaggaggagggtctcctcaagaagagtgcggacacactctggaatatgcagaaggatctgcagttataaactcgccaccttcgaccgtgtgacagatgcctgatcacatcactgatcacggcagtcccactgaaagtgtttccacatcataacaaagttcaataaaattttggaaacctgttaagatcaaa

SEQ ID NO: 514183 - DNA, 860 bp, Homo sapiens
tccccccttattatcaaggggttggttttcctcataaggcttctgggccttttctcccttagtggtaagctttctctgattggacatcttgggaatagctccttcttcacttttccctctgtgacggggttgtgggttctcatggaggtgctccatttggcgtgatttttagaggtgaggctttctcgtgggggctaccaggatgatttttctttcactcctctctgagagagaagagtgagtgttttagatatgtgctcagctctctgggagctcctccctcgttggggctttttaaatgggaggttccagactcgagagagactctccctcgacgatctcctccactcataactttttatctcgtgggggggctcctttaaacagaggttttcacacaaatattctctccttttgtgtgggcacacgagacgaggaatccactcatatctcccggtgggggttattatcaaccccttgtggccttggggggttatactccctttctcatcgtggatccttttgttcgagaacgacggcattccacagacggggctggacttctctccaccttactaccagaacaaccttagccaaagccatttccccaaataatgtatggcggcgatagaactttgaactggcggcgccaatagaatatatgtcccgcgagggtaagtctgtaaattttttcccaggcctattttggcgtggataaccccctattcctccgtcttaggatacctggaatactctggcggggagccaaagcatgacccgaaacggaggtctctgaacgggtaaacccctctgtcaacggcggttgtgctgtggagtacccgcgctgatgggtgcaaatc

SEQ ID NO: 514184 - DNA, 157 bp, Homo sapiens
aaaaatactgaaacaaccaaacccaaaaaaaaaacaacaaaaagaaaaaaaaagagctggcctgccactcaggaagtctattattctaaaatattttgtattatcgaaaaattttttactttacagcctttcccggtcctcccaccacaaacgtggg

SEQ ID NO: 514185 - DNA, 149 bp, Homo sapiens
  misc_feature (135)..(135): n is a, c, g, or t
tacatctgttatagagggtagtgtatgtgagaatggtgccacagaaaacatgctaaaactgtgtcacccatcagaaggggtagagcatcagctctcagccctgtgctgcaaggtttgaattgtggttgccttcanacaaaatgcttgac

SEQ ID NO: 514186 - DNA, 1013 bp, Homo sapiens
tagcgttgtaccgtccgtaattccggaaggcataccccgctcaattttaatttcaagaatcgagtctagatcccctaggctggtcgtctcacctttcgtcctcaacacatatttgggaaatgtcacagaccccggtggtctcttaagcatgtgatctctgaacgtcgatccagtaaggagtaaggctttgctggacttttcccatgaagaatctgtagagatgcgaacagggaagccatcagcacctggcattctatacgctgctagccccagagttctacctggtacacttacatcagacactaatccagctgactggacacaattgggataacctggcttatgataccaaggctttaactggaatggtgctgccttccttgtaacggagatcaagatttgacttattggaggcccaggaagcccttggaaagctggcctcagatttcatgtacagtccctgtacagggtttccgatcatgtgacaactaccccataatatctacagacggcactgctcctaccaacccgataccagagaactctctgtcccctcgtctagcaggaagtagccagaaagaacatgccagcccctcgtccgtttttataactatgtaggtcatggtacttgaacagagtcagaagcatcaccattgtggataagcgcctcattttgaaattcaccttagatcaaaaatctgcctaagatccaaagggcatcagcctatatggctaaggtcagcagtgatcacaagaccacaaataacatctccgacctctaacattccagacacctcccagacgagaaatgcttagcctcgggataacccctgctcctgccggaagagatgtcaccctccaagataagccacccctccgcccagaacattccaagcctgccacaaacttctcccccacacagaaacattccaagcttgtaataagctccctcaccctaaaaccaacgtacattcttagtctgcaagaaaaccagtgctgcgtgactgaccagc

SEQ ID NO: 514187 - DNA, 159 bp, Homo sapiens
tgctctgtctatgatgcaggatagaagaggtaggtaaaagatgtgaaaccgtagggtatgattaaggggacaggatatcgtaggataatcagtaggaattagaatagttaaaatgattagtgttgagagtgagagtgggaaagtgtgatattgttatgt

SEQ ID NO: 514188 - DNA, 838 bp, Homo sapiens
gtcttatctgcgtctctctagacgatgagtatcaggttcgacttttacccttgttatcatctgatgatgaacttcatgttcccattttgtgttaatggaatattaagtccatctgtgatttctgaaccagagcatatatccataggcgtgacatcttgagtatggctggacagatgacagttaagtttggaacggccaagcggtgggctggcattgatgctcgtgtaagcgccatagttgcctgcaggaacggaggagactgtggcttgagccgccagggagggtaccacggggcttcgcaggaaacgccatcggaattggcggcgcatcgtgcatcttccaaggccttggcgtgaacaggaagtaaatggacgcgcctgggggtcacaaataacaccacccatgaaatggggcaacaagataagggacaccacaaaccgaagaagccaaccgaagggtccggctcagggaggccgcgacaaaccccgaaccaatctcacgaagacaacaccaagataataaaaccaagggcacaacagaggtggacccaggctgcgcctcaaaaacgatcacggcctcaagaacaaagtggccccacaacaagagatgatacaccacggagagaggaaacgccccggggacgatcaccattgcaacagcctggcagaaaggacaacacacaggaagacataaaccaagaacagcacggaagagaacacagagccagcggccaaagagagacgaaccacaatagaacgcaccagcggccgaaaaacaacgcgcgggacaaacacccaagcgagacccgcaagggaggcgcgcaggtatacacaaagac

SEQ ID NO: 514189 - DNA, 418 bp, Homo sapiens
gccagagactggaaaatcacttgagtcagatcaaggccagcctgggcagcatagtgggacctcctctctaaaaacaaacaaaacaaaacaaaacaaaacatccacaaagggtaggaaagttcagttaaacaggatgaataagttctggggatcttatatacagcaatgtgactatagttaacaatacactactgtatacttgaaatttgctaagagagttgatctaaagtgttatcaccacacacacaaaatggaaacggtaggaagcgagggatgtgttaattaacttgactgtagccatcgtttcacaatgtaaatgtatgttgagtcatcacattctataccttaaatatatatgatttccaattgtcaagtatactttaataaagatgaggaaataaattaggggtcaaaaaaa

SEQ ID NO: 514190 - DNA, 159 bp, Homo sapiens
tggaacccacaaccttcatggtgaggcgcgagggtcacccagaaaccctgcagagctggcatataaaagtcaagcgcgtggtctctaccctcagtcccatgaggaaccagtaaaacatacacctttacccaaagcaatggttgtagccaatggctacct

SEQ ID NO: 514191 - DNA, 925 bp, Homo sapiens
ggccggccgccgcccgccggttttgtcgccagaaggaagatggcggatctggaggagcagtttgtctgatgaagagacggtgccgtatagcagcaaaattcatcattcatgcccctcctgagaataatgacggttaaaccatgaatgtcggtaaactgctataataaatttgacaattctttctcaggggaaagggcagcagccccaagtgcatttgtgccccaagtatacatcttgtgcgacccaggtttactttccagtaacaaaacctggccgggtttatgaacgactcagcgtatggatacccaggaacaatgcgcgactttggggagaaatgcaccagttttgggcatccaaaagaaacagaatctgtttaaaacattgtgatccacttaacggacggggcgcgcacactagataccaaagaccccctgtgaagtagcaaacatgccgtgggacctcatggagaccttcagtagaaccttggctctgaagagtttagggtaaaagaacattacccgaatggaggtctgcacctgttgtattggcaaacaaaaattagatgggcccagcaaacccattattgcattgcatagaaagccatcagttcccaggcaaaaaattggtgccaatgccccgtgggggtcagcaaggcagttttacaatccactccttcaaaccatcagtgctggcatcttgaaaattcaggttcattattatgagcatggcactggatccgccagggagtcaaaagatatacagatccctaacgggctaatgagtgcaccgccagcatttaaccgttggacgggcaaaaggaatcgcgtgcccgggaaattcgacacgtggccatttaaccacgtgcaggggtacccaatgtgggacacctttcacatgcgagagaagacagcgcctatctgcaaaa

SEQ ID NO: 514192 - DNA, 362 bp, Homo sapiens
gacaagtatcagagtagtagaaacacataccgataatcactcgccacaatcatggcataggacttagaaaccggagtatgaaaagtctgcccttagcatactacaggtttcagcatcacgtgactgctgtatttatgatccgagtactgtattttttaatctagagtttgattgaacaaaaatccaaatataaatggacccatgcagctaacacctgggttggtcaaggcacccaactataatacacttttataagctaggacatacatattgaacaacatccatgatacttacctattacaactacaagtagtacatactgaataggtaggatgcctaagtacctagataaaaggtataac

SEQ ID NO: 514193 - DNA, 417 bp, Homo sapiens
ggccgtcccactgcgttgtccggtcaggtgggcagaagtgagcgcaccagtcactgctcagtcgattgctaccacagagttttcagcggaatcttccgggtaatcccctggaagtatctcccgagaatgtcgtggtacggcaactccccgtcgatccgcttatactctgatctgatgtccaggaggtcggtctcgctgcgagacaccatgatgcgaatcagggtccggtcctttgttcctgcccccctcatggccttgttgagcctctccgcaaagaaggctggggtattcttgagacacttcaccacggccagcatgccctcctccaggtccccggacatctcccggcagatgctcttctcaatgtcccggcctgtcattctctggtactcattgaaaactgcaaccaagtgggag

SEQ ID NO: 514194 - DNA, 1286 bp, Homo sapiens
  misc_feature (1286)..(1286): n is a, c, g, or t
aaactgggcgagtgtgcgaggacgcccggccagcctgcgggagccgcagtcggcggaggagaaaggaggcggctcccggtatcccgaccccctccccctcctctccttcccccacattccaggccgcccgagggaccgcagcttcactcgaaggccccagacaccggactcagtcggccgagaggcgaagggaaggagccccccgacccaggtacgacgttacatccaagaggaaagtaatccagagcaaaggaagcacaagactgatcaagatggtatagatacatgatggcgtgaccaagttgatggatattaatgacagaatcggtcgcatcagggaagactatccatcaaaaagagattttacggagcatatgaaggccaaatgtggatgaggaggaactggacgtttagggcgtgtgagtgatggatgaggtgagtgactgaccaattcggagcgcgaagcgaaaacgctggggatcctcgcgcgaatcgaacgtgggagacagcttaatcaagatggaccataaggcggagcaaaacgtgggacgagcaaggaacaggaggaaggacaagacaacaacatggatcgacaaacagagactagctggagacatacagccgcacatgcagaccaccgagcataagagagacaagagacccgcggaattgacaccgcggcgaagagcggcaggcgggagccaatcgacagggaccagagtagcagtgacacccgtagcacgttaaagacgcagagggatgtaacacaggggaagacgattgcagacgaagaaaggaccaggagcatcggcaccaagatcgggtagcaccaccatcggtgcacaagcagagcagagagctagcagtccgacaagcaggagagacgagcgccacacggaggaggaggtgaggcacaaacacaagcagacagtagaatcagacagggcgaaggcgcagggaacatcaggaaggggtagcccgcaaatagggagtaaaggaaagagaggaacgcagcacaagccggaggaggaccaccgagagaagcgggaaacacgggagtaatataccagtagaggagtcagagcaggacgtaagaaagacaacacaagagcaatagcgagagcagcctacgcaacggcccgagcagaggacataccgggagaaggagcaaagacaggcagaagacagccggagcagagagagcagccaggatcaagcaagaagggcataaacatggaaccaggcagagtaaacgaggagagcaacacatgggagagaaggcaagn

SEQ ID NO: 514195 - DNA, 902 bp, Homo sapiens
gtagaagagtcgagtgaggccaaggaagggttacggtgttcgaagttactggttgtaggagttttatgcaccatgagtgatcagtactagtaaatcagataaataatcatgttataatgacgacaggacgactgactgtgttatgaatttatgttaatgtgcatatatgctgtattgaaaattatattatagattcacaatttaccgaacagtatatcattattactatattctaagcgaatagtagaaattggaagcgcaattcataataatttaagaatcgacttgtggtgtggcttaagaattgagtggtggtgactgggtaatggtggttcaatgctatgtttccgtaaaggtttagagtatcagaaatggtgcctagtggaattgcagatatgaatgggaaaaatgccctggatttttatctccttgttgcactgtgcatgatttgctatgataatatccttggggattatccctatagtatgtcgatttaaaacgtaacagtatgggggttataggtttcatctctagaagagaagtgtgggattgtaaaacttggaaaggatttgggaatgctaggactattctggggctatagctgggggtgaccgggattaagcgcgggtcaagagatgtgtggggcgtactaatttgacgcgggcaggtctcacgagacggggaccaaaccggtatgccgaaagaagatatccaggaggttcaagacccactaaagctgttcccggaatagtgggacgcgtccgttggatccaaagggtggcgggtgtccccaaaattgggggtgaggggacccctttatgggaggcctttcgcaaccgagccacgccccctggggcttaaagaatctcgggtaccattggccatgtgtctcccccagtgga

SEQ ID NO: 514196 - DNA, 1093 bp, Homo sapiens
ggcgtcgggctgcagtgagaaagatgagtcgagtactccatagggagttaaagttcctctgtaatttactgctatgttggaagaacttgaatgaagtgacaaaaaggagtaaggctgacgtggtacagtaaagacatgagtggctctttgcaagagtagatgacagatattgacaactatacgaatgggttggacagtgcatagattatttggtggcactcaaggtaccaaactttatgatatagacgagagatactatagacctgacatatgtaggcaatgttggaatctctgaaataccgctagcaacgctcctaccgttcaaggtttagcattttgtacacgaaaatattagatatgcaacgggagatacaataatttccacagtggggattggttggcatgccgctggagcatatccagtgttcatcacatagatggcgaagatattcactattaacgctattatagacgttgtactatcaaggaagctaaagacgctctaagtagatgtaccaacagcaaacatcatgaagctatccaccatgcctaccagacaggacaatacataccatacaacttaaattctctagtcggcatctcaaaacgttgtctctagactcacacaacccttactaactcactgttcaactggtcttgacttcacactactcacaactgccaaacataccacacttcacatgttaaatacatggacacttcccacggcttggatagacaccattgactctgtgcaccaatatatggtaggaaatactaattccaacgttatagtgtaacaccccatttattgtatcctcaaggctcaccagggagggcacacacatgcagcaccacactcatattataccttctttggcacagcgggccaccgtgggtctaatcttgaacaaccattcagacacctgtgagaggtaccctccgtcacaattatcgcacttccaggggtttcacaaagaattgaaaagccgattgtgtgacgcaagtgtgccacgagtgggcgagtgcgtcacaccacttggtgggtccccaaccatcagtacgaccatcttcaggcaacaccgcgcaactg

SEQ ID NO: 514197 - DNA, 400 bp, Homo sapiens
  misc_feature (53)..(53): n is a, c, g, or t
  misc_feature (68)..(68): n is a, c, g, or t
  misc_feature (151)..(151): n is a, c, g, or t
  misc_feature (173)..(173): n is a, c, g, or t
  misc_feature (176)..(176): n is a, c, g, or t
  misc_feature (195)..(195): n is a, c, g, or t
  misc_feature (202)..(202): n is a, c, g, or t
  misc_feature (220)..(220): n is a, c, g, or t
  misc_feature (226)..(226): n is a, c, g, or t
  misc_feature (235)..(235): n is a, c, g, or t
  misc_feature (239)..(240): n is a, c, g, or t
  misc_feature (246)..(246): n is a, c, g, or t
  misc_feature (253)..(253): n is a, c, g, or t
  misc_feature (283)..(283): n is a, c, g, or t
  misc_feature (285)..(285): n is a, c, g, or t
  misc_feature (288)..(288): n is a, c, g, or t
  misc_feature (300)..(300): n is a, c, g, or t
  misc_feature (302)..(302): n is a, c, g, or t
  misc_feature (306)..(306): n is a, c, g, or t
  misc_feature (316)..(316): n is a, c, g, or t
  misc_feature (324)..(324): n is a, c, g, or t
  misc_feature (327)..(327): n is a, c, g, or t
  misc_feature (378)..(378): n is a, c, g, or t
catcttttaaatcttcaaatcaataaatctcagtaagttattcttaaaagatntgtacaagcatgatnttggctcttaatagtaaaaccatattttaagatggaaaaagaatcattatgaagcatagagagctttcaaccatttctttganaatatatcttgatataatagcnacngttcatcataatacaaaanagaaggnagattaatttactgtggnacaganagtgctgcnaatnnctaagngccctangtagtttctctcagactttttacatttttngnggnctcaggccaaancnaggngccacctccnggcttggnagnaaacaaactttgcttctccggtgctaagcttccatgactcctctggtaatnagctttgtgcacatttggtagg

SEQ ID NO: 514198 - DNA, 113 bp, Homo sapiens
ccaatatagaaccagcaccaagagtcactaccccccgcggcctcttgactactacctacctgcccccgcctcgcgaaggctcacgctctacccccactcgtgcgagctaacaa

SEQ ID NO: 514199 - DNA, 127 bp, Homo sapiens
cagctctcagtgtatggactacaggtgcatgcaccacattcagctaatgttgtatgttagtagagatgagtgcactatttgacacgctgaagtcaagtatgcgagacatcggggtggtggagagcgg

SEQ ID NO: 514200 - DNA, 729 bp, Homo sapiens
agtctccgtttcaaaaaaaaaaaaaaaaaaccttaggaaagtcggaaaaacagagaagcagggggagaaatagaggggaattcagcccagggaaaaattgtgatctatggcagcatctagttagctgctgagttaaattctggcgtatggataacctgcctgaggtgcaaagagcccaagggcagaaaagaggggctgaaggataaacagggtgtggtacgcagggggctagggttaccgggggagggggctaagtaaaatggctggtgggaatggataggcatgatttcccagaagggacccagattgggttgagacagagaatggcaaaatggggctacctggggaagggagactccacctgacacagcaggagagggataagcaaaatgtggaatagtgctggggcagggccatggcaagggggagattggctcaaaacaattgtgcacatgacctgattgcccaaactgctggggagcgcaagggtaaccttgaaagagccacgagcagtatgaacacaaacaaactaacaaaagaccagaattggggaaatacaactggggcccaggcacggggggctcacgcctgtgtaatcccaccactggggggaggcctaggcgggcgcgaacccgtgagaggccagggagctccaataccacaagcgtgccacgagggcgaaacccccattttctcataaaatacaaaaatttagccgcgcggtgtggg

SEQ ID NO: 514201 - DNA, 863 bp, Homo sapiens
gaagatttaattatttctgagttgcgagagaggtatccttcagacaggttcattgcagaagaggccgcggttctggcggccaagtgtgtgctcacccacaggccgatgtggatcatctgagtcccatctgcaggggatacctgcacttttgtgcactagatacccgacttgtgggctgagttcagcgattgtgcggattcggcggttacggacacagagctggacttcggagtgattttaccactgctaccagaaggcaggcgggcagttgttaacaacgggggccaggcaggggggtcagggagggcagcctttccttgcaacttgtgcgcaagcgtgggcatccgggggggtctctcgggtgcgaggaaccaatgggacattcattccactttctggtgcaaccacatgtgtcttgggatgtttgcgggttgtgtgacacgatcatgtggggtgttcaccctttggcaaggcatgtcatcaataatacacataaggggtactccagaaggccacactttctttccctttggccctttcgaagttcatcgtacccgtggaagattaaggctattgggcgacccttcacctatgtggccattttggtgttcccagagccgaaagaaagtcctgtgggcctaacatatttgtctgaggtaacgtgaatactatcacggttaaccggacggcaaacccggggggatattgttcaataacacaaggattgtattgtgggggcacacaacggtgcatgtgggggttctctttcgctagaagacacattttggaccgtttggaaacgcccaatttcatcaacaaaggtgtttgtgaaactaccccccaattttatttttgggagccct

SEQ ID NO: 514202 - DNA, 271 bp, Homo sapiens
taccaactcgacggacgcatcagtaatttctgattactcaccctcctcccagcctcccaaccttctgagtctccagtgtcgttattccacactgtgcccacatgtacacattattttgcttcaacttataagtgagaacatggcctccaggtccttccatccttccacgttgctacaaaagacatgatttcattcttcctttatggctgaatagtattcgtgtgtgtgtgtgtgtgtgtgtgcgtgtgtgtgtgtgtgtgtgtgaatgcgt

SEQ ID NO: 514203 - DNA, 276 bp, Homo sapiens
ggcccccccccaggatttccccaaatttacctttctttccctttgggcacagagattttttttttataaaatctttaaattttgtttttcttggggggggggggggcaccaacccccccccccgggggcctttttttttttttttaaaaaaaactcctcgggtgccctccccccttggtggggaaattccccccccccttttcccccccttttttttccttggcagggggaagggggggccccgtcccttttatttttaaacatgaatttcattta

SEQ ID NO: 514204 - DNA, 161 bp, Homo sapiens
tgaggatccaactcaggtgcagctgtaactcaggtgcgagctgtaactcagggccgagctgctaactcagtgccgagctgctaactcagggcctgagctgctaactcaggtgcgagctgcaactcagtgtgctgcgctgcaactcatggtgcgagctgtaa

SEQ ID NO: 514205 - DNA, 386 bp, Homo sapiens
taatcgatatcttatccttggccagggaaagaccttgctgtacctgcagctaaaagccctgaacatcttaacagaggcactcgggtacttaaacagaactgaaagaaaggagagacccgagctttgtaacaaagcaggcctctctatgaaagggtggaccaatggcagccgtcagggagagtgaagccaggccgggacagggtcagaggccctgcgcgactaggacctgcccctatgaaccccacgagcatctgaagaaccaaggcggcggtgatgcctagtgaccaggctgcaaggggagactcacaggccagacccatggaaccgctggtctcctcccatctttaggggcagagagtgaaggtaagacagagccacccccggtg

SEQ ID NO: 514206 - DNA, 2004 bp, Homo sapiens
catccggttctcccaccgcccccgctgtgggtctcagcagctcgggcggcgggaggagtggcagcggcaaggcagcccagtttcgcgaaggctgtcggcgcgccgcggcccgcaggcacccggcacgcgccttccccgcaggcacccggcacgcgccttccccgccgccacgatgcccaagaggaaggtcagctccgccgaaggcgccgccaaggaagagcccaagaggagatcggcgcggttgtcagctaaacctcctgcaaaagtggaagcgaagccgaaaaaaggcagcagcgaaggataaatcttcagacaaaaaagtgcaaacaaaagggacacaggggagcaaagggaaaacaggccgaagtggctaaccaagaaactaaagaagacttacctgcggaaaacggggaaacgaagactgaggagagtccagcctctgatgaagcaggagagaaagaagccaagtctgattaataaccatataccatgtcttatcagtggtccctgtctcccttcttgtacaatccagaggaatatttttatcaactattttgtaaatgcaagttttttagtagctctagaaacatttttaagaaggagggaatcccacctcatcccattttttaagtgtaaatgcttttttttaagaggtgaaatcatttgctggttgtttattttttggtacaaccagaaaatagtgtgggatattgaattatgggaggctctgactgtctcgggtgtcagcttaacattccacagatggggggttagtttttatatcctataatacaaagcatattaaatggcaatatggagtcagtcctgcatttaatgtcttgaacattttaaattacttctattaccatgttgttttttagtagaattgtttcctaaagaaaaccactctttgatcatggctctctctgccagaattgtgtgcactctgtaacatctttggttgtggtagtcctgttttcctaataactttgttactgtgctgtgaaagattacagatttgaacatgtagtgtacgtgctattgagttgtgaactggtgggccgtatgtaacagctgaccaacgtgaagatactggtacttgatagcctcttaaggaaaatttgcttccaaattttaagctggaaagtcactggaataactttaaaaaagaattacaatacatggctttttagaatttcgttacgtatgttaagatttgtgtacaaattgaaatgtctgtactgatcctcaaccaataaaatctcagttatgaaaataaaaaaaaaaaaaaaagaaaaaaaaaaaaaaaagggggggcgccccccaaaaacttcccccggggggccccatttcccgccacccccgttttttgtgcccggggggcccccaatgggggcgctgcataacaagaacacacaggcaccggcgcgcgctttataacaacaccctggatagaccgtgcggaacaaaccgcggccagcgcgagaaccacactactgtggcgcaagagaaacccccacacacctgccggggggggcaacacacacgcggggaccacacatacccccacaagagactctattaacagcgcccccggggcacaactataacaaacctcgcgccgggcgtactaagggcggtcacaaccaccagcacctaaaagcaccccgcgcaccagaaaaaaactcgcgcccacacgagacacatggtgcccccacgaacaatttctacacccgcgggacacgcctcattactccccgccccgcagccccaccacgcacacccaccaggacctgtacgccagccgccgacggcgctgactacgccgctaccacgcggcgtaccaacccccaccacctacacacttccatggctacgcgcgacgcgccgtaactaagctggttcacggtcgaggttccccgcagagccgccccgcacacaccccacaccccccccacgccacccaccaccacgcccgcgacccacccccacccccacccccca

SEQ ID NO: 514207 - DNA, 129 bp, Homo sapiens
tatgaagacgacggacagactcacgtcgatgtggcctgctgatcggacactgacacacctgtgtcactgctgcaccgtcatccccagacgctgagcacctcagcgcagcgtgtaatctcaatacgggta

SEQ ID NO: 514208 - DNA, 714 bp, Homo sapiens
  misc_feature (416)..(416): n is a, c, g, or t
ccggtgggtttattcagttccccgagggccagggggggggttcccgtggtgccccccctttttcggggcgggcgctcccccggaagcccccttattggtgtattttcagtttttttattcctctccccccgggcggtgggggggagggtttttttttttcttttctgtcggtttttgttgtcccaagcggggtaaaaaaaacccttctttgtgggggaagggttcccttttttttccggatccccaccttggggggggaaacatccccctttttatgtgtttggcttggggggcgctttccccccaattcctttttttttttccccaaggaagggggggaaaggccccccctgggggccccccccccttttggggggggtggggtggccccgggcgggggttttaaaaaccagggnttcccttttttttttaaccccccgggggggccgggttttgggcccggaaaaaaaaaaaccgggcctttgggggggggggtttttccccctggggtttttatttccccccccccttttggggtttccccccctttggcccggccaaagggtggggtttccccaggggcccaaaaagggggggccccgggatttggggttgggggggcccccccccccccccccccgggggcccccccccggtccccccccccggggggttttttttttttgggggggggtttttaaaaacccaatttga

SEQ ID NO: 514209 - DNA, 1775 bp, Homo sapiens
  misc_feature (1586)..(1586): n is a, c, g, or t
catccggttctcccaccgcccccgctgtgggtctcagcagctcgggcggcgggaggagtggcagcggcaaggcagcccagtttcgcgaaggctgtcggcgcgccgcggcccgcaggcacccggcacgcgccttccccgcaggcacccggcacgcgccttccccgccgccacgatgcccaagaggaaggtcagctccgccgaaggcgccgccaaggaagagcccaagaggagatcggcgcggttgtcagctaaacctcctgcaaaagtggaagcgaagccgaaaaaaggcagcagcgaaggataaatcttcagacaaaaaagtgcaaacaaaagggacacaggggagcaaagggaaaacaggccgaagtggctaaccaagaaactaaagaagacttacctgcggaaaacggggaaacgaagactgaggagagtccagcctctgatgaagcaggagagaaagaagccaagtctgattaataaccatataccatgtcttatcagtggtccctgtctcccttcttgtacaatccagaggaatatttttatcaactattttgtaaatgcaagttttttagtagctctagaaacatttttaagaaggagggaatcccacctcatcccattttttaagtgtaaatgcttttttttaagaggtgaaatcatttgctggttgtttattttttggtacaaccagaaaatagtgtgggatattgaattatgggaggctctgactgtctcgggtgtcagcttaacattccacagatggggggttagtttttatatcctataatacaaagcatattaaatggcaatatggagtcagtcctgcatttaatgtcttgaacattttaaattacttctattaccatgttgttttttagtagaattgtttcctaaagaaaaccactctttgatcatggctctctctgccagaattgtgtgcactctgtaacatctttggttgtggtagtcctgttttcctaataactttgttactgtgctgtgaaagattacagatttgaacatgtagtgtacgtgctattgagttgtgaactggtgggccgtatgtaacagctgaccaacgtgaagatactggtacttgatagcctcttaaggaaaatttgcttccaaattttaagctggaaagtcactggaataactttaaaaaagaattacaatacatggctttttagaatttcgttacgtatgttaagatttgtgtacaaattgaaatgtctgtactgatcctcaaccaataaaatctcagttatgaaaataaaaaaaaaaaaaaaagaaaaaaaaaaaaaaaaaaaaaaaaaaaaaaaaaaaagaaacaaaaaaaaatgtggtgggggggcggcggcccccaaaagaatttcaaaaaccaaacaggggaaggggggggggggcgcgggagaggcaaagagcggtcaaaaaccagggggggcgcggggacaaagggggggggctccccccaaaaaacataacccgcggggagaaacgagagtgctgtgtgggaatacacccagaagaacaagagggagccgggagatgctagcggagcacccaggaggtgttaatatccngcgaccgtcttagtacacgcaagacggattaattcgcagccctggggtgcgcaaccgaacatcagccgagacaacagctgctccacaccaacgatgaagcgcagacagtacgcggaagagaagaaaccagagacacagcgacacgcatcacaccagcttatgaacaacacatctaatcacagagaatct

SEQ ID NO: 514210 - DNA, 295 bp, Homo sapiens
aggagtagttacgcatgaggctgtacactgtgaaacccagtgtatgaactcctctagagatataacacctacgaaacctgttgatacaccgagatttctttctctcgtgtgacaaaacatctttgaaaacttaccttgtgaagacaaaatttgacttactatcctgtgtcaccattacaatttcctggcaaggaaggatacctgttggcaattatggatacgccctaccaggtgattttgagatgtgttgagctcttattgacacttattggtccactttacaggttacctgagg

SEQ ID NO: 514211 - DNA, 1579 bp, Homo sapiens
catccggttctcccaccgcccccgctgtgggtctcagcagctcgggcggcgggaggagtggcagcggcaaggcagcccagtttcgcgaaggctgtcggcgcgccgcggcccgcaggcacccggcacgcgccttccccgcaggcacccggcacgcgccttccccgccgccacgatgcccaagaggaaggtcagctccgccgaaggcgccgccaaggaagagcccaagaggagatcggcgcggttgtcagctaaacctcctgcaaaagtggaagcgaagccgaaaaaaggcagcagcgaaggataaatcttcagacaaaaaagtgcaaacaaaagggacacaggggagcaaagggaaaacaggccgaagtggctaaccaagaaactaaagaagacttacctgcggaaaacggggaaacgaagactgaggagagtccagcctctgatgaagcaggagagaaagaagccaagtctgattaataaccatataccatgtcttatcagtggtccctgtctcccttcttgtacaatccagaggaatatttttatcaactattttgtaaatgcaagttttttagtagctctagaaacatttttaagaaggagggaatcccacctcatcccattttttaagtgtaaatgcttttttttaagaggtgaaatcatttgctggttgtttattttttggtacaaccagaaaatagtgtgggatattgaattatgggaggctctgactgtctcgggtgtcagcttaacattccacagatggggggttagtttttatatcctataatacaaagcatattaaatggcaatatggagtcagtcctgcatttaatgtcttgaacattttaaattacttctattaccatgttgttttttagtagaattgtttcctaaagaaaaccactctttgatcatggctctctctgccagaattgtgtgcactctgtaacatctttggttgtggtagtcctgttttcctaataactttgttactgtgctgtgaaagattacagatttgaacatgtagtgtacgtgctattgagttgtgaactggtgggccgtatgtaacagctgaccaacgtgaagatactggtacttgatagcctcttaaggaaaatttgcttccaaattttaagctggaaagtcactggaataactttaaaaaagaattacaatacatggctttttagaatttcgttacgtatgttaagatttgtgtacaaattgaaatgtctgtactgatcctcaaccaataaaatctcagttatgaaaataaaaaaaaaaaaaaaagaaaaaaaaaaaagggggggggggaaaaattccccgggggggcccaaggtttacccgcgaaccccggctttctgttgcacaaggggggccataagggggaggggaataatgagatagagcaagggccgcgtttaacaagggcggcgagggggacaccccgtactgggacttgggaagagaccatactgtggggggggaacattggacaactccctaaagatttacgccaggggaaattaccccagctgatcgggggcacaaccgaatgctgggctacacttgccag

SEQ ID NO: 514212 - DNA, 1910 bp, Homo sapiens
ggaaacaggggagcaaagggaaaacagtgcctgaagtggctaaccaagaaactaaagaagacttaccacgccgccacgatgcccaagaggaaggtcagctccgccgaaggcgccgccaaggaagagcccaagaggagatcggcgcggttgtcagctaaacctcctgcaaaagtggaagcgaagccgaaaaaaggcagcagcgaaggataaatcttcagacaaaaaagtgcaaacaaaagggacacaggggagcaaagggaaaacaggccgaagtggctaaccaagaaactaaagaagacttacctgcggaaaacggggaaacgaagactgaggagagtccagcctctgatgaagcaggagagaaagaagccaagtctgattaataaccatataccatgtcttatcagtggtccctgtctcccttcttgtacaatccagaggaatatttttatcaactattttgtaaatgcaagttttttagtagctctagaaacatttttaagaaggagggaatcccacctcatcccattttttaagtgtaaatgcttttttttaagaggtgaaatcatttgctggttgtttattttttggtacaaccagaaaatagtgtgggatattgaattatgggaggctctgactgtctcgggtgtcagcttaacattccacagatggggggttagtttttatatcctataatacaaagcatattaaatggcaatatggagtcagtcctgcatttaatgtcttgaacattttaaattacttctattaccatgttgttttttagtagaattgtttcctaaagaaaaccactctttgatcatggctctctctgccagaattgtgtgcactctgtaacatctttggttgtggtagtcctgttttcctaataactttgttactgtgctgtgaaagattacagatttgaacatgtagtgtacgtgctattgagttgtgaactggtgggccgtatgtaacagctgaccaacgtgaagatactggtacttgatagcctcttaaggaaaatttgcttccaaattttaagctggaaagtcactggaataactttaaaaaagaattacaatacatggctttttagaatttcgttacgtatgttaagatttgtgtacaaattgaaatgtctgtactgatcctcaaccaataaaatctcagttatgaaaataaaaaaaaaaaaaaaagaaaaaaaaaaaaaaaagggggggcgccccccaaaaacttcccccggggggccccatttcccgccacccccgttttttgtgcccggggggcccccaatgggggcgctgcataacaagaacacacaggcaccggcgcgcgctttataacaacaccctggatagaccgtgcggaacaaaccgcggccagcgcgagaaccacactactgtggcgcaagagaaacccccacacacctgccggggggggcaacacacacgcggggaccacacatacccccacaagagactctattaacagcgcccccggggcacaactataacaaacctcgcgccgggcgtactaagggcggtcacaaccaccagcacctaaaagcaccccgcgcaccagaaaaaaactcgcgcccacacgagacacatggtgcccccacgaacaatttctacacccgcgggacacgcctcattactccccgccccgcagccccaccacgcacacccaccaggacctgtacgccagccgccgacggcgctgactacgccgctaccacgcggcgtaccaacccccaccacctacacacttccatggctacgcgcgacgcgccgtaactaagctggttcacggtcgaggttccccgcagagccgccccgcacacaccccacaccccccccacgccacccaccaccacgcccgcgacccacccccacccccacccccca

SEQ ID NO: 514213 - DNA, 1435 bp, Homo sapiens
  misc_feature (1407)..(1408): n is a, c, g, or t
catccggttctcccaccgcccccgctgtgggtctcagcagctcgggcggcgggaggagtggcagcggcaaggcagcccagtttcgcgaaggctgtcggcgcgccgcggcccgcaggcacccggcacgcgccttccccgcaggcacccggcacgcgccttccccgccgccacgatgcccaagaggaaggtcagctccgccgaaggcgccgccaaggaagagcccaagaggagatcggcgcggttgtcagctaaacctcctgcaaaagtggaagcgaagccgaaaaaaggcagcagcgaaggataaatcttcagacaaaaaagtgcaaacaaaagggacacaggggagcaaagggaaaacaggccgaagtggctaaccaagaaactaaagaagacttacctgcggaaaacggggaaacgaagactgaggagagtccagcctctgatgaagcaggagagaaagaagccaagtctgattaataaccatataccatgtcttatcagtggtccctgtctcccttcttgtacaatccagaggaatatttttatcaactattttgtaaatgcaagttttttagtagctctagaaacatttttaagaaggagggaatcccacctcatcccattttttaagtgtaaatgcttttttttaagaggtgaaatcatttgctggttgtttattttttggtacaaccagaaaatagtgtgggatattgaattatgggaggctctgactgtctcgggtgtcagcttaacattccacagatggggggttagtttttatatcctataatacaaagcatattaaatggcaatatggagtcagtcctgcatttaatgtcttgaacattttaaattacttctattaccatgttgttttttagtagaattgtttcctaaagaaaaccactctttgatcatggctctctctgccagaattgtgtgcactctgtaacatctttggttgtggtagtcctgttttcctaataactttgttactgtgctgtgaaagattacagatttgaacatgtagtgtacgtgctattgagttgtgaactggtgggccgtatgtaacagctgaccaacgtgaagatactggtacttgatagcctcttaaggaaaatttgcttccaaattttaagctggaaagtcactggaataactttaaaaaagaattacaatacatggctttttagaatttcgttacgtatgttaagatttgtgtacaaattgaaatgtctgtactgatcctcaaccaataaaatctcagttttggaaacaatccccatataatagaaaaagcggcatccctgtgcaaagtgtggtttaaacgggccttattatacgaccccacttgtttattatagagggggcccctggttatttgcgccttttcgcctaagaaataanncgggttttttctgtggggtggccaaca

SEQ ID NO: 514214 - DNA, 248 bp, Homo sapiens
ctctaagaagtgaaacaaggtttcaccttttaacattctttttcaaaattattaagccacattcagctattttccacattcatttctgagtttttttgagaagaatttttgaaccagatctcattagttgattaacatttatttctcattacaaaattactcgttgattaaattttgtggatctccagtttgattaaccgcgtttgatgatctctcctttctaagaagcacggttagggggattcctt

SEQ ID NO: 514215 - DNA, 371 bp, Homo sapiens
atgcagatcgggctgctgctggatcattttcagcacgatggctattgagccgctcaaggcttgaagtagcgtcaaggtatgctgagctgtggcagtgacttcaacttccacttctgggtgtcggtagctgaaaccaatgcctccatcaatatctaggaactctccaggggctttcactgcacttgctacttcgcgtgcgagttgagcaatgtgctgacgcagagtggtggaattatcaatttcgcgttcgatgtaccagaggtccgaaataggattcaggccaccggcttgaacgggtatagccaccaaggcattggctgcaaagtctggcaaaacttcgccgtcgagcgccgcgagctcccgtctctttt

SEQ ID NO: 514216 - DNA, 331 bp, Homo sapiens
cagcaatttactcgcacatctccggtgtcgacctggtgcgcgacggcgaggtacctactacgtgctggaagacaacctgcgcacccccagcggcgtgagctacatgctcgaagaccgcaagatgatgatgcggctgttcccggaagtcttcgccaagcagcgcattgcacccgtggaccactaccccaacctgttgctcaagaccctcaagagcgcccagccgcctcgataacccgaatgtggtggtgttgacgcctgggcgcttcaacagcgccttcttcgaacacgcgttccttgcccgggaaatgggcgtggagctggtggaagggag

SEQ ID NO: 514217 - DNA, 1559 bp, Homo sapiens
  misc_feature (961)..(961): n is a, c, g, or t
  misc_feature (963)..(963): n is a, c, g, or t
  misc_feature (968)..(968): n is a, c, g, or t
  misc_feature (984)..(984): n is a, c, g, or t
  misc_feature (995)..(995): n is a, c, g, or t
  misc_feature (1011)..(1011): n is a, c, g, or t
  misc_feature (1017)..(1017): n is a, c, g, or t
  misc_feature (1033)..(1033): n is a, c, g, or t
  misc_feature (1036)..(1036): n is a, c, g, or t
catccggttctcccaccgcccccgctgtgggtctcagcagctcgggcggcgggaggagtggcagcggcaaggcagcccagtttcgcgaaggctgtcggcgcgccgcggcccgcaggcacccggcacgcgccttccccgcaggcacccggcacgcgccttccccgccgccacgatgcccaagaggaaggtcagctccgccgaaggcgccgccaaggaagagcccaagaggagatcggcgcggttgtcagctaaacctcctgcaaaagtggaagcgaagccgaaaaaaggcagcagcgaaggataaatcttcagacaaaaaagtgcaaacaaaagggacacaggggagcaaagggaaaacaggccgaagtggctaaccaagaaactaaagaagacttacctgcggaaaacggggaaacgaagactgaggagagtccagcctctgatgaagcaggagagaaagaagccaagtctgattaataaccatataccatgtcttatcagtggtccctgtctcccttcttgtacaatccagaggaatatttttatcaactattttgtaaatgcaagttttttagtagctctagaaacatttttaagaaggagggaatcccacctcatcccattttttaagtgtaaatgcttttttttaagaggtgaaatcatttgctggttgtttattttttggtacaaccagaaaatagtgtgggatattgaattatgggaggctctgactgtctcgggtgtcagcttaacattccacagatggggggttagtttttatatcctataatacaaagcatattaaatggcaatatggagtcagtcctgcatttaatgtcttgaacattttaaattacttctattaccatgttgttttttagtagaattgtttcctaaagaaaaccactctttgatcatggctctctctgccagaattgtgtgcactctgtaacattttgtngnagccngtttcctataacttgntactggctggnaagatcagatttgacngtatgnacgtgctttgagtggnacnggtggccgtatgtaacagctgaccaacgtgaagatactggtacttgatagcctcttaaggaaaatttgcttccaaattttaagctggaaagtcactggaataactttaaaaaagaattacaatacatggctttttagaatttcgttacgtatgttaagatttgtgtacaaattgaaatgtctgtactgatcctcaaccaataaaatctcagttatgaaaataaaaaaaaaaaaaaaagaaaaaaaaaaaagggggggggggaaaaattccccgggggggcccaaggtttacccgcgaaccccggctttctgttgcacaaggggggccataagggggaggggaataatgagatagagcaagggccgcgtttaacaagggcggcgagggggacaccccgtactgggacttgggaagagaccatactgtggggggggaacattggacaactccctaaagatttacgccaggggaaattaccccagctgatcgggggcacaaccgaatgctgggctacacttgccag

SEQ ID NO: 514218 - DNA, 1088 bp, Homo sapiens
gaattcgtagcgtcggtaccctccgtaatatgtaaccatctttggttgtggtagtcctgttttcctaataactttgttactgtgctgtgaaagattacagatttgaacatgtagtgtacgtgctattgagttgtgaactggtgggccgtatgtaacagctgaccaacgtgaagatactggtacttgatagcctcttaaggaaaatttgcttccaaattttaagctggaaagtcactggaataactttaaaaaagaattacaatacatggctttttagaatttcgttacgtatgttaagatttgtgtacaaattgaaatgtctgtactgatcctcaaccaataaaatctcagttatgaaaataaaaaaaaaaaaaaaagaaaaaaaaaaaaaaaagggggggcgccccccaaaaacttcccccggggggccccatttcccgccacccccgttttttgtgcccggggggcccccaatgggggcgctgcataacaagaacacacaggcaccggcgcgcgctttataacaacaccctggatagaccgtgcggaacaaaccgcggccagcgcgagaaccacactactgtggcgcaagagaaacccccacacacctgccggggggggcaacacacacgcggggaccacacatacccccacaagagactctattaacagcgcccccggggcacaactataacaaacctcgcgccgggcgtactaagggcggtcacaaccaccagcacctaaaagcaccccgcgcaccagaaaaaaactcgcgcccacacgagacacatggtgcccccacgaacaatttctacacccgcgggacacgcctcattactccccgccccgcagccccaccacgcacacccaccaggacctgtacgccagccgccgacggcgctgactacgccgctaccacgcggcgtaccaacccccaccacctacacacttccatggctacgcgcgacgcgccgtaactaagctggttcacggtcgaggttccccgcagagccgccccgcacacaccccacaccccccccacgccacccaccaccacgcccgcgacccacccccacccccacccccca

SEQ ID NO: 514219 - DNA, 308 bp, Homo sapiens
ggcaccgccatgttcccaagtgtgtatgtctcctgagctcaagtattacaagtatggcattataggcgtgtgcactgccctggtgatctactctttagaacatgatatacatcagggttcagatgtaggtaagatggaaagatacattaattacacaaaatgaacagtgatgtgcattcgaatacaccaggtcagtagattgcgagaatatatttgccacaagttatacaaatggacccagaatgacgaaattcaagactaaatttaaactaaatggtctcacagtattaatttttgacaagaatatg

SEQ ID NO: 514220 - DNA, 826 bp, Homo sapiens
  misc_feature (823)..(823): n is a, c, g, or t
catccggttctcccaccgcccccgctgtgggtctcagcagctcgggcggcgggaggagtggcagcggcaaggcagcccagtttcgcgaaggctgtcggcgcgccgcggcccgcaggcacccggcacgcgccttccccgcaggcacccggcacgcgccttccccgccgccacgatgcccaagaggaaggtcagctccgccgaaggcgccgccaaggaagagcccaagaggagatcggcgcggttgtcagctaaacctcctgcaaaagtggaagcgaagccgaaaaaaggcagcagcgaaggataaatcttcagacaaaaaagtgcaaacaaaagggacacaggggagcaaagggaaaacaggccgaagtggctaaccaagaaactaaagaagacttacctgcggaaaacggggaaacgaagactgaggagagtccagcctctgatgaagcaggagagaaagaagccaagtctgattaataaccatataccatgtcttatcagtggtccctgtctcccttcttgtacaatccagaggaatatttttatcaactattttgtaaatgcaagttttttagtagctctagaaacatttttaagaaggagggaatcccacctcatcccattttttaagtgtaaatgcttttttttaagaggtgaaatcatttgctggttgtttattttttggtacaaccagaaaatagtgtgggatattgaattatgggaggctctgactgtctcgggtgtcagcttaacattccacagatgggggagcttttatatcctataatacaagcatactaaatggccatttgagctgtgtaantgg

SEQ ID NO: 514221 - DNA, 1510 bp, Homo sapiens
  misc_feature (912)..(912): n is a, c, g, or t
  misc_feature (914)..(914): n is a, c, g, or t
  misc_feature (919)..(919): n is a, c, g, or t
  misc_feature (935)..(935): n is a, c, g, or t
  misc_feature (946)..(946): n is a, c, g, or t
  misc_feature (962)..(962): n is a, c, g, or t
  misc_feature (968)..(968): n is a, c, g, or t
  misc_feature (984)..(984): n is a, c, g, or t
  misc_feature (987)..(987): n is a, c, g, or t
catccggttctcccaccgcccccgctgtgggtctcagcagctcgggcggcgggaggagtggcagcggcaaggcagcccagtttcgcgaaggctgtcggcgcgccgcggcccgcaggcacccggcacgcgccttccccgcaggcacccggcacgcgccttccccgccgccacgatgcccaagaggaaggtcagctccgccgaaggcgccgccaaggaagagcccaagaggagatcggcgcggttgtcagctaaacctcctgcaaaagtggaagcgaagccgaaaaaaggcagcagcgaaggataaatcttcagacaaaaaagtgcaaacaaaagggacacaggggagcaaagggaaaacaggccgaagtggctaaccaagaaactaaagaagacttacctgcggaaaacggggaaacgaagactgaggagagccatataccatgtcttatcagtggtccctgtctcccttcttgtacaatccagaggaatatttttatcaactattttgtaaatgcaagttttttagtagctctagaaacatttttaagaaggagggaatcccacctcatcccattttttaagtgtaaatgcttttttttaagaggtgaaatcatttgctggttgtttattttttggtacaaccagaaaatagtgtgggatattgaattatgggaggctctgactgtctcgggtgtcagcttaacattccacagatggggggttagtttttatatcctataatacaaagcatattaaatggcaatatggagtcagtcctgcatttaatgtcttgaacattttaaattacttctattaccatgttgttttttagtagaattgtttcctaaagaaaaccactctttgatcatggctctctctgccagaattgtgtgcactctgtaacattttgtngnagccngtttcctataacttgntactggctggnaagatcagatttgacngtatgnacgtgctttgagtggnacnggtggccgtatgtaacagctgaccaacgtgaagatactggtacttgatagcctcttaaggaaaatttgcttccaaattttaagctggaaagtcactggaataactttaaaaaagaattacaatacatggctttttagaatttcgttacgtatgttaagatttgtgtacaaattgaaatgtctgtactgatcctcaaccaataaaatctcagttatgaaaataaaaaaaaaaaaaaaagaaaaaaaaaaaagggggggggggaaaaattccccgggggggcccaaggtttacccgcgaaccccggctttctgttgcacaaggggggccataagggggaggggaataatgagatagagcaagggccgcgtttaacaagggcggcgagggggacaccccgtactgggacttgggaagagaccatactgtggggggggaacattggacaactccctaaagatttacgccaggggaaattaccccagctgatcgggggcacaaccgaatgctgggctacacttgccag

SEQ ID NO: 514222 - DNA, 437 bp, Homo sapiens
gccggggccgaggttatcaagcgcttttagtccactatatacatacggagtctacattcaacacctagcagctacgcctgatcaagacctcgaattactacccccactcgacagatgacaacctgacacttactcgtaacgactcagatctacacactctatatgaaacgccctagatcaacactgccactagcctggacaacccgccaaaggaaccgccagtgagaaacaactcaatcacttactgcacagcatttagccccgtatatccttccgagatccctctctaatctcccagctctcacaccccagacaactcccccagaccctgcgacccgccctcctcccagctgacatatgatctcccaccccaccctccctatccctctccactcccactcatccctacttcttccacccccctcccttccccttct

SEQ ID NO: 514223 - DNA, 385 bp, Homo sapiens
  misc_feature (5)..(5): n is a, c, g, or t
  misc_feature (39)..(39): n is a, c, g, or t
  misc_feature (322)..(322): n is a, c, g, or t
ataanaaaaggataggttatcatggacttggaaaatggnagtttttttactgatcccatgtgtgggtaaagacccaagttgtggccgggtgcagtggctcacacctgtaatcccagcatgtcagaaggctgaagcaggcagatggcttgagtcccaggagtttaagaccagcctgaccaacatggtgaaacctcatctctaccaaaaatacaaaaacttagctgaccgtggtggcgcgtccctgtagtcccagctacttgggagtctgaggcaagaggatggcttgaaccccggaggtggaggttgcagtgagccgagattngccactgcactccaccctgggcaacagagtgagaccctgtctcaaaaataaagtagttgaaaa

SEQ ID NO: 514224 - DNA, 542 bp, Homo sapiens
  misc_feature (22)..(22): n is a, c, g, or t
gcggtgactctagagatccctncgtaatatgtaacagctgaccaacgtgaagatactggtacttgatagcctcttaaggaaaatttgcttccaaattttaagctggaaagtcactggaataactttaaaaaagaattacaatacatggctttttagaatttcgttacgtatgttaagatttgtgtacaaattgaaatgtctgtactgatcctcaaccaataaaatctcagttatgaaaataaaaaaaaaaaaaaaagaaaaaaaaaaaagggggggggggaaaaattccccgggggggcccaaggtttacccgcgaaccccggctttctgttgcacaaggggggccataagggggaggggaataatgagatagagcaagggccgcgtttaacaagggcggcgagggggacaccccgtactgggacttgggaagagaccatactgtggggggggaacattggacaactccctaaagatttacgccaggggaaattaccccagctgatcgggggcacaaccgaatgctgggctacacttgccag

SEQ ID NO: 514225 - DNA, 988 bp, Homo sapiens
tggaaaaaaattttggctttttggccccggggggggggcgggggggggccccccccctttcgggtcccccgggcccccgccggggtaaaagatattcttcgcgcggcccaagcccccccaggatggttggtgggatttcgagcggcgacccgcgccgaataccagaggctgcagagctaatttgtcggggtttattatagccataaaacacagcggagtttcccctcgatgttggtcaccgagggtggtgttccacacactctctgccaccgagggttgatctggccccactgcttggcggctctctcaacaaagtgggtggggtcatatcgaagggcttcagaccccttgtgtcccccggagcgtgtgttattgatatctaaagcgcggggggaatgtcgaattctttttaccacaaaagattgctcattggtgtgcaagagtaaaagaaacattttctactttctgtttttcaagacgtgtgatcagatgttcatgccccccacgacaacttttctgttgggtggaacatctaccgacatgacgactattttttgtcgcgcccctgtgtcgtttattccgatgattaccccaacattttcccacgcaacaagcgtgctgccgtgccggatcaacctagtggttatccactgtggacgaagggttgtgacccccatgggtggagcgaccgacccactggtgctgggcagctgtgccatccaaacgggcggggtcacacgtagcccaatggccctacgggggctcccccggaccggaacttcccgcctgggggcgcaacctctacgagagaaggggtgccacggggggcgtgctctcctcgtatgaggtggtacacgccaccaacagcactattacagggtgtggcacccaaccggtcccggagaacaacgttcaggactagactgggtacacctcgacagatacgacatatcccccagagatctactgaacgtccttgcgacacggt

SEQ ID NO: 514226 - DNA, 109 bp, Homo sapiens
ttctgattagaatggtctaacgtgatgaagggtacatacaatgaggctcccccaaaggttatttacctgcttcgttccattagcaaagcagttgctgctactgacaacg

SEQ ID NO: 514227 - DNA, 240 bp, Homo sapiens
taagatccactgtgtcgtgtgtctgtaagtttctcagaagatcaagttcgccacatcctttgagctccgtagatctgcgccgttgatatgccactcttcaggaagagtagctgcctcttctttattcatagtctttgtaagggctcggcaagcgtggcccgtggatggagaatccttttggggaggctggttctgcagctgaaaatgtgtggaatagggggcatagaccacgacacagtg

SEQ ID NO: 514228 - DNA, 152 bp, Homo sapiens
cacccactagtgctattcccatgcattattaacactcaagctcatctgcaggtacagccatttccaactaggaaacttaataccacacacttttgaatttccataatttataaaataacatttttctttttttttcttttttttttattttt

SEQ ID NO: 514229 - DNA, 132 bp, Homo sapiens
tttattatagtgataactctgtttatctgtatttgaattattcctttcatggattattcaaggaataattcaaatacagataaacagagttggcagtatattatagtgataattttgtattttacaaaaaaa

SEQ ID NO: 514230 - DNA, 131 bp, Homo sapiens
ctgagtctgtcctttctctctccccgggacagcgatgagctgtcaccgactcgcttccaccttctccaccaactaccggtccctgggactctgtctcaggcgcccagctacgggtgcccggacggtcagta

SEQ ID NO: 514231 - DNA, 305 bp, Homo sapiens
ttttttttttttcccccccccccctttttttgtttccccttccccccccctttttttttgaaaggggccctttttttcaaaaaaaaaccattttttttcccctttgtttttccccttttgggaaaaaaaaaattgagtttttttttttttttcccccaccctttttttttaaaaaaaaaaggtttcccccccccccggtggttcccccccttttttccccccctttttggggccccagggggccctttttttggtcccggatttttaccccccccccttccccttgtttatttttttttttttta

SEQ ID NO: 514232 - DNA, 983 bp, Homo sapiens
ggtgtttcttgacgggtttgtgtgccgaaggatcccgtgtgatgtcggctgagcccactagtaccgcgtagtgtgcctgacatgggcaacgcacgcatatcaagtcttgacagtatcgagcgggtccttgtcggagaatgaccaggattgattcgcgtctgtctgggtgtattattgcatggcaggtcgcgcgcctaacgactttcgtaggatttctgcagctgtgtggtttgccttgaatattgtgctcttgtggatttcggtctaggactcttggccatgatgttctagtcaattaactcctgaaattctgaagatgctgtagggatgtacattccattcaaagagtcattctttctatttatttctcactttgtagtcctgtcatgtggtactgtgttgtctggtttgtcctgatctgcgtatttacaccgaggggagtccgtttttcttttagctgaaatttctccagcgggaatttgcgtgcttctgtgctgatgcatgccgcctgctggtggatctcgtttatgcacttgcccgtgggaatagcctgtgtgacagtgaagagactcatgtatacttttacgctgtaatgcatgcatgatgctcgtaatgttgtgtctgtattcttgaagatactagattacccttactaacttggtgtggagcccaagtctgtcctcctttttcacctggtaaccttgtgtgtatcgcattggttgatgggcagttaccctaaatagagcgatcataattgtgaagaattgaggccaacgctcttaccctacgtgaaagttgtactaaatcccttatcacgtagggtaaatctcttggtactgccgtgcgcgaacggaaagttgggcggtgttttcgcctgagatttgatgattcttgcttaggttgggaacattgttgctggtcgtgacgtcgttactattcattttgttccatgtggttcccgtcaatggtgttttcgactaggc

SEQ ID NO: 514233 - DNA, 199 bp, Homo sapiens
cgggagactgctcaaccatgttctgagctggttgaagcaaggtcaagcgggccagagctcaacagtagtacaacctgaccggtggagtacaagcttggcgatggaatacaacctgccgtgtgtgagtacaacctgccgtgtgtgagtacaaccttgccggtggggtacaaccgtgccaggtggagtacaaccagtgtgg

SEQ ID NO: 514234 - DNA, 160 bp, Homo sapiens
tttccccccccccccccccccccccccccttttttttttccccctttgttttaaatgggggggggggttttttgggccgcccttttttttccccctttttcggttttttccccccccttgggaaaaaaaaaatgcccccggggggggggtggggccccca

SEQ ID NO: 514235 - DNA, 228 bp, Homo sapiens
tgctgggattataggtgtgagctactactgcacctgaaccttttttttggatagaaaatgtgaaaagtgcgttaccatttgaagcatgtattggcccccaatttcaaggtgtatatatactcataaaattaaaagacagttttactttacgaaatgaaaatttacacaattcaaccagtttttggtccattagtttatgggtgtggtcctcaaagcggtctccctggg

SEQ ID NO: 514236 - DNA, 157 bp, Homo sapiens
ttagtgtacgtgtacagcacgtgaatcagttacacctatacatataaccattctttctcagattctttgtttatctctttagggccgcacctgcagcatatggaggttcccaagctagggatcaaattggagctgtagccactggcctacaccacag

SEQ ID NO: 514237 - DNA, 347 bp, Homo sapiens
agtaatgttaccaatgttcatccatgtgatggcagaaattgtgtggatttttttttaatggagttgcactccagcctgggcgacagagtgagattccatctccaaaaacaaaaaaaaaaaaaaaaaaaaaaaattttctggtttggttttacagttccccctaaaaaaaagcgaggtgttgaattttcggaaaccatttttggaattcgaattaaccccagtgccctattggactttttaccattctgctcggttcagtttggattattaaagaaaaattagaaggctctagtttttccctattagaccttttaactatgtctcaaaagcctattatgggtcataaa

SEQ ID NO: 514238 - DNA, 180 bp, Homo sapiens
  misc_feature (168)..(168): n is a, c, g, or t
cccagccaggaggaggtgaagctgccttaatctaagcagttctaggagccaaatggaaacatggaggatggagtgaagctggcagtcccaggtgccagatggagacaatgaaggagggggtgacataattcccttcaaagggtcagctggatcttcagggtgagagtnactggtcgacgc

SEQ ID NO: 514239 - DNA, 412 bp, Homo sapiens
tcctttccacacaaagacaccttccggctggagctctcggtgaagatatgctgtctacactgtggtttagcagtcacgaacaattctaccaaataccttctaccttctcagagtctgaggagaaggaaagccattttgtcatggcacagataccaggtcaatatccgtgggatagagggacctgccttgtcatcatcaacgttctggtgtgcctgtgtgagctgaaccaggaagctgtgtggatggatgtggatgtctctcacccccagtaatccatcccttcggtgctcctcagagaatatcgcaccccctgcatctgacttcctggcgcacattcatgaagaatcccgtgctgtactgctccattgctgtctgcctgcggttccgctgtgacgtcccctccttcagcgtc

SEQ ID NO: 514240 - DNA, 249 bp, Homo sapiens
cgagattgtcccactgcaactccagccttggtgacagactccatctcagaaaaaagggaaaaaaaaaaatttcgggaaccacccgatgctgaaaaaaatgtaaaaaaaaccgaccccttttacactgtgggggggagggaaaataagttcaaccattggggaagacagggtgccgattcttcagggatctaaaataaaaaataccattggactcagcactcccattacggggaataaccccaaaggata

SEQ ID NO: 514241 - DNA, 260 bp, Homo sapiens
  misc_feature (114)..(114): n is a, c, g, or t
  misc_feature (145)..(145): n is a, c, g, or t
  misc_feature (157)..(157): n is a, c, g, or t
  misc_feature (177)..(177): n is a, c, g, or t
  misc_feature (184)..(184): n is a, c, g, or t
  misc_feature (212)..(212): n is a, c, g, or t
  misc_feature (230)..(230): n is a, c, g, or t
atgaattcggaagaagaaggacagaggtcacaggagagacaggactgagctggcattcccatctggtgtgagggaggcaggggaatggcccagaaggctggatctgcaaacagnagtcgtatcagagacagagaagagagcacanttcaaggctganataagaccaggagaactggngctgctntttcctctatctattcctgagatccatngttcctgaaaatcatctnaacatctaagcatctcggaaacaactccca

SEQ ID NO: 514242 - DNA, 1218 bp, Homo sapiens
ggaaagaggggaaggtagtcaatagaggaaggtagtcaatagaggaaggtagtcaatagaggaagggtaatcaatagaggaaggtaatcaatagaggaaggtagtcaatagaggaaggtagtcaatagaaggaaggtatcaatagaggaaggtagtcaataaaggaaggtagtcaatagaggaaggtaatcacctagacggcagggtaactcaactacgcaggaacggtacatccaaatagacgagaccgggtcatcaactcagacggcgaacggtcaatcacctacgaacgccacgacagtccggggaaggcgaaagaagaagaatagagacagaatcgggcccacttcagaaagataaccacaccattaccctgcgagcaaaaggaaaaaaaaaggcataaacctataaaaaccctggacacaaggtacgcgaaagacaaggaagaaccaaacagaccagagcctaggacaacacaaaaccgcctagaggggccacgaacggtaccaaaccttacgcaagcaacaacggggcacgcaacagcaaacaagaataccgaaccaaacaagacagcaagcagaagaacgaacacagacaaagaagagaggaacagacagagaacgatacgaagacaaacacccaaaaaaagcaatcgaacgaggaacaccggcgaaccaagccaagagagaggagaacacagcggagacaaccaaggacgaacgaagagaggaaacgaaggaacacaaaaaaagaggggagcgagaagaacagccacaaaaagaacaacaacggccaccggagagggcacacagtaacgcgtacaagaaaaacagatactgcagaagaggaagagaaaaacgaagacaaacaaaagggaacgagccacagacacgagagctaacaagcgagacaatcacagcagacacagaagtgacacggcgcgccgcgggcaccacagcgcaaggccccggggaccgaccacgggaagaagagagcagacgcgagaggggagcgggcgaccacgagaagggaggaagcggcgagcgagagagaaaccggagagacggctagaggagacgggacggacggaagcagatagggaagaaggaggcaggcgagggagagacgggcgggcaggggcgcggcagagggacgcaggagagagacaagaggcaggggaggaggaggcagagaaggaagggaagagaaggagcggcg

SEQ ID NO: 514243 - DNA, 827 bp, Homo sapiens
ccttttcctccctgtcgccaccgagtcgcacgcgtgagattctccgccgagacgccgcggatgcgctagtcgctcctacctgtgctgccctaggggggcaactcctcccccagcgccaggacatcaagaagatctgtggacagcgtgggtatcgaggcggaacgacgacccggtcaaccacgtttatcagtgaagctgaattggacaaaaacctttgaagacggtcatttgcccaggttatggcaagcttggccagtgtaccctgcttggtgtggggctgtagccggtctctgttgcccaaggtttctgaagccccttgtttggctggtttctggccccttgtttgcagcagagcgagacggaacgattgagaagaggggaggagtcctgacagagtccagactgcttgaccttgggaatgggacctttttgattaaattccttgctccccgtgaaaattaaaggcctttttaacagcaccaaaaaaaaagcaaagaaccacgaaaaaaacatttttgggcgcgccctctcgccctgagaagaaagatttccaaaaaacccactcttctgtggtgggggcgcggggcccgcaggagagcatctcgcacaacgtgcgcgacaacggcggagtcacaaagaaaacccgggagtcaaagacaacgtggcgcggtgctgccaccccagaaaaaaaaccgccggggggaccccacggcgttcttgacacaccccaggagtagggtcctagagcccacccgtggatagcaccaaggcgggccaaagaggcgaacaacgcgcccccgcggaggaggcagcacgacgaccccact

SEQ ID NO: 514244 - DNA, 424 bp, Homo sapiens
ctggggaatggagccaaccagctttgaatatcgccccccaaaggctgtgagctcccctattgtagattttgccccctaacaccttggtggtcctgatccagaatttggtgtggccgttggccctgtttgctttttataaaccaaactctattttgaaatccccacaaaaaaaatttaactccatatgtgttcctcttgttttaatcttgtccaccagggcaagtgcccgccaaaattccagttttttttttccaaaatgtttggaaccagtataatttgccaaaaaaaaatgatacttttctttttttgctgttcccccaaatccaattcaaatgctttttgttttttttttttcccaattcccatttcaaaatgtttcaatggtgctataataaataaacttcccccctttttttttttccca

SEQ ID NO: 514245 - DNA, 423 bp, Homo sapiens
  misc_feature (42)..(42): n is a, c, g, or t
gttatatttgctctgccaggaaatcctgggaaagagccaggnaggtgacgttttatccacgagcctgctatggcttagcctagccctcccctaactgtgaccaagctctggatgagacacagacaactactgaggacctgcaaagtaaggagactgcagggcggaggcggaacttggaggagtgacctgccgtggagtttctggtttcctccttgtggctttgtctggagggcaagccccactctcagatccacatggcaacacaagcagctaaaacgcagatagaaaccccaacctgggaaaaggagtcctacagcaacttttcagaagcttcagaagaaggacgccggagaatgcccgcccgggactccgaggtgccctgtgctcatggattggtcctcctggctccatgagtgtgagtgt

SEQ ID NO: 514246 - DNA, 884 bp, Homo sapiens
  misc_feature (195)..(195): n is a, c, g, or t
  misc_feature (232)..(233): n is a, c, g, or t
ccagtgcctcttgtgagcaactggcgactccacagcctatcaataacagggtggtgagagcttccttcaaatgaggctgctggatcttgcctcttcaggaaaggaaacctaccatggagagcttggttccttgcctccttctggtgctcttactccaagtctatttcatttttccacactgagcaatgaatgtgngagatgtggtcaccaagatctaagttacttgttgaanngaaagttactttcgacaagatctaatatgaaagcatagatttcacatttgatctctgtaataatcatctttcctatacaagtcagcattttggtaaagtttccaagaaggcaagaaccaagagcatggaagcagtcaacagcatcaatttttcaaaatggctagctatttgggcaccagtttttctgttatctaaaatttcacacaattcatggttttattttcatcattatgagtggtccatcttaaagcaaatatgcagtaattctacatgtagtagaggtgtctgaagatcatataacaattaaacataagccagaattaaaatgatataggacgaagaattgagctaataatatgttttaactcttaacacccagcaagaagtcagtcatttatgaagttttagctactaagattactgtggttttgattaccagtgaaaagaaaccacatacatcaggaggtttcaaatcttggtccagtatttgattgttctcataatggggttgaattatcctagaattttttactgaaggggcattattaattcacaacttctggtgtataaataaaggcttgtggtctcgggggggagtgcacaaacaaagggggtgttggttacggttgttcgcaatagttttcaacctac

SEQ ID NO: 514247 - DNA, 419 bp, Homo sapiens
cgcttccggggttcaagcaattgtcctgcctcagcctcctgaatagctcagaaaacatggtccctaggctgaaagtctaccattgactgtagaaaaggaggaaaacaggtggctcatgcctgtaatcccagcactctgggaggctgaagcaggtggatcacttgaagccaagagttcgagaccagcctggccaacatggcaaaaccccatctcaactaaagatacgaaattagctgggtatagtggcacatgcctgtagtcccagctactcaggaggcagaggcacgagaatcacttgaacccaggaggcggaggctgcagtgagccaagatcgcacccaaacagggattaactgattaactctatcctaagacaaaacataatcaaatggtagtctgcccagttcaaaccaaaaaaaa

SEQ ID NO: 514248 - DNA, 614 bp, Homo sapiens
  misc_feature (195)..(195): n is a, c, g, or t
  misc_feature (232)..(233): n is a, c, g, or t
ccagtgcctcttgtgagcaactggcgactccacagcctatcaataacagggtggtgagagcttccttcaaatgaggctgctggatcttgcctcttcaggaaaggaaacctaccatggagagcttggttccttgcctccttctggtgctcttactccaagtctatttcatttttccacactgagcaatgaatgtgngagatgtggtcaccaagatctaagttacttgttgaanngaaagttactttcgacaagatctaatatgaaagcatagatttcacatttgatctctgtaataatcatctttcctatacaacagctagcactccttcggctaaacgccttctcaacacgaacgaagacaacagacgatggacagagtaccagatattttctaacatggctagctctcggcgcaccagcttcttactgtcatcgtaaaactttcacacaacttcatcgttctccattctcatacttatgcagcttgtcccctccttcacccgaacatatgcagtaacttctacatgtcactccgagcgccgtctgacagcatccatatacacaattacaccatatgcccacgaaattaacacttgcacctatagacagccccg

SEQ ID NO: 514249 - DNA, 459 bp, Homo sapiens
cggttactgaggtcgatctagagcgatccccctgggaggctgcagtgcagatttcagggacagctttcagttctgtattgtaaatagagtttccccaagcgcaggtttgtatttggctaggtatgatggagatgtattatcacttcttgcctgtgctctagtatgggctcccttagtccttgaatgaatgaaggaaacttatgaaaatgtagcacaggccaggcgcggtggctcacacctgtaatcccagcactttggggggccaaggtgggtggatcatctgtggtcaggagtttgagaccagcctgaccaacatggagaaatcctgtctctactaaaaatacaaaattagatgggcatggtggcacatgcctgtaatcccagctactcaggaagctgaggcaggaaaatcacttgaacctgggaggcggaggttgcggtgagccgagagtgcactat

SEQ ID NO: 514250 - DNA, 279 bp, Homo sapiens
tcggatgcaagtgtctgcaaacatttctggaatctgatccaataagctggtgataactgcccgagactcattgacgttgaccaggaagccatccagcagtggtaacaaacatgtcaggcacagtcagacacaaccatcatctgccggctgggccaagtgagctcttcacattatagcaagtggagcacctaaattgtagcatgacaaagaccaacgcgagattgctagactctatctgccccaccctcccataggtacgaaagtctaacagatgacttg

SEQ ID NO: 514251 - DNA, 110 bp, Homo sapiens
agagagctagcaccatgagcttcaataccctggggtcgggggcggaggcggaggttgcagtgggccgagatcacgccattttctgggcgagagagcgagactccgtctca

SEQ ID NO: 514252 - DNA, 956 bp, Homo sapiens
cgcgcctgaggaggaggaggaggcgggggcggcatggctgctgtggtggtggcggctgcgggtggcgcgggaccggcggtcctgcaggtggccggtctctaccggggcctgtgctgcggtgcgcagccgctgccctggggcctggtggctcgtgtcaccctgctgcagctgcgcgtcttcccatgtgctgccccgtgctcgggcctggccctgagtgtgggctgcctgatggcagctggggtcgggggccgagtgcccgatgctccatgtgccaaccgctttctacgacgcgctacctgcgacaagatccagcttgctgcgcaggtcagacccagctgcttttgagtcccgcctggagaaacgcagtgaatttcggaagcaagccagtggggcattccaggcaaggtgattttatcaaatgtgtggaacaggaagacatgatgccttggggaaaacaggtcttgtgaacaggaggattcacgtaagggacaagactctcagtttcaagtcttttaacattgcagattggtcaacaagaacaaaactgcagaagcacataacacagatttggcagcaatattttgcagcaaaagatacagtctacgcagttattccttgcagaaacagttcggattggatctggaaccgggctcagtcctgtccaacaatttctattgtgctctgccaagaaggggacagggttatgacgttaaaggtgggacaatggaccgggtacctgaactccacttcactgcacttaattagtattcagacccgatggggaagctgacggaccagcccagctgactttcatattcaactattcctgaagcttgagggaaggcaacgggccatagtgcttgatgacttgccgaaaactggattcccacatttctgaagtggtggacgaaggccagagagcatcgaccgagccaggtccagtcttctacgatacg

SEQ ID NO: 514253 - DNA, 1058 bp, Homo sapiens
ataatacaggatatcagcatatttgtgcaccttattaagccccatcttaagaaaacacaaagtctaagtctgctgttacaacttgtcaatggtatacgaatattagtctctaaattccagctttactgtgaagttctatagagtgttaaatacaaattttcctgtcctgcttcacacagttccttaaaatcagtttggaccttgggtcatagagtcttcatatttcagtatctgggtggtcccttatgacttatacataacttggtaaaacagacaaaccaaactttcttctgatgcttggacatatagtttggaaaggagttcggacttttattcccctcattcatctcagtcatcgagtgcgctaatttcacaatacgatttcggtcattacaattaccatatctttatcatatacaccgtaccctattgcgtcgactctgttacccatataccctctcacggtcaattacacactacgcttttcacaactgtactactattataacaaatatactgtacctagcctaccgacattgctacttcacaagaaaaaccacacgcccccacccaaacacacttggtacgcaagctgggcccctccacaccgcctctaaaccaccaaccgctatggccacccggcccaactatgtctcaccgcaccacggccccaagcgtggcccccaaaggacaccctgggcgcccacacacgggcggcgggcgctcccccccaacacacaaaccccccggcggccacccacagctgtagaacacccacccgggaccccagcgccaccaacgccgaccacacagcggagcaccagccttgaatatgcccccccccgccgggaaagcaccctcaccacgcgaccctagcacacgccgacatctccgcagcccacgccaggctatacaccgccccagcgaccaccaccacagcaccagcgcactcgtcaacgcccagactccacgcgcctcccccgccaaatcagcactcgccccacctaccccccccaccgcctcagcactcccatctaagcgcccacccgaagccaccg

SEQ ID NO: 514254 - DNA, 137 bp, Homo sapiens
ttatagccatacatgacaacatgggacccactactactaaaaatgcctcgaattccaatgagacaggcggaggtggaccggctaagtggtaccccagactgtgcccaaacatgggatgtgagcagggggatccatct

SEQ ID NO: 514255 - DNA, 366 bp, Homo sapiens
atctagcatctcctgggacatcatgtatagacacagcccactcccagcatctgagtaatcgtctgctgctcttgcactgtccgctcccaaatgaggaactcatcggtaaggccagaaaggaaagggagaaaaaacaaacaaacaaacaaacaaaaaataggaaaaacagaaagagcgtattcatcagatggtagcagacattctgggcatgcagcaaacccagccacacaagtggacatgtgtgcatcaggtgggactgctgcatcttgttttatgaaagaaataaaggcacgtcacacagatcctttcgcaaggcatcccccatgtgtgtatgtctaaccccaggtgacaggtaaagcagccagg

SEQ ID NO: 514256 - DNA, 370 bp, Homo sapiens
ctattattatctatattgtttccatacaaaacttaggctatttatcttatatctagctctccttgagattcgactctacatatgtatatacttcatttcttccacttctctcatctcacttccccttgctagtcaaaatggtttcttcacagctctcaaacctgcatattctactcctcgtcacttagcttgcactgttccccatccttttttcctcatccccacccatcctttggcagctgggttatgcttgttataaagccatgttatcgtttgggggcgttacatgcagcacgcattttggcatagagcatcactgtccaatttttatcccacactagttgtcgtgttgccagattggtttaaagtc

SEQ ID NO: 514257 - DNA, 160 bp, Homo sapiens
aaagctgtacctagtacaccttcccagcctctatcactggtgacacaccagatttctgtggataaatggggctgacggatgttgcaaagctcccaggaaccacaaagagcacgcctgagtcagcagatgctcgcaggggctgtccccacaagagagacgt

SEQ ID NO: 514258 - DNA, 1502 bp, Homo sapiens
  misc_feature (207)..(207): n is a, c, g, or t
tgacttctccaaacaaacacataattatgaatcaacacaagccgacccacagttctaattattagacatacatcccgtcgtactattatctcttaagccaacatctaatcaacaagcctaatttagttctggttgccccaaagcctattacctcacgaacctcgcctaaacaaaagcactgctctacacttaaataaacttaagctnatcgctgtactacctatcgccctcaggaatacagtggacatgacccaacggccttctttaatcacaagctagaaaccaacataatacaacagagagagagagagactgctacccatacatgctattacctacatcgtgcgcgctaacagaactctaccatgtaactctctaatcattatcagcgaagacacacaggagactcaatcaatagttgatgataagtctatacttagcgaaaaacgcagcaactgtgatgcgccacacacttgagctgatacaatgcaccgcggataagaaggcagaaccacgcccaggaaacgcctggaaaacgcagggcaacataactatccctgattctacaacccataatgagagcatacccatatacacacacataactcaatacagacacgtgacttatagcacatacaacaaacacacctcagagctcacataacaaccagttgcttaacatacatacacgtcctcaactagacacaaagaactatacaaactccctgagcccaaaccaaactactagatcatgaactaagacgttaacaacacagtagacactctatagaatagaataaaacacgataacacgtacttttaacagcgaaccttccacctatacatgaacttcccactcaacacgacccaatgatcgcaaagaccacccatccacactgagagtcaaactacgttacatatggcccggcaacggcacctccattaacaaaccctaagagcagggagttcatagggatataacttacacagccgtttacaacaaccgaccaagtttctatcaaacaccccacgctagaaacacaagcacacaataaagcacagaaccacacaattacagatcagcgaacaacaatccacactaatagaagaggcagattaaacctcaattcaaccaaaagagcgcaccagagcatagccatacagcaacacaaaaaaggaacgattaaagaacaggacagcccgtatggcgaataacgacagacaaaggaggagccaccgagtatggaccgcacgacagacaggaaagcaggccaagtacgccaaacccagaaaacacgcaacggaaagacgctacacaccagaggagcacgacaatagaagaaacaagaacggcaccgaggaacgtacatcacagagaacaagtacatggacagagcagaaaacgacacgcacgaaagacgcacacaaggagaagaaaaacacaacccagcagagacatacgacagaacgaccaacagagataaagagcccagatgagagcg

SEQ ID NO: 514259 - DNA, 273 bp, Homo sapiens
  misc_feature (230)..(230): n is a, c, g, or t
ggggtactagacatccccttatacagcagctatccaagcacgcagctatgtcaagtatccaaggaaatgtcagaaaggcaaaatggccagcattatccatttgcttttttgggtatactagagtgaatagcactttccttacatagtgcatgtgatttcagcgttatttcgtacttgagaaacattgcagatttccagttgggaagacacccttgaaatctttatgagtnagcataccccaatccaccctttggaatagcttggctgtagttg

SEQ ID NO: 514260 - DNA, 216 bp, Homo sapiens
atcgtcaaccaacgcatcgccgaagccttcatgacggaaggcgccgatgcatggtacatggacggcgcgcgcgagcgtttccttagggagcgcgcgagcgaagactggaagaaggtcgacgacatctgcgacgtctggttcgattccggctctacgcacgccttcgtgctggaggatcgtcagaacttcccgcagctcggcaacatcgtccgcaag

SEQ ID NO: 514261 - DNA, 1685 bp, Homo sapiens
  misc_feature (685)..(685): n is a, c, g, or t
  misc_feature (689)..(689): n is a, c, g, or t
  misc_feature (943)..(943): n is a, c, g, or t
ttgatcgccacacaaaaagaatcgaccgcacggggcgttgttggttgtagtaacaccacgtgtgcgtgcgctccctccgggtctctctttattattcaccacggtggttcgctccttttaatatggggtgttgactccgcagagaggccccccttctggcgctggtggccgcggaaaattttttcctcggccgactcatcccgactagggcgtccaacgagatagtagatccgtcgacgggcgccttctctcttcttcacacaacgggaagtggagagataactcttgtacgttgtcgatatgtccagacacgtcgtgagaagagagagggtgctgttctcccctccctcgtgagtaatggtagagtggtgataagcgtgtatgtaaaaaatggagccgtcggtctacacacaaaaggccggcccatcaagagaggtttgtccccaagacgctttctttgtggggtgtttgtaaccgacctttgtgggaacagggttaatagtatgtcgctcgccctccctccccttagagtttcttttcttatggacgaacccctcttcttcgcgtcctctataggagtttcttactattggccgcctcaatggaacagactagttcatcctacgggggggccgccccccacagaaaatgtaattagtggtgcagccgtgaggaagagaatcangctntgtgggtccgcttctccccgccgatagatgagatattatcctctccctgcaagtctgaataggtgatagtgcctccctctatgtagtgagaaccaccacagctgatgatcttggggtgtggttcttcaccaccgcaccaccgcattttgttgatgtagcgaagaggatgtgcaccaccccaccacacaccagcttggggggtgtcacaacacagcacaacacaacaggtttcttctcatcttcggagtagggcntttttgggagagccctctctctcgagagaacccgacacgcggctctcaccacagagagtctcgagagatacgcgacacacagctcccacacagctctcctcctgagagagatatttcgcagcattctcggaggactctcacactagaggagagacatatgctctcgagagaggcccacacgcgctttgtgagagagacacacgccctctctgagaggagagagtgtttggagagggcccacgctctatacgccccttatcacacagatatgtgagacacacgcgctctcaaacgcgagagattctctcggctgcacacccctctgaggtctcacagagagttgtggcacacacagagacccccgggccacagagagggacacacagcggccacagggcccacaggaggtaatgagagggccctctgtctggaaacactccacaaggtctcacacagctcggagaggctcgaagaattccgccaccctgatccccccgcctctgtctggaaagaatggcgaggacctttaaattcttggtagaatgccttggaacacgcacgcacaactccacatgcacaaccactcccaaagagccacccacccccccggagtatagtggagatggccaaagtggtgttctgaggacccatgaccacccaagattttgagcgccttaagcccgccagaagcccgggtaccccttggggacccggaggcccaattaaaagttcaagagttcca

SEQ ID NO: 514262 - DNA, 340 bp, Homo sapiens
  misc_feature (64)..(64): n is a, c, g, or t
  misc_feature (198)..(198): n is a, c, g, or t
atgatcagagagtctacagcccctctaatactaactacctgactcctacccctcacaatcatgngcagcaacgccacttatccagtgaaccactatcacgaaaaaaactctaactctctatataatcttccttacaatcttctttattataacattcacaggcacagaactaatcatattttatatcttcttcgaaancacacttaatcccaacttgggtatacatcaccgatgaaggcaccaggcagaacgcctgaacgccaggcacattactttctaatacaacactctagtagggctcccttcccctactcatcggactaatttacactcacaaaaa

SEQ ID NO: 514263 - DNA, 287 bp, Homo sapiens
atccccaagaccgagggtcttcctagtgcagcgtgcacatcataatccaaagcacgactatctcactgcccagctgtaacaccttccttagctgatgcctttctctatcgaatccaggttccacagtgtcaattctaccctctctaccatctctacaagcatactggctcgccatcttgacattacctggctcgagttcactgctccttccaaatgccctcaaatcgactttgtgtcagagtttactgtctgggtgtcccgaatacatgtggatctgaagggaagga

SEQ ID NO: 514264 - DNA, 637 bp, Homo sapiens
gtgaagctgttagaatggacagtacagatgttgcagattattccaagaactccttcagcaggtgatgttcaccattcgtaaaccgcattttaagacggtcactttgctcgtctctttgggtacatacgttttaataactgggatggtgaagtagtgtctaaaaaggtcgagtctttattcaccgtacattaaaattgggaaaaggaccggacttacctttggttctcaatcattgtacaaaacccaagaccttatttgggctcattagctgaaagaaggcacattcggccaaaccgggccttgtttagggccattgggaccctgataacccttccgaatggagggacccaggcccttactgggcaatgtacaggaaccccttttggacaatgggaatcacttggagttatttatatacacggggctttttccctaccggagtgtattgctactcacaggctacccacacattgtgagactgtgttaaatattttttaagcgtgattgtgtaactgtagcactctggattgtggcaaaatgtttttcagcagagcacgcttttataacactggtttttgacagcgctggaactcaccctttccaatggacgggcccggggactctgccatgcttgtgg

SEQ ID NO: 514265 - DNA, 334 bp, Homo sapiens
agggacgaggacacgttcataactttctacctatgagtagtacataacgacaaagactatgtaatatatggaccatctaccttcagcattccaccacgatcaacgcaataatgacttaactgagatggcgtattaatgaacctcaatctagtcaatgattccaccacactaccactcagtaacagcaattctcaaagggccaaaactctacgatgaatgaggatagaatataaaagaaaacggtctactccctagcgagaatgaacggaataaatatacctcagaaatattatgcaaatattatcatagagaacgtattgagctgtagtaactg

SEQ ID NO: 514266 - DNA, 320 bp, Homo sapiens
atcctgtgatgtattattgggctagagtggaagtggtttgggtaggctggcttcagtgcatttgcagaaggaggagtgggtggagggaaaggtgggagagagggaaggagtgaaagcaggagaaagtgaagaaaggagaagtcatgtatggattacctccacaggattatgttccttgattcctgagaagttttttctcttgattttaccccctcagtctatcactgcaagagaaaggggtagaaaagacaaacagaccacaaaagacaagaacccagacatatagacagacgcacctgttgcacatgcatgcacccagg

SEQ ID NO: 514267 - DNA, 902 bp, Homo sapiens
acttggaggttggtacattctttgttgtttagtcagtgagccaatcttggagctctgagattctttactcagctggtctatctgctggtaatactcgtgattgcatatgaactcttgtagtgtctttttcagctctatcagatcagttgggttctttcttataatgcccatttcatctatcagcttcgtgtatcatttatggtaatccttagatttcttggatgggtttgactatttctcctgaatctcgagtgatttggtcctatccatattctgaattctacttctgtcatttcagccatttcagcctggttaagaacccttgctggggcactacggggtggtatgtggggaggaagagactctggcttttacacatgtaggctatatagcaatgttccactcctcagataccaagttttctgtggcaggccatccttatatggcaaaaaatacctgaggctgggtaatactatacaggaagcttactggctaatggtactataggctgtacaagccggcccagtccccaggcctctgtcagctttctgggtgagggcctcggaaaagctaccaatcatggtgggacgggaaaggaacccgtcgttccaccttaggggagtcagaagttagagagagggacaggaagaaagcatgatacttgtaaaccggaaaactcctgagcagcacacaacaaaacggacgatacaggtggggagcaatcatctggaacgtgccaggtgcggcactccaacaggacctcagcggaataacacaagacgtggggcagcaaattactgcccggagtacaggtggcaggacgaccaggggcaagtagaaagcgtgaagagcaaataagaaagtgggtggcaagacggatggagagcaaacatagtggaagg

SEQ ID NO: 514268 - DNA, 196 bp, Homo sapiens
acagtaggctgaactggtagcccaagacaagtgcaccagccagaaggacccaggacatccaacccagctgatcctatgatgggaccgaggtgccaatgaagactacaacagccctgctctggctcacttcagtaagctgatccagtctacacacggttggaagcttgagagaaacaacgagccctgttctatgtca

SEQ ID NO: 514269 - DNA, 931 bp, Homo sapiens
  misc_feature (13)..(13): n is a, c, g, or t
ctggcgtcttgcncttggagatatataagcattaattgaaaagcacagcgaagcatcgagcggttggtgtagaggtgtgagcgctgctctgcacatagctatacgcgcttctctacgaagcaagtctcgttaggcaatcttgaaatgagggaaccccaatatgttgtgtggtcgccggatattagtcgggggtaaatagacgcctggctggccgctgatccggccccccatattgggtcgccccagggtagaccagattttgcgttataccacaggagcgcaaaaaacaagcggtttgcgcatgcacacccaaacgtgggcggcccaaaaaacagggctgggtgggaccgtggcaaaccacgcagacagcgtgcccgggaaggaagagacacttccggggaacatacaactccgcgggccgccccccgggagaacacctcctgtccttagagaaatcactatacggcgccgccacaccatatggggtcacacagctgtagctgccaggagaccacctcagtatgcccgccgcaaagggttgtcctcaccgggtctatcacggggaatcggggagacgcaaaaaaaagctgggtgacgaagcccagagccgaataagcccggtctgcgggcgaagacggcccgtggtgtcgacaaacaggaacctgcccccccggcagcgagaccggcggtccgcctgcgtgcggcccaacgccccaagcccggtcgcccacatatggcccgggctcttattaaagctcgtacatacgccatgagagcgtgcacaccacaccgcccgccggcccacgacgggcaatgaagcttcgccggcatgcacaattacaccgaggaaggcgccactatggccgaaccggcaacccaaccgggcaagaaatctcaaccaacctatttttaaaacccccccaacataaca

SEQ ID NO: 514270 - DNA, 877 bp, Homo sapiens
ggcgcgaggagccgcgaaagttgcacaagacagaagtgggcccacccaaaaggcgagtgtcacgaactccctccatgttggagcgtaaagacccggcgccgcgggggtcacacacggggtaacgccccttccagggcccaactgcctgggtgagcaaaaacagtgtggagggagcccacaacgggttagtacacaatgggggccctgcaccgtttatagggaccttgtggaactttcatattaggggtacctcccccggtcagacaacccgaactttgaagccccggcaccccagtttgctttttaaaaaaatgtccccgttcaaaggagaaagtttaaaaacctggggggttatcaccccgcgtgccgtacaaggcagagataagcccctcttcagcatctttccactggtgcgcatttctttgtaagaatatcaaaacgcgtgcttaatcacaaaaatgtagcaagacgcagcgcttttcccacagggggatcccaaaaagcctgtaaactctttacgagggataattctgcctcaccaggcagtcgccacagatttgtgatgggccagaacgaaatgtccccacggttcccttcttcccgagcccctagtggtacaatctccccgggttgttcgcaaacaaagggaagcgccccgcttgggggaggagaagcaagaaaattcccgcgagacaagtgttgttttcccccgctcgatccctcgcctagaagcaacacacacacgggagatacaaaagggggaaccaacacaaaaacctccctctggtgactgggcatgggcaccctggcgtttttttaaaggggtttttttataaagaaaaatgcccgtaagccaaaatttctgccaaccataaaa

SEQ ID NO: 514271 - DNA, 1017 bp, Homo sapiens
  misc_feature (228)..(228): n is a, c, g, or t
  misc_feature (472)..(473): n is a, c, g, or t
atctgggatgcagaagacttagaagttattttgttgcttgttatgttgggtatatggggatttttaaaaaataatcaaagtggaatttgctaggtaactgctttaagatgaattattgtggtctttcagtcactattacacgtttcatatgttttcgttgtgccttattggaacgttcttcgctgttctgcctcgagtctcttctcatggaaaggatacatcctgaanaattatgatagaaacgtacaaataatgaacgcgatcagagttactgaacaaacatacactaactaattatattggaatgaatttaagctagaacgaagagttactaatagctatagagaagaaccattaaacatcttaagattacatctgaaattttaaaggactcaccatgagcaacgaataagctcattaaccaatatttcgaagaaagagaaatatctgacgcagatagaacagcctaacnncaaggatactctagggatcatcaatgaatgaagatgacaaaacaaaaatcctgagaaaatgcatagatcgaatggaagactccatgatacaaacagatcaataatcgaaattgaatcaagccgagaaatgactattaatagatatgcaacagaatataagctgatgataccatgggtggctattatattaatgaataataagaccacaaatggaatcacaatatagaacaaacagacagggaaactaagggacgaatataaatcaactcacgagcgaaatcccacagacgaataccggactcctcgagataaaaaatacctagcaagacttgtcgggaataacatcgggcgcattatccagtcacaaacgcacgggaggccaagagttcgcgcatcacaaaggccgcaaaagcgttcaccacacatagcgatccaggcaccatcataacaacaaccctcaaccaataatcccggacaagtaaatcaacaatacgtggccagcccggatcaccaagaccccggtaatgacagaggacccagatgt

SEQ ID NO: 514272 - DNA, 185 bp, Homo sapiens
tcaggcaggagagggtggttgtaggcagggttctgggctcgtcacatccagtccagcgagctgcaatcttaccactggccaaggccgtggtacaggtcgtcctggtttacgacgtcgcccctgctgatgttgaatgaacacagactgtttccttcatcttctggaagaagtccttgttgcagagt

SEQ ID NO: 514273 - DNA, 177 bp, Homo sapiens
ttgctgagacacatttgagtcactgcttcaatctgggcggaacggtccgacattcccgatatactcaagttaacatcaaactctgctcttcaagcaccctccaaaactagactccaaatttaccctcccgcgagccagacatgtagactctgtaagtcccaaaactaactttagctt

SEQ ID NO: 514274 - DNA, 218 bp, Homo sapiens
  misc_feature (51)..(52): n is a, c, g, or t
  misc_feature (58)..(59): n is a, c, g, or t
  misc_feature (63)..(64): n is a, c, g, or t
  misc_feature (78)..(78): n is a, c, g, or t
  misc_feature (81)..(81): n is a, c, g, or t
  misc_feature (92)..(92): n is a, c, g, or t
  misc_feature (125)..(125): n is a, c, g, or t
attgggcctgatcattcgcagacagtatgatggcttcatcccggttcatannggcagnncganntgcgctcaggtctncangtcatctccancttcttccgggcggcactgccatcgagcgctgnttctctcgtcctccagctctgcctccatctcccgcacctgtctgaccagctgcttcttcttctcctcgctctgctcgtcccggccctgcaggt

SEQ ID NO: 514275 - DNA, 182 bp, Homo sapiens
gtctggttactgttgccgcgggtgtctttttctttgagtaactagctctctgagttttgcacatcacgttgccctcatctgctggagatcgatcaggatggcactagacgttctcctctgcccgtgatgagcttcccgcagccgcctggcccagcctgggcacgttctccgaggcatttgtc

SEQ ID NO: 514276 - DNA, 738 bp, Homo sapiens
  misc_feature (535)..(535): n is a, c, g, or t
gggggaggaaacatatattttagtggctacgacatgtgattcattttctgataaaatatttgtctaataaaacagaggcacgataatctaatcaaatgaacttatgagaattttccaaaaatgtgagttcactagtaattgttctaagtctacttattaaacaactcaagggaaactgtgaatatattttgcaaattgttgttcaaaagataatcggaaaaaattgaatatattgtaggatttgaatatacagcctacttttatgtcacctctaccttcaaaactacatataatgtattttaggagctggatttgttatgtctgttgcagcgaggacttgttattcactggtatgaagaattctttgatgtttatattagtaacaaaattatgcaaggatagaatctcatctagaaaatgcaaactattgttgaaaagcagttggcctttccacacaaccgctgtccccagagataactgctgatttcattttaatggtatccttttagaccttttctctatttacaaaaatgtnacgtgtttctatgggtacatacgtttgatggatttttttgattttacggaagtggcagacacttttttgacatgaaaattggaatttttctatcaaagtgcacattggaaataacccctgcttttggggttttacttaaatggcgcgccggtgctttttaattaaaagggacctaaaattttttgacttttgggggagataaa

SEQ ID NO: 514277 - DNA, 149 bp, Homo sapiens
ttcagacgggctcgttcatccccaccattccgtcgttccccacatgtatttcacgctgcgagcccttcaatggccatgccctggccccgtccactgcttctctccccatccacaatggagaaggtgaaaagaggagggaaaggccttgt

SEQ ID NO: 514278 - DNA, 106 bp, Homo sapiens
taagagatggggatcttgctatgttgcccaggctggtctcaaactcctagcctcaatgaaatggagaaacgcacacctacgcaggaattccccccaagtcagtacg

SEQ ID NO: 514279 - DNA, 531 bp, Homo sapiens
caaggggtgcccctctaaattaaaagggggggaaaaaaaaaacccagggattcttaaaaccttagttggaaaaaaggaggtaaaaatcccatccacttttcaaatggatccaagggggaaattatatggggttaaaaaaaaaacaagggattgggttaaaaattaaaagcaacttgttaatttttccctttttttaaagggggaaactaaaaaaattaacaaatggggcttagcccatatttttgttctacagcattgttttagattatgggaccaatataaaatgccgggcaaaggcaaattcaaaaaagtttttgattttaaggactttatgactttacccaggctttttttcggagaggtttctattttcaaagggtgggtgcgcattatatctaaaaacctaaaagctgcctgataaacaaactgcatctggtcccttggaaaaaatttaccaaggcaacagcggctgctggggggttctaaaattagccacgcctgtttattcttcatttgggttcgagcaaatgg

SEQ ID NO: 514280 - DNA, 308 bp, Homo sapiens
tggagcggggcagaagggcggaagacatctccgtcgcggggtcttcttgtcgagcgacccaggaatggccagctgctcccatttgggaagtcatgacaaatacgagaaacacacccttgtgtctaactaagttctccttctccaaggtagagcagaaatatcagaaatatcatactagaacttctcctcttttttttttttttttttttttttctgaaagggagttctggcgtgtccccgggggggaagagcagggtggcaggatctgggttcactacaacctcggcctcggggcctcggctctccag

SEQ ID NO: 514281 - DNA, 525 bp, Homo sapiens
caatgagtcatttccacgctcttatgtgtctcagtttctctcttcagaggtctatcacctctgagagggctaaaaatgccaagtgaacagctctatatgcatttcttgaatgagtcttttaaaactaattttgttgagggttccctgtagggccactgcatgtcaaaaggggttaaccacccagacattcccactcagtccccagtcacccaaggggcagcttgcagcttgcagtaacaaaatgtcctttctcttcagagctgaggaggtaagtctctcatttatctctaaaaatgacagtttaagtttctcacaaaaatgcacagacaagccaactgagattaatttggggagaaaacgtaatggagaagacactttagaatacacctccaaagtggaaaccaaatagggtacccaaaaggcggggggttctccttggctttagaaaatggcagtggagaagatcctttagaatgtacctctaaactagaattaggatcctaaacaacaacttcctaggaaaaa

SEQ ID NO: 514282 - DNA, 1340 bp, Homo sapiens
  misc_feature (1340)..(1340): n is a, c, g, or t
gcggaagctgctgccagtgctgtctggagctggagcttccagggtctctgtggtctgccagctgcgcgggcgcgcggctggagccggcgccgggcacggccatcgggggcctggactgcacggcccggcagcaggccggccatggagccaggcatgcgtggatgaacctgtccatcgtgtacctggagccgctgacttcctggtggtcaacaatgcactgggacgttctgcagttgacagacaaaggcgtggctgggagactctgaccctgcagaacgcaagctgcaggtacccgcttacccgagctggccgaccctgacacctgctacgggttcaggttctgccaccagctggatttctcacaacagcagggagcgctgtagcgttgggcctaaacaagggcaagccgcctggcaagctgctgtacaagtgttgcttcacagggaagcagagagcgctgttgacacaaagggctttaacccttggcaattttgcttgaaagggtgcacacaatccaatggacagacgccgcgaggtaacgcaagtcatgcccattgccatcttggccagggaacacagccaccggactgtgcctgaggcaccaaaacaaaattgttgcaattcagaagtgtgccttcgagcaaagggatatggtggagaaaaccccaaaaaagcccagaggccttcaacagagaatcgtcagtaggtatctttgggaacaccttggggaatgtaccggcaatatgcataattaccatggattattaccagaaaaggagttgcaattcgacatgaagaagcgccgggagtacaaaacaggtaggaccagggtgacaaaacataaccccagagcgcattaggaacgacaggattgccagacgtctgggaaaagagttgaggaactcactagtgggagtgagacctaaaccaccaccacgggattgaattatgggtgagagtcagagacccacttatgggacgacactttagcggcggcgaatgacaaacaaagggaactctatcagtagggagggacaccacaagcgagggcaaccggcgaacccaagtgggagcgcaaggattaccacggacaagattgagactttcgcgtattacgcaacgcaggcataaattacatataagccatttggcagtgacaaattcactccgccaagtgagggaaacaacgacaggaagagattgtttaattaagcgacagggatactgtaggcagaggagcacaataggaacccaccagaattccatatagcacacccataagataccattgaggagatatgaacattgaaatgatgagtaaaggcacacacacgacagan

SEQ ID NO: 514283 - DNA, 973 bp, Homo sapiens
ttctctctccccggacagcatgagcttcaccactcgctaccaccattctccaccaactaccggtccacatgggctctgtccaggctgcccagcatacaggagcccggaccggtcagcagcgcggcacagcgatcatatgcaggcgcatgggtggctctggattacccggatctcacgatgatacacgatccccacccagcttccagggcgccggccattgagggtccaggaggagccaaggcccaccagggcatcagccagcggtgtgtccttggccaaggcacattgggcaggccatccccaagcacacgcagcacacggcagcaccccaatgacagacaccagccccctggcacaacaggcaacccgcacctcgtgcaccttcctcttcaccgttggcgccacccagcagctcgcaagtgcaagcccctcgcgcagcaaccctgccagcaaaccttggcagggcatgggcagccagcccacccaatccccgggccacgcacaaatatgggccagcaccacacaacgggcaacccccaaggcacccaaccaccatcgggcaagccccacatacacctaacccacgcatcccatccgccggaccaccatgcaagggtgcctatccaaaagcaatcgttgccaggcgcaacataacttgagtaaggcaccaaaatagcccccccgccatcccggtagccttaggccagccatctagcaccacatagggcccccggtacccatctgggtcgggctccaatagccactattcagccagctccaaaagttccccagacagccaccccacaggcccggggccaacacggacgcaacaagacaaaccggctggggcagacccacggccacgaatcccacatgcgaggccccccacgggcccacacggacgcacgactggcccagaacaccacaccaccacataaggtaccagacaccggcccccaggccacagacacag

SEQ ID NO: 514284 - DNA, 264 bp, Homo sapiens
gtaggtgatctagaggatcccagcggccgcctttttttgggggggccaggatcgtggctacatctgcaatcccagcaactttgggaggtcgaggcaggcggatcatgaggtcaagcaatcgagaccatcctggccaacatggtgaaacctcatctctattaaaaatacaaaaattagctgagtgtggtagcacgcgcctgtagtcccagctacttgggaggctgaggaaggagaatcacttgaacccaggaggcagaggttgga

SEQ ID NO: 514285 - DNA, 520 bp, Homo sapiens
  misc_feature (429)..(429): n is a, c, g, or t
aaaactccttccgctctgtttctgtggtacagattttatccttcatcctaatagagaaatcatccctggatatgcccgtccagttcacaattcaatgtttggcattgtgtttcggataaaatttcattcagagcgtattcagtttgccagttatcacatatggcatggcagttggacaagatagggatatctatggttctgatagcatggaaagcgtatgctctatatcattgtcagcagtttcatatttgtttgtgtggcacatgaaatttctcagatcactaatgatcttgcacagattattattcctaaagataactcatctctcttgaaaaggttggcatgtatagctgcatttttttgtggactcctcatcttatcatccattcaagataaatcaaaacattaggttccaaaaattctaaaaanactaaactcttcaggctacctttgtgtgtctctagaagagaaaagcatctatctggagatataaatgtgtatgtaaatataaacgtttgtg

SEQ ID NO: 514286 - DNA, 696 bp, Homo sapiens
  misc_feature (453)..(453): n is a, c, g, or t
  misc_feature (518)..(518): n is a, c, g, or t
  misc_feature (549)..(549): n is a, c, g, or t
  misc_feature (596)..(596): n is a, c, g, or t
  misc_feature (643)..(643): n is a, c, g, or t
  misc_feature (654)..(654): n is a, c, g, or t
gccttggacacttgctgcccctttccagcccggattctgggatcctttcctctgagccaacaatctggggtcctgcctttcgacaccaccccaaaggcttccctacctttgcgtgccctggagtctgcccccaggggcccttgtctggccatggccaaaagggtcctgggcctggcagctggggctgtggccattctgctctatcttggattactccggtcggggacaggagcgaaagggcagaagctccctgcggtgtggccccccaagcacgcatcacaggtggcagcagtgcagtcgccggtcagtggccctggcaggtcagcatcacctatgaaggcgtacatgtgtgtggtggctctctcgtgtctgagcagtgggtgctgtcagctgctcactgcttcccagcgagcaccacaaggaagcctatgaggtcaagctgggggccaccanctagactcctactccgaggacgcaaggtcagcacctgaaggacatcatccccaccccagctactncaggagggctccagggcgacattgcactctncaactcagcagaccataccttctccgctacatcggccatctgctccntgcagcaacgctcttcccaacggctcactgactgtactggctggggnatgtggccctnagtgagctctgacgccaagcactgagactcgaggtgctctga

SEQ ID NO: 514287 - DNA, 1331 bp, Homo sapiens
gatgagttcgataatggggggtggatttgagcattggtgtgatgactcgcggctcgcgatggaatgcgtaagaatgggacatgtgatgtgtggaatgcggctggcttgaaaggtcgagtggatagtatgagccggcactagtttgaaatgtgcggcgccgtcctgatcgcggtgagagataggttcggttgaacacgtagtacgtagtggtatcgatggtttcgctacatggcacggcgttaggagacaacacacgcctgagagactacagttagtactgagtgagtgtgcgtgcagtgtcttccgtcgtagtctctggtacattttgtcacaaatggaaggcgatatgcgaatatgtcactggtttaacatctgttacgatctatactacgcaatggggaacgcaatcatgttgtaaaatgtcctgctcaggctatagatttccacataggggtatcttgggagttcttcggtaacactcctagacgcttgaatcgttaacccttgagaactatctgaaaagatgagtatacagggtctcattcattgacacgtatctagagcaggttcatgtaacactggttgtcgggggccgtccaccggtgctacgttcatcgttttgtctggcctatccaatgattgtttagaaatcctatattgcgtatgccctgaatggtggataatagacgagagcagaactctgacatctgtactctgtgtctgctagtccattaccgatctcgataccaccgctggtgtaatcagtggggtcccacctgctgaatggactcggtctggggaacgcacgagaggaatttcagactgggaattcaccatacttaggtgaaccacttcgttggttttcagctgccttggtgaaatttggagtactaggttccggatttgaaccccccttcccgtttcacactaaggacccggactactagccttaatggaaatagacttgaggacgggtaccgagtcatatttgtagtagccaatatgtcgaaaacggatggggaacaaaaatttcaatatcacaatcccacaaaacagaaccggagagaataaagaaagggggattcaccgccaaataacgaaatggaggatagaaaaggaccccggaaatccaatggagatcatatacccaggaaaacatagaggtacacgagggcaaaacaaataaagaggagggtaacagagatgagaaactacccatgggacagatggagccgaattatgaaccatgtccaaggcacccctgggagcaggccaaagacaccagacgtggatggaaatagactagaaatactttgaggaaggagaacacg

SEQ ID NO: 514288 - DNA, 307 bp, Homo sapiens
cgactggggagtacgtccgtgcacttcgtgacgtttggtggtgttgtcgtgggtgctggcactgagtccgctggactctagagacgtttcgcgagtagctgaaagagccacaagagtccctgtgggctgagggcacagacctgagagcgaccagggaggacctccgtgacgtctgtgagtcagtaggtaattccggaatgtgggaggctgaatccctctgaaatctgggcgtgatgagagaagagcagagacagacaggaagaatcccaagggacagggggtgaaaacattagaaagaatggggaag

SEQ ID NO: 514289 - DNA, 402 bp, Homo sapiens
ccagcttcccctcccccgaactctcaggccttcctacatctccccctactcctagtcaggttgacctgattgggagcgggcgcggggttccaaactttcctgggcagaataagccagggaaggaggctcgagtgcggagaggagccgacagcaccacagcgagcagaaagagagccccggcaaaactgaagggaaggaggtgcagggacgcatgaacgatgtggccagcgccgcgacgtcccgacggagggaaccgccccgggagaagcttagggtccgcgcccaaagaacaggagccccgggaggcgggcgcgctacggtcgcaaccgggctgactcctgcctctccccccggctcttctcgcttgaggagggttgggggggagatcgggtggccacccgc

SEQ ID NO: 514290 - DNA, 288 bp, Homo sapiens
ccaaggggagcttcaggcaccagggtgagaccctaattgtagagcccctccatctccagacaagaagtaatagtaggatgtgatctgtgcaagaggacattaccagcgggcgtctggttttggctgcacaaaggcgaggcccagcgatgcccccgctgtggagcccattacatgctggtgccccagcagctggcacactgagtaccggcactaaattactcaaaatgtgctgtaaagtttcttctggccagtaaagactagccattgaatggggtcggtctcccatga

SEQ ID NO: 514291 - DNA, 1264 bp, Homo sapiens
  misc_feature (73)..(73): n is a, c, g, or t
caaagtgctgggattacagacatgagccactgcaccaggcaatttttatatttttagtagagaaggggctttncttgttggccaggctgacctctggtgatcctccctcctcgccctcccaaagtgctgggattagaggtttgagccaccgcacctggcaaaactaactattttttttctattctgtaatatgtgtaaagtagcattaaatataatcaaaaactgtcctagttactattattgagaatgtaatgccttgaatatggtttttcagatatgttcttcttttcatccatcagagtctttgtttgtttttaaggtgatcacgaacaaaggtattggcagaagattttggttgatagacaggcaaaacttaatcagcctcgggaaaagaaaagaggcactgaaaagttaattgattcatttttgtttttttagactaaactttccttgaacgtttaatgccaaagtcagtactaggtagtcataaaatgatcgtagttttgctattacctaacaaaaatttactgagtatatactatgttttaggttgggagggaaaagtcatttctctagatttcaaaatgtatgaaattgaattatttttctcacaaggatacataattttaatttagattttttctttttaaccagtgatatactttaacagtcttgatatctggctgctatgtcttgtagtttggtgataaatgattatagaaagattatcttcatggtaaaaacacaatgtattcagaatgtagtttataaagataggaggctccatagataagatggagagactttatgcatagtgtttcctatagcaacgataagctttattcctctttctctaagatagtaggtaatacaaacaagcttaaataatttaaagcaagcccctctttcagtaattttatttttctgtcacttaaaatgatactggtctgatcagtagtggaatcacacctgggaatagccactgctttccagcttaggcaacatagcaagaccctgtctcttaaagttttaaaacaaattattatacatgtaaaggttagtacattttaaaagtgcctggaacaaagtagggtacataatacctaatattaactacagtcatcaaaatttagaaatgcatattataaaagtgtaagaaaaatgaaaaagatgaacttccttttttgttaggtgagcaagttaaaagtcctatttcctgtaatctaagcttgttgatttggggtcatatttatacaaaaaaaaa

SEQ ID NO: 514292 - DNA, 353 bp, Homo sapiens
ggtgttcagctaccgcgacgagctcgcgttcggcatcgtggtcgaccgcgagcagctcgacgccccgtggcccctgctcgacgcggtacgcagctccctggcggagctgacggcggcggtcagtaaaccaccagcggcgtgacgccgagttcgtccaacgtcagccggacatgttcccggagaacagctttggtgttctccgcgccgacctggtagcccacgacgccgatggtgaccttgccgttgtggcgcagggccgtcaccaccagcaggccgccgggctgctcgatgtcacgcttcatgacgttgtgctcgacaccccaacagatcacgtaatcagcctggtggacgcc

SEQ ID NO: 514293 - DNA, 502 bp, Homo sapiens
atatagacatggcttaggtgatagagcacatgcatagagatgagaattatctgtctcataccactgtggcccgttgtgataggaaaacagaatacttatcatgttcttatgagaaagtattatcggctgtcccctttatattttctggctcatctccccctcttgacatgaattcttggagagcatggatctgtacctttctgtatacatcacacattacttatgtgctcagagaatgtttcctaatgaatgttcaataggtatggagagattatgttcatgtaatcctgcatctcaaccctaaactcaattgctctataaagagcaatttctcctagaggcaattttcattactcacatttgataaaatctctatcattcattaggggatataatctacatagctttacttatggttaaaatggacccctatctggaactggatgaacacaggaaagaaacgtgttgcccaggcaacagagctgatttgttttgcctgtgg

SEQ ID NO: 514294 - DNA, 108 bp, Homo sapiens
  misc_feature (69)..(69): n is a, c, g, or t
  misc_feature (77)..(77): n is a, c, g, or t
gagactcatctatgatcacatttagaggggctatacattacaagctactattaggagctcttaatatcntgatattnataaaataaatgtgataaagacaaatggcag

SEQ ID NO: 514295 - DNA, 124 bp, Homo sapiens
agatagagatatcaaaagcggaagaaaaatgaagattaaagcatgccagtcacaggatcaagcacttgtatacagcaccctgatatgagtaactccatcttagaaaaagactccatcttacatt

SEQ ID NO: 514296 - DNA, 429 bp, Homo sapiens
ctagtcatagttttgtgtgtgtgtgtgtgtgtgtgtgtgtgtgttttgagtatccaatacattttaatttttgatttatttctctttagttaatcaccaaagctgaaaagattagactggcaaagactcaacaagcgagtaaacatataagattttctgaatatgattgaaaaaaaaaacagttcacctcttaatacttcacaagatacttgagctgttcttgggagattcacttttattatggtagcactgcataattaatgtgtttttaattaaaagaaatatctttgttcctcaacttgtaaataagacttttttctagagacaaatatgatgtataccacaatttttcttaaacattttatttgttgaaattatcttagatgtcagtgtcaggtgatttagtaaataaatgtgttttgaacatta

SEQ ID NO: 514297 - DNA, 770 bp, Homo sapiens
  misc_feature (599)..(599): n is a, c, g, or t
  misc_feature (610)..(610): n is a, c, g, or t
  misc_feature (699)..(699): n is a, c, g, or t
  misc_feature (710)..(710): n is a, c, g, or t
  misc_feature (760)..(760): n is a, c, g, or t
gaggcactgaaaagagctcatctttgactaggaagttcttaaattgagttggaacacaactcagttatgacgtcaggattgtcgttaacgcaatttgttaagtagctatggaagtagccagttgactcttgtcgtgaaatgaaacggaggttaacacagaaattaatcaccaaagctgaaaagattagactggcaaagactcaacaagcgagtaaacatataagattttctgaatatgattgaaaaaaaaaacagttcacctcttaatacttcacaagatacttgagctgttcttgggagattcacttttattatggtagcactgcataattaatgtgtttttaattaaaagaaatatctttgttcctcaacttgtaaataagacttttttctagagacaaatatgatgtataccacaatttttcttaaacattttatttgttgaaattatcttagatgtcagtgtcaggtgatttagtaaataaatgtgttttgaacattatttggaaatgtgttgattttgtttttatactgtaaaacaaaacataattgcaaaaatactacatgaatatatataaagtttagagaaatgtttaacnctaaactctcnctgtacttagtttgtaacttgcaataccttcaataccttttcatgttgatttatacagacatgtttaatagttcattctattcattccnctttgcctatntgagcttccattgaacaatagaccatagggattggttctaattaaaatgntaaattttta

SEQ ID NO: 514298 - DNA, 431 bp, Homo sapiens
ggccgtattgagaggcacacgtgtgtgcgtgtgcatgagtgcatgtgtgtgcaagtgtgaacaagtgcattgtgtgcatgaatgtgtgcaagtgtgtgagcaagtgcatgtgagtgcacgaatgagttcgtgtgtgagcaagtgcgtgtgtgcaccagtgtgagtgcatgactgagtgtgcaagtgtaagtgtgcgtgagtgcgtgcgtgtgcttgagtgtgtgtgccagtgagtgtgaactagtgtgtgcgtgtgcatgagtgcatgtgtgtgcaagtgtgaacaagtgcattgtgtgcatgagtgtgtgcaagtgtgtgagcaagtgcatgtgagtgcacgaatgagttcgtgtgtgagcaagtgcgtgtgtgcaccagtgtgagtgcatgactgagtgtgcaagtagtggcgtggtgcgtgtgcactg

SEQ ID NO: 514299 - DNA, 183 bp, Homo sapiens
taatacctttctgtcttagagacagggtttcaccatgttggccaggctggtctcaaactcccgaacccaggggatccgcccgcctcggacccccaaagcgccgggaccacagatgtgagccatcacgcccagcccggaaaagaaattgtttaacctaagtatagttcatgcaatactaaatta

SEQ ID NO: 514300 - DNA, 901 bp, Homo sapiens
  misc_feature (80)..(80): n is a, c, g, or t
aaggatactggagatctaaaagatagctctctcttgaaaccatataggtaacataagaaacaacataaagagagacatanaatgggagaagaagttatccattaagagtgctatcaaagagcgaatggatggatttgaaaaaagagtatttagcgctacaaaaagctagcatggcttctttaaaaaaaacaatatcccaaataaaatcagagtcagaaatggaaacagacagtggagtacctcaaaacactggaatgaaaaatgaaaaaagtaaagatcactgatagtttgacaacattataatgtacttatatatgtaaatgctatctctgagtggttataagataaattttaattttaaaaaactgtgattattctatttcattattagaacaattcttgattgttaagttatccagatgtgttacttactctgtgatataagaatatttaaaaggctcatttaaagcaattttttaaataacctgagttttctctacagttttcatcaagcacatgagtgcagagttgggagactgagcaagttgtaggaatgaagattgtagtttctcacctgttaatttcactctgtagtatgcaccaaagcaggaacagttaaagcagaattcctatgaattcaaaattaggatacattttaaattctcatttctgtaaaaataaatgtcacgtttgatatatgttttaaacacagtatcttaacttttttaacttatgagtaaaattatggtctgtcagggagggaattaaggtagaaggcttagcgaaatggtgatataaatttgggtataggttgaaagaggaaaaacttggtttaaacggtttttaaaaaaaaaaatgggggggcaaaaaaaaggggagaaaggtgagaaagggtaaagag

SEQ ID NO: 514301 - DNA, 984 bp, Homo sapiens
  misc_feature (80)..(80): n is a, c, g, or t
aaggatactggagatctaaaagatagctctctcttgaaaccatataggtaacataagaaacaacataaagagagacatanaatgggagaagaagttatccattaagagtgctatcaaagagcgaatggatggatttgaaaaaagagtatttagcgctacaaaaagctagcatggcttctttaaaaaaaacaatatcccaaataaaatcagagtcagaaatggaaacagacagtggagtacctcaaaacactggaatgaaaaatgaaaaaacagccaacagggaagagtgtcgcacccaggagaaagttaatgcaacaggaccacagttcgtgagtggagtgattgtgaagatcattagcacagagcctctacctggcaggaaacaagtccgggatactttggcagcaatctcagaagttctttatgttgatttgctagaaggggatacagaatgccatgctagatttaaaactcctgaggatgctcaagcagtaataaatgcctatacagaaattaacaagaaacactgctggaaactcgagatcctttctggtgatcacgaacaaaggtattggcagaagattttggttgatagacaggcaaaacttaatcagcctcgggaaaagaaaagaggcactgaaaagttaatcaccaaagctgaaaagattagactggcaaagactcaacaagcgagtaaacatataagattttctgaatatgattgaaaaaaaaaacagttcacctcttaatacttcacaagatacttgagctgttcttgggagattcacttttattatggtagcactgcataattaatgtgtttttaattaaaagaaatatctttgttcctcaacttgtaaataagacttttttctagagacaaatatgatgtataccacaatttttcttaaacattttatttgttgaaattatcttagatgtcagtgtcaggtgatttagtaaataaatgtgttttgaacatta

SEQ ID NO: 514302 - DNA, 507 bp, Homo sapiens
  misc_feature (57)..(57): n is a, c, g, or t
ttttcaagagaatatcactttaccctcagctcaaaagactagttaaaacatggggtncacttttaataggcagtccatactgccaattaaagttgcacttgttatttcaaacccactgcttcccaaaatctttcagaagcttagctgaaatactatgtagtattgcctggaggatgtccagcttgtttctttctctaaatgttctaaagtaggttaacctagaggagcaaaagctgtcaatgtatctagtctaaatggtattcactccctgtagggtagcttttactgaatggctctttgtttcgtgatgcctgccatctgtactaaggaaggaacaataagaaacagccctctgaaacatatttctcttgaaaggatgttgttgatgacactgttaattgcctttgcattttctttatgaaatctttgaagaaatttcattgtaatcttgttaataattcagtaacaataaatgataattatgcttcctttgaggaattaattaaa

SEQ ID NO: 514303 - DNA, 373 bp, Homo sapiens
ggaaaagtcaacatctaactagtggaggaaaagtgccctgaatacatttaggaatctccctcactctataggttggcccaggttggaaagggtaaagggagggagggggtcggctttttatgggactttccattgagaagaaagggaaaggaaattattttcagggtaaggcttctcagggccttggccctttttttgggattttggatgagaaatttggaaggtactaacctactttctagcatatctttaagaaaattgattgttatttactccagatcctcttccagaccagagttatcaggacatagctctgtgattcatgagtgtcccatactgatgaattggagcatccatatggaaagcaaaggca

SEQ ID NO: 514304 - DNA, 751 bp, Homo sapiens
  misc_feature (73)..(73): n is a, c, g, or t
caaagtgctgggattacagacatgagccactgcaccaggcaatttttatatttttagtagagaaggggctttncttgttggccaggctgacctctggtgatcctccctcctcgccctcccaaagtgctgggattagaggtttgagccaccgcacctggcaaaactaactattttttttctattctgtaatatgtgtaaagtagcattaaatataatcaaaaactgtcctagttactattattgagaatgtaatgccttgaatatggtttttcagatatgttcttcttttcatccatcagagtctttgtttgtttttaaggtgatcacgaacaaaggtattggcagaagattttggttgatagacaggcaaaacttaatcagcctcgggaaaagaaaagaggcactgaaaagttaatcaccaaagctgaaaagattagactggcaaagactcaacaagcgagtaaacatataagattttctgaatatgattgaaaaaaaaaacagttcacctcttaatacttcacaagatacttgagctgttcttgggagattcacttttattatggtagcactgcataattaatgtgtttttaattaaaagaaatatctttgttcctcaacttgtaaataagacttttttctagagacaaatatgatgtataccacaatttttcttaaacattttatttgttgaaattatcttagatgtcagtgtcaggtgatttagtaaataaatgtgttttgaacatta

SEQ ID NO: 514305 - DNA, 1252 bp, Homo sapiens
  misc_feature (80)..(80): n is a, c, g, or t
  misc_feature (1081)..(1081): n is a, c, g, or t
  misc_feature (1092)..(1092): n is a, c, g, or t
  misc_feature (1181)..(1181): n is a, c, g, or t
  misc_feature (1192)..(1192): n is a, c, g, or t
  misc_feature (1242)..(1242): n is a, c, g, or t
aaggatactggagatctaaaagatagctctctcttgaaaccatataggtaacataagaaacaacataaagagagacatanaatgggagaagaagttatccattaagagtgctatcaaagagcgaatggatggatttgaaaaaagagtatttagcgctacaaaaagctagcatggcttctttaaaaaaaacaatatcccaaataaaatcagagtcagaaatggaaacagacagtggagtacctcaaaacactggaatgaaaaatgaaaaaacagccaacagggaagagtgtcgcacccaggagaaagttaatgcaacaggaccacagttcgtgagtggagtgattgtgaagatcattagcacagagcctctacctggcaggaaacaagtccgggatactttggcagcaatctcagaagttctttatgttgatttgctagaaggggatacagaatgccatgctagatttaaaactcctgaggatgctcaagcagtaataaatgcctatacagaaattaacaagaaacactgctggaaactcgagatcctttctggtgatcacgaacaaaggtattggcagaagattttggttgatagacaggcaaaacttaatcagcctcgggaaaagaaaagaggcactgaaaagttaatcaccaaagctgaaaagattagactggcaaagactcaacaagcgagtaaacatataagattttctgaatatgattgaaaaaaaaaacagttcacctcttaatacttcacaagatacttgagctgttcttgggagattcacttttattatggtagcactgcataattaatgtgtttttaattaaaagaaatatctttgttcctcaacttgtaaataagacttttttctagagacaaatatgatgtataccacaatttttcttaaacattttatttgttgaaattatcttagatgtcagtgtcaggtgatttagtaaataaatgtgttttgaacattatttggaaatgtgttgattttgtttttatactgtaaaacaaaacataattgcaaaaatactacatgaatatatataaagtttagagaaatgtttaacnctaaactctcnctgtacttagtttgtaacttgcaataccttcaataccttttcatgttgatttatacagacatgtttaatagttcattctattcattccnctttgcctatntgagcttccattgaacaatagaccatagggattggttctaattaaaatgntaaattttta

SEQ ID NO: 514306 - DNA, 204 bp, Homo sapiens
agcggagaagccttcaggcagtctcaagtcagccccaagccactgtctctccacatcgcgcaggtcccgtggaagatccaccacgagcttgggcccaggctcacgcccaaactccagagcgcgcagcggggaccgcgagtcatccacggggccgtgaccttgtgtgcgcggatagcgcacctccctgtacgtggagcgagaatg

SEQ ID NO: 514307 - DNA, 211 bp, Homo sapiens
ctaatcatggtgggacacccctggaagagggaccatgggcatgccccctccgtgaatgcggctcctccccctgtgtatgctgagggcccctcccccgggaatgcgcccaccaatggccctagactcatcttggcctcctcagctccctgcctgtttcccgtaaggctgtacatagtccttttatctccttgtggcctattagaactggctt

SEQ ID NO: 514308 - DNA, 1497 bp, Homo sapiens
  misc_feature (80)..(80): n is a, c, g, or t
aaggatactggagatctaaaagatagctctctcttgaaaccatataggtaacataagaaacaacataaagagagacatanaatgggagaagaagttatccattaagagtgctatcaaagagcgaatggatggatttgaaaaaagagtatttagcgctacaaaaagctagcatggcttctttaaaaaaaacaatatcccaaataaaatcagagtcagaaatggaaacagacagtggagtacctcaaaacactggaatgaaaaatgaaaaaacagccaacagggaagagtgtcgcacccaggagaaagttaatgcaacaggaccacagttcgtgagtggagtgattgtgaagatcattagcacagagcctctacctggcaggaaacaagtccgggatactttggcagcaatctcagaagttctttatgttgatttgctagaaggggatacagaatgccatgctagatttaaaactcctgaggatgctcaagcagtaataaatgcctatacagaaattaacaagaaacactgctggaaactcgagatcctttctggtgatcacgaacaaaggtattggcagaagattttggttgatagacaggcaaaacttaatcagcctcgggaaaagaaaagaggcactgaaaagttaattgattcatttttgtttttttagactaaactttccttgaacgtttaatgccaaagtcagtactaggtagtcataaaatgatcgtagttttgctattacctaacaaaaatttactgagtatatactatgttttaggttgggagggaaaagtcatttctctagatttcaaaatgtatgaaattgaattatttttctcacaaggatacataattttaatttagattttttctttttaaccagtgatatactttaacagtcttgatatctggctgctatgtcttgtagtttggtgataaatgattatagaaagattatcttcatggtaaaaacacaatgtattcagaatgtagtttataaagataggaggctccatagataagatggagagactttatgcatagtgtttcctatagcaacgataagctttattcctctttctctaagatagtaggtaatacaaacaagcttaaataatttaaagcaagcccctctttcagtaattttatttttctgtcacttaaaatgatactggtctgatcagtagtggaatcacacctgggaatagccactgctttccagcttaggcaacatagcaagaccctgtctcttaaagttttaaaacaaattattatacatgtaaaggttagtacattttaaaagtgcctggaacaaagtagggtacataatacctaatattaactacagtcatcaaaatttagaaatgcatattataaaagtgtaagaaaaatgaaaaagatgaacttccttttttgttaggtgagcaagttaaaagtcctatttcctgtaatctaagcttgttgatttggggtcatatttatacaaaaaaaaa

SEQ ID NO: 514309 - DNA, 346 bp, Homo sapiens
gtacagacgtaagttctaaagtccttaggaccaagaatgccctcctaggttacagacccaacagaaatgcacatttgtggctgggtgcggtggctcatgcctgtaatcccagcactttgggaggccaaggtgggcggatcacgaggtcaggagatcgagaccatggtgaaaccccgtctctactaaaaatacaaaaaattagccaggtgcggtggcgggcgcatgtggtcccagctacttgggaggctgaggcgggaaaatggcgtgggccgggaggtggagcttgcagtgagctgagatcacgccactacactccagcctgggcaacagagcgagactccatctc

SEQ ID NO: 514310 - DNA, 502 bp, Homo sapiens
gaggcactgaaaagagctcatctttgactaggaagttcttaaattgagttggaacacaactcagttatgacgtcaggattgtcgttaacgcaatttgttaagtagctatggaagtagccagttgactcttgtcgtgaaatgaaacggaggttaacacagaaattaatcaccaaagctgaaaagattagactggcaaagactcaacaagcgagtaaacatataagattttctgaatatgattgaaaaaaaaaacagttcacctcttaatacttcacaagatacttgagctgttcttgggagattcacttttattatggtagcactgcataattaatgtgtttttaattaaaagaaatatctttgttcctcaacttgtaaataagacttttttctagagacaaatatgatgtataccacaatttttcttaaacattttatttgttgaaattatcttagatgtcagtgtcaggtgatttagtaaataaatgtgttttgaacatta

SEQ ID NO: 514311 - DNA, 146 bp, Homo sapiens
tgactctagaagatcctgaccctgtgaatcccaccaggctgctggagaacagctcacagcacagtgtcctcccagcaggtgatgagtcttggggtgctggtccggtaatgcttcagtgagtgaccggcagaaaaagggaggctctg

SEQ ID NO: 514312 - DNA, 577 bp, Homo sapiens
ttatgatatatatcagcacggagctggcttatttctacacaacatccagtgagagctttgtgcgtgttgaccctaacatatccgtgcagcgcgctgctcacaggtttcatcattattaacgcaggctccatcgtaacaccatttctgcgctgctgaatgtttatatttagcagctatatcctctatcgtctttggcagcgctcgtcgtggcctgaggttatcttcacaaggaacctcatcttcttggcagtcgtcagcatttgcattagtgagaacgataagtccagctaggtggaactcattgaaattgttcagggcaccacgtgcgcaggctcctccttgagctcgatatacagcactgtcctttggtgctaatgccgcacagaattccattccggttgccatattaagacacacagtgtggcgtgaataatacgcatctgcatcaggagccagatcaacctggagctggtggccacatttttctcaaatatctacctagactgtttcagacactagttcttctgtctgttctcctgtggcgatataatagaccacaagtcgggatgaaggtacc

SEQ ID NO: 514313 - DNA, 511 bp, Homo sapiens
tctgctgtactgatgcggcccctgtgtaacgcacatattggtgatagacttggaaggacctgaacggttcgagaaggcatgcacccctcatgccgagtgcccagtctgggaatggcgtatgaacattactctcagaagaaactgcaagggtgcagagcaatagagcctgcccagggccagctgggatccatagcctcgagcaggatgggtggaagcagaccctccctctattcacgcccagcacagcacagagtgcctgggctcccagtcccagcactgcatctcagccccaagctggtccagtccttcctccctgctggccttgtaggaaatcagccctcaggaggaagcttctggtgacagtcagttgaatgttgaacagaggcagagggaaggagctggatctcagaacagacacatgcacctgcaggcaaaccaccttcacttccagggcaggtacaggctcttcaaagagaggtcaggagcctcctgtgaaacgtcccatgggatg

SEQ ID NO: 514314 - DNA, 213 bp, Homo sapiens
aagagcaccgtatagatacagatgtgccgaaggaaacccagagtgcccagctgtctggaatgaagtgacagaggtagaaaacagtatgaccctcacaggaggtcacctatcgctacgcagggagtgggaaggcttctattccagggaatttgtcgtctccgatactagaaggttctagcgtcctagtttatgtcaattgccctacagacacgg

SEQ ID NO: 514315 - DNA, 162 bp, Homo sapiens
cccaggtagaactaacccgtagggtaatatgcttatacccacttttgtaactggtggggggaggcaagcttagagatcatttcacttgccttaggctggtgcttctcaagtactgtggactcttgttaaaatggcgattttgattcagttaggtctacctgg

SEQ ID NO: 514316 - DNA, 181 bp, Homo sapiens
actttagtcatggccgtggtttatgattcttttgatgattggtggtgtcttttacgcctcaatcaacgccctaggttggttataatcaccactaaaaaaagcagctcacgcttttttttaatgtcatctgttattcacctcctaccaaatatgggtatagtggttgttgcccccatgaatt

SEQ ID NO: 514317 - DNA, 172 bp, Homo sapiens
  misc_feature (80)..(80): n is a, c, g, or t
gttctggcaggtaaggaacgccggctcttcggcctctcagcgcggcttgttccttgtttccggacggccggcttcttaanccttgcggcttccttgggtcggctgcttgaatcccggaacggcttccaccggcttggcaaggacccatggccgaacgccggggacttggact

SEQ ID NO: 514318 - DNA, 401 bp, Homo sapiens
tagcggaccattatcccaacacttcatacttaatggtgaagtattaaatcctgtcccttaatcaagagcaaggaaaagatgtccatcctaaccacttctattcaacatggtaccagaggtccaggccctagccagtgcaataaaacaagaaaggaacaagaaataaaaggcataaagattaaaaagcaaaactactgttattcacatatggtatgattatgtatgtagaaaattgatagaatttacaataaaaaagtcacgtgcagtggctcatgcctgtaatcccagcactttaggaggccgaggtgggaggatcgcttgagcccaggagttcaaggctgcagtgagctatgatcacaacactacactctagcctggacaacagagtgagaccttatctc

SEQ ID NO: 514319 - DNA, 172 bp, Homo sapiens
ccagaggcaccaagcaggtcagatgaacacagccctaagtggctgtcctccccaccagtcaatatagtcttaaccaccttctctcctgagtctgctgctcacctggaccttggctgtccttcggtcactctgcatgtcaggctgactgtcccttcctccttggagcctctgg

SEQ ID NO: 514320 - DNA, 634 bp, Homo sapiens
cgcagtgactcacacctgtaatcccagcactttgggaggctgaggtgggcggatcacaatgtcaagagatcgagaccatcctggctgacaaagtgaaaccctgtctctactaaaaatacaaaaaaattagccgggtgtggtggcgggcgcctgtagtcccagctactcgggaggctgaggcaggagaatggcgtgaacccgggaggcggagcttgcagagagccgagatcacccactgaactccagcctgggcgacagagtgagactccatctcaaaaaaaaaggaaactgggaagatgtatttcaaactgtgacttcagaatcgtgtagtggctcatcactaaatgggaagccttattaaatagaaatactggctggtatttaaaatgtctatagtatatatattggggcaaattttacagtcatagaatagacacagaagaatattaggttaatcagacatgatttagggagatcaaaatatacaaataatcgtgaaaatttagtgaaaggttctaaatatactatccataccaagcacatcaatatatttgagaaaatactgtttggaccaagctggtgaaataagaattggtgtctagagagcactaatgtgtacttatgtcaacttatc

SEQ ID NO: 514321 - DNA, 724 bp, Homo sapiens
tggtgggaaatggggtctcatgacgttgcccaggcgggtctcaaacagctggctcaaacaatcctcccatctgggcctcttaaagcacggggattacatgagtgaggcaccacaccgggccaagaaatttccctttaaagccttattgaaggtggatgagcctttcatttcatgtggtggaaggattctgggtggctgcaggagtggcctgaaagtgagagagcaaggtgatctcctttatagcagcacaagtggtttccccttttatactccagctctgaagctgagtgggggtgaacactcgtggagtgtggcagaagtttaaggcgttggaaaggaggagctaacactcggaggagaaaacttcagcaaggacttgtggctgtgaaaagtggtgtggggattggtccatctcgtttattatacctcagcagaataccacagggagtgtgcctcgctgtggtgttgcttgggcactgggggtcaaggaactgagtatgcacacaaagaaaagagaacacatacagtccttgctctgtgccactcacagttggtgcacaggtccggaaaggaagaggagggcctccaaggtgtgctcaaggttccacggggacagtggtgtcctccccaaaccaatgaccacttagtgcggggtgcagcatgcacgtggcctcaacagcattttactgacagagccgtctgcagcccaggacgaaagggctga

SEQ ID NO: 514322 - DNA, 359 bp, Homo sapiens
aaagaggagggtactcccaaaggagtgtgcataacataaggaaaaaaatgtagaatcagtcactactggaactgcacaaacggccactgacaaaaatgacccccataagtgtgactatcattgagacacataacctgaatgagcaggtgaaagccatcaaagaatagggtgaccacgtgaccaacttgcgcaagatgggagcgcccgaatactaggctaggcggaatatactactattgacaagcacaccctgggagacagtgataatagaaagctaagcctacgggctaatttccccataagccgtggggtagactaccctggtcaccaagggagaacaccatcctactatcagggta

SEQ ID NO: 514323 - DNA, 253 bp, Homo sapiens
tctacctcgcgggtgcctctacctcgcgggtgccttctacctcgcgggtgcctctacgcgggtgcctaagttaagaaattcttgtggttggccaggcgtggtggctcacgcctgtaatcccagcactttgggaggccaaggcagatggatcatgaggtcaggagatcaagaccatcctggccaacacagtgaaaccccgtctccagtaaaaacacaaaaaattagccaggcgtggtggcaggcacccgcgagg

SEQ ID NO: 514324 - DNA, 1257 bp, Homo sapiens
  misc_feature (628)..(628): n is a, c, g, or t
  misc_feature (706)..(709): n is a, c, g, or t
  misc_feature (711)..(711): n is a, c, g, or t
  misc_feature (714)..(714): n is a, c, g, or t
  misc_feature (721)..(721): n is a, c, g, or t
  misc_feature (734)..(734): n is a, c, g, or t
  misc_feature (736)..(737): n is a, c, g, or t
  misc_feature (762)..(762): n is a, c, g, or t
  misc_feature (766)..(766): n is a, c, g, or t
  misc_feature (773)..(774): n is a, c, g, or t
  misc_feature (840)..(840): n is a, c, g, or t
  misc_feature (884)..(884): n is a, c, g, or t
  misc_feature (888)..(888): n is a, c, g, or t
  misc_feature (891)..(891): n is a, c, g, or t
  misc_feature (1018)..(1018): n is a, c, g, or t
  misc_feature (1073)..(1073): n is a, c, g, or t
  misc_feature (1116)..(1116): n is a, c, g, or t
  misc_feature (1118)..(1118): n is a, c, g, or t
  misc_feature (1125)..(1126): n is a, c, g, or t
  misc_feature (1233)..(1233): n is a, c, g, or t
gggctgcatgaatggcacatataggtcaccaaagttcattcacagtgtagaaaaagctgctgcttatctttctccatctaagaaacggaaaggagatcgtttctttagtctcatttacagaagcagcgtacgtattgaaattgaaattgatcgcctgtatattgcttgaccttacaggagattatgcttccagatagatgagtgggcagaaattactttacctgtccgttatagttgggcattagcgtattggcaaaacaatcctcgactagaatccacgatgaagcaggcatgggcaggcagaagacatatcctaaatggaattacgtaaacatcgcaggaaggcagcaaggcagaaactcattcgaaagagtccacaacaggtgttctgtgaacccttcaagtatttatttgaacagacgcaaataacttgacaaagggcaatacatattcaattgttcatgtagtaacattcatgtcacttgttgaatttggttctcatatgtatattgcatacacataaattcaaactataagtcgtcatttttgagccatcatcttacattcatgtaatgaaattatggaagagagtaaaaactagctcttaacttagtaaatataatatggnatttaaaatcaggtcactacagtaaggttctaagtattgccaattgaaaagctagaaatggtattactgttgcaaagnnnngncantaattgnctccaatagcatngnnaatacttgtatcccacaactatttnaaanccaagcnntaaaagggattttctaattcacttcaatcttatttctcttactatctatgtcttggtacataaganaagtgtttccatcactgcattggtagaattatttcagtgttatngttnccncgattccggatgtctacacaaaaatgaattagtttaatttatattgtgatacagttgtttgagaaatatttttaattctgtttcaactttatttctccaagtgtataatataaaaattacttctgtnattgttctctaccaataggggaaaaaattaagacattagatccattgagaaaganatgatgtaataaataattaagattagtaataatattatctggngngattatnnccagttgaataatctctttcccttgaattatttagctaacaaattaactctcccaatatttaaaatatgtaaatcatatttactgccattattaactaaatattttnttgacttgagcacaactggtatac

SEQ ID NO: 514325 - DNA, 147 bp, Homo sapiens
  misc_feature (44)..(44): n is a, c, g, or t
gggatgtgctgatctgtagtactataccaggaagaaacctcttntgttctctttagacatcttctacttgctctggcttgagatcgtgtaacaaaatgaaggagggctctctgtctttcttcctcatcctactcaaaaacttcccga

SEQ ID NO: 514326 - DNA, 202 bp, Homo sapiens
ctaacagtgcggagggatgaagatcatcttctataactcttcaggctgaatagaggtgatgatattcctgcctgactattagggtctcttacattcagagtagagaggagcagagtcagaaagcatcagtatggtaaggtccattcttaaactcttattcatcttccagataccaccctctgtcgaaactcaagagttatga

SEQ ID NO: 514327 - DNA, 98 bp, Homo sapiens
acggccgtgtattactgtgcgagacatctccatacggtgactactttcaattggtacttcgatctctggggccgtggcaccctggtcactgtctcctc

SEQ ID NO: 514328 - DNA, 120 bp, Homo sapiens
  misc_feature (109)..(109): n is a, c, g, or t
cattgctatccagaaaggatgcagctgttagttacagatgtcaaacatctttaaagcattattattaaggggggaggaaaaaaaccctataaaatgaacacatccatantgccccttccc

SEQ ID NO: 514329 - DNA, 106 bp, Homo sapiens
tgatcagctcgccgcgttgccggggagcctgagctggcactgaagctggggctgcagcctgggcttggtttgatccttgtgcttggccttggccttggcctttggc

SEQ ID NO: 514330 - DNA, 737 bp, Homo sapiens
  misc_feature (24)..(24): n is a, c, g, or t
  misc_feature (42)..(42): n is a, c, g, or t
  misc_feature (84)..(84): n is a, c, g, or t
  misc_feature (90)..(90): n is a, c, g, or t
  misc_feature (93)..(94): n is a, c, g, or t
  misc_feature (105)..(105): n is a, c, g, or t
  misc_feature (145)..(145): n is a, c, g, or t
  misc_feature (158)..(158): n is a, c, g, or t
  misc_feature (160)..(161): n is a, c, g, or t
  misc_feature (164)..(164): n is a, c, g, or t
  misc_feature (173)..(173): n is a, c, g, or t
  misc_feature (175)..(178): n is a, c, g, or t
  misc_feature (185)..(185): n is a, c, g, or t
  misc_feature (193)..(194): n is a, c, g, or t
  misc_feature (200)..(200): n is a, c, g, or t
  misc_feature (202)..(202): n is a, c, g, or t
  misc_feature (204)..(204): n is a, c, g, or t
  misc_feature (207)..(212): n is a, c, g, or t
  misc_feature (214)..(214): n is a, c, g, or t
  misc_feature (216)..(216): n is a, c, g, or t
  misc_feature (220)..(220): n is a, c, g, or t
  misc_feature (222)..(223): n is a, c, g, or t
  misc_feature (226)..(226): n is a, c, g, or t
  misc_feature (228)..(229): n is a, c, g, or t
  misc_feature (232)..(232): n is a, c, g, or t
  misc_feature (234)..(234): n is a, c, g, or t
  misc_feature (237)..(238): n is a, c, g, or t
  misc_feature (243)..(243): n is a, c, g, or t
  misc_feature (245)..(245): n is a, c, g, or t
  misc_feature (248)..(249): n is a, c, g, or t
  misc_feature (251)..(255): n is a, c, g, or t
  misc_feature (261)..(265): n is a, c, g, or t
  misc_feature (267)..(269): n is a, c, g, or t
  misc_feature (271)..(271): n is a, c, g, or t
  misc_feature (274)..(274): n is a, c, g, or t
  misc_feature (278)..(278): n is a, c, g, or t
  misc_feature (280)..(280): n is a, c, g, or t
  misc_feature (282)..(284): n is a, c, g, or t
  misc_feature (287)..(287): n is a, c, g, or t
  misc_feature (294)..(294): n is a, c, g, or t
  misc_feature (305)..(305): n is a, c, g, or t
  misc_feature (307)..(309): n is a, c, g, or t
  misc_feature (314)..(315): n is a, c, g, or t
  misc_feature (324)..(324): n is a, c, g, or t
  misc_feature (339)..(339): n is a, c, g, or t
  misc_feature (355)..(355): n is a, c, g, or t
  misc_feature (357)..(357): n is a, c, g, or t
  misc_feature (359)..(362): n is a, c, g, or t
  misc_feature (366)..(366): n is a, c, g, or t
  misc_feature (368)..(369): n is a, c, g, or t
  misc_feature (375)..(375): n is a, c, g, or t
  misc_feature (377)..(377): n is a, c, g, or t
  misc_feature (379)..(379): n is a, c, g, or t
  misc_feature (381)..(381): n is a, c, g, or t
  misc_feature (383)..(383): n is a, c, g, or t
  misc_feature (386)..(386): n is a, c, g, or t
  misc_feature (389)..(390): n is a, c, g, or t
  misc_feature (392)..(393): n is a, c, g, or t
  misc_feature (397)..(398): n is a, c, g, or t
  misc_feature (402)..(402): n is a, c, g, or t
  misc_feature (405)..(406): n is a, c, g, or t
  misc_feature (409)..(409): n is a, c, g, or t
  misc_feature (415)..(416): n is a, c, g, or t
  misc_feature (418)..(418): n is a, c, g, or t
  misc_feature (421)..(421): n is a, c, g, or t
  misc_feature (426)..(426): n is a, c, g, or t
  misc_feature (433)..(435): n is a, c, g, or t
  misc_feature (445)..(445): n is a, c, g, or t
  misc_feature (447)..(449): n is a, c, g, or t
  misc_feature (454)..(454): n is a, c, g, or t
  misc_feature (457)..(457): n is a, c, g, or t
  misc_feature (460)..(461): n is a, c, g, or t
  misc_feature (465)..(465): n is a, c, g, or t
  misc_feature (470)..(470): n is a, c, g, or t
  misc_feature (472)..(472): n is a, c, g, or t
  misc_feature (474)..(474): n is a, c, g, or t
  misc_feature (491)..(492): n is a, c, g, or t
  misc_feature (500)..(500): n is a, c, g, or t
  misc_feature (502)..(502): n is a, c, g, or t
  misc_feature (504)..(506): n is a, c, g, or t
  misc_feature (508)..(508): n is a, c, g, or t
  misc_feature (524)..(524): n is a, c, g, or t
  misc_feature (574)..(574): n is a, c, g, or t
  misc_feature (585)..(586): n is a, c, g, or t
  misc_feature (588)..(588): n is a, c, g, or t
  misc_feature (595)..(595): n is a, c, g, or t
  misc_feature (603)..(603): n is a, c, g, or t
  misc_feature (621)..(621): n is a, c, g, or t
  misc_feature (623)..(623): n is a, c, g, or t
  misc_feature (627)..(627): n is a, c, g, or t
  misc_feature (629)..(629): n is a, c, g, or t
  misc_feature (633)..(633): n is a, c, g, or t
  misc_feature (646)..(646): n is a, c, g, or t
  misc_feature (665)..(665): n is a, c, g, or t
  misc_feature (689)..(689): n is a, c, g, or t
aggctgctgcggacggcctgaggntggaccccaagccctggncctgccgagcgtggcactgaggcagcggctgacgctactgtnaggganagnnggttgtgagcngccccgccggacccctggccagccctggccccagcctctnccggtgccctctntnnagncagagccantnnnncccagtnaggcaggnntgcttngnancannnnnntncnactnanngancnntcncnagnncatgnanagnntnnnnngctgannnnnannntnaancatntnannngcngccccgnagccaagccgnannnaagannctttcatanattctattcacaaanaataaccaccattttncnannnncatnannccactntncntnanatnctnntnnctcnnactnctnnctnccatgnnanctnttgcnggccagnnngacggttttnannncactnagnagnnctcnccaanananttcatttacctcaacanntacaagcngncnnncnagtcccaggacaagtncacctacaccttcattgtgccccagcagcgggtcacgggtgccatctgcntcaactccaannancctgatntgcttctngagaaccgagtgcataancnggancnaganctgctcaacaatnagctgctcaagcagaagcngcagatcgagacgctgcagcagcnggtggaggtggacggcggcattgtgagcgaggtgaagctgctgcgcaa

SEQ ID NO: 514331 - DNA, 321 bp, Homo sapiens
cctgtggtagcacaacctaggtcagttttgcagtgtgtaaagccatttaccaagatagttgtaggtaaagaagggcagatttattagagaaattgtgaaaatatgttgcagtgggcagctcagcagagaaggggctacctgcaaagaggcaagggctggaggaaagttttatagggtcctgctgaagggcgctacgtgtggaatgaggtcattgtgcccgcaggttgtttgtgattagctgtctctaacaattgttcatacaataattgttcattattgttctcaacttggggctctccccaacctggggacccttcctta

SEQ ID NO: 514332 - DNA, 137 bp, Homo sapiens
ctccgccagcccgcatatcagctttcaaaaatctcattcaatcatccagatttagtctggggaaagttatttttaaaagttattttgtaaaatttgtaaattaacaattcattaggacggtcaactggtctggagta

SEQ ID NO: 514333 - DNA, 442 bp, Homo sapiens
agcatagcccagtgtctggcagggagacagacctaatagctggtgaccctggacatgtcagttcatttctctgaatcttagtttttccttctgacgagagagatgggcataagaactcaataccagatctctagtgttaataattaaggagctaattcatgttaagtgcttggcatggaaccaggctcatataaagcacttaatattccttgctgttattaccacatataccactcctcttaaaccaggttgcaaataagacataggaagatatggtctgactgtggctgtcacccatgcccatgacttgtgataataatagtgggcacttacatagaccttatggtgttccatcactttgtatttattgaattatttaatcctgccgaaccctatacgtaactatgagataggttctgtttttatccccattttatgcatg

SEQ ID NO: 514334 - DNA, 1919 bp, Homo sapiens
gagacccgacatcctgcgccgccccttccgaggctaaatcggctgcgattccatcatcggaacgcgccggcagaacggggtcctgagtgacgacgtcccgcgcttcctctcccttgcaatccaactcgccaggcacacgcccgccacctcctgcacagccgccacccatgccacacccccgccacccctcctccatgccgaccaaggcaaactctgacatagcataaccaagccacccaacagcaacataaaccaagtatcacaaccacctcgaaccacccggccaaggcacgcacagcaacgggacgccacgctccatggaacccatcacgacaccccaccagaccacctccgcagcccccaccccggcgccccaccgcgccacaccaagcaccatgccccgccccaccaacgctccccaccctgcgagcacccccacatacgccccacacacacgagccctcgcccaccccccccaatccgccaccaccccgaaaccgcacacccaccccccgacaccgccccacccacccccgccgcacgccccgcgcaccccaccccaggccaccaacgaccccacgccactcgcccgcgaacaccaagccccacgagacaccgcaaccccccgccccgctggccaaacccccgcaacccggccaccccccaggacacacagcagcccggcccccccgccccccatcaccctacaccgccacacaggcaccgacccaccaccgccacaacaaccccggcccacccgcaaccaccacagcgcccgggcacacatgcacacaccacggagccaccgcgaccccccccacgccaccaccgaaccgccaccacaagcgacccccccacccccccccccaactctcccacaccaaaacgcacacagaccccccgcaccactgaccccacccgacacccacgccccaccccacacaccaccacacaccgcaccacacaccaagacaccccacaccaccgcgacacccaccgcgaccacccgggaaccgacagccacacgccccactgcacgacacaacagccccgcgcaacacaccccaagcccacacaccacgcccccccacccacacaccacacacccaccctcccccccccccacccccaccactcaaccaccgcccgccctcaccacacccccaccccagcagcgcacgaaccaccccacccccccaccagacgaccacaccccaccgccaccccctctcacgccaccccccacccgccacacacgcccgccccacaccccccccacgcaccacgccgccccacaccccccgccaaccccccgcccccgcccaccacccacacaccaacagccgacaaccacaaccaccccaacgcgacacacacagaacgacgccacgacgacaccaacaccaacacaccatccccaccacacccacgcgacaacccaccgacacacaccaacacgccgtcccccacacgacgtccaccaacgaaccagccacagacaaacagcaccacagcaaccatacacgacacagcgaacacacgcaacacaccaaacaacactcagccaccgacagccaaccatagcgccatagcacaaccacagcacctacagacacccaggacctagccaaacagcctacccaccgcccacggacgcccacagtcacccgaccgcgcgacgctcccgaaacgcacacccacaggacaccgcacgcacccggaccaccgaaaccacacacgaagacgaagcccccaccaccaccacccctacaacgactggcgcacccgagccgcaacgcagacggatagacgacacactcgccaacagcaccaccgccacgtgacagacaccacccgcgacagcctcaacaacaagacaacagcgcaccacctcccgacccccacgccgaaccatcaac

SEQ ID NO: 514335 - DNA, 419 bp, Homo sapiens
  misc_feature (238)..(238): n is a, c, g, or t
agtataattccatttgtcagtttttcctgtcttgcagctgtcaacatcttgagggttcctccatggtttcccagtggtttcagaacttcatgtcaacttcatgctcaatgactttcatccatgtgctgtaggatgagctgctggtctcagaggacaagctccccactcccccctgacagtgcaaggaggtctatgggttgactcatagccaccctgctgagcccagcgtgggccacangtcgttaccacttttaaaatctgtgaccttgggcatgttccttcacctcacgctgtgcctcagttttcgtttacataattttttgagattataatgtaatatgttactcaatggggattaagccaattgatgtttatagcagatcatagatatttgttgattaaaagcacaatgtgaaagc

SEQ ID NO: 514336 - DNA, 224 bp, Homo sapiens
gaccttgatgtatggatagtaatataattctcatcaaagagtaccttttctcctttagaaaactgtgatgcttggccaggtgtaggtgggtcacgcctgtaatcccagcactttggaggccaaggcgggcggatcgtgaggtcaggagtttaagaccagcctggccaacgtggtgaaaccctatttctactaaaaatacaaaaattagctgggcatggtggcac

SEQ ID NO: 514337 - DNA, 1169 bp, Homo sapiens
  misc_feature (251)..(251): n is a, c, g, or t
ctgaggatccatgcaatacctccctaccatggacccgcaaaggaacgagcttcgggcctttgtgaaaatgtgtaagcaggatccgagcgttctgcacaccgaggaaatgcgcttcctgagggagtgggtggagagcatgggtggtaaagtaccacctgctactcagaaagctaaatcagaagaaaataccaaggaagaaaaacctgatagtaagaaggtggaggaagacttaaaggcagacgaaccatcangtgaggaaagtgatctagaaattgataaagaaggtgtgattgaaccagacactgatgctcctcaagaaatgggagatgaaaatgcggagataacggaggagatgatggatcaggcaaatgataaaaaagtggctgctattgaagccctaaatgatggtgaactccagaaagccattgacttattcacagatgccatcaagctgaatcctcgcttggccattttgtatgccaagagggccagtgtcttcgtcaaattacagaagccaaatgctgccatccgagactgtgacagagccattgaaataaatcctgattcagctcagccttacaagtggcgggggaaagcacacagacttctaggccactgggaagaagcagcccatgatcttgcccttgcctgtaaattggattatgatgaagatgctagtgcaatgctgaaagaagttcaacctagggcacagaaaattgcagaacatcggagaaagtatgagcgaaaacgtgaagagcgagagatcaaagaaagaatagaacgagttaagaaggctcgagaagagcatgagagagcccagagggaggaagaagccagacgacagtcaggagctcagtatggctcttttccaggtggctttcctgggggaatgcctggtaattttcccggaggaatgcctggaatgggagggggcatgcctggaatggctggaatgcctggactcaatgaaattcttagtgatccagaggttcttgcagccatgcaggatccagaagttatggtggctttccaggatgtggctcagaacccagcaaatatgtcaaaataccagagcaacccaaaggttatgaatctcatcagtaaattgtcagccaaatttggaggtcaagcgtaatgtccttctgataaataaagcccttgctgaagga

SEQ ID NO: 514338 - DNA, 607 bp, Homo sapiens
tgcaagggtggggacgtctgttgggcatggcgtcccagaagccccattgcagccctattgtggtgggcaggctgcttttgagaatgtgtatacaccttttcaaccttcctgttctgtcagggcagcaggaccagcattccatgttgcttcttactccagtgttcctctaccccagaggctgccttctctttggtcttttgtgcatactgggcatcctaaagctgtttgtttgcccttcagtgaatgggactgacacagagacccatttttgtttttaaaaattataaaatataggctgggtgtggtggctcacacctgtaatcccagcactttgggaggctgaggctggaggatctcctgagcccaggagtttgagaccagcctaggcaacacagtaagaccttgttgctacaaagaatatttaaaaacttagccaggcgtggcagcacgcacctgtggtcccagctcctcaggaggctgaggcaggaggattgcttgagcctgggaaggtcgaggctgcagtgaggtaagatcacaccactgcactccagcctgggaacaggatttcactctgttgtcgacgcggccgcgaatttagtaatagtaa

SEQ ID NO: 514339 - DNA, 903 bp, Homo sapiens
  misc_feature (109)..(109): n is a, c, g, or t
  misc_feature (149)..(150): n is a, c, g, or t
ttcatgccttttcccaccccaattatcctcccgagtttttttttttgtttacaagaaagaggtttaattggacttcagttccacgtgctggggaaccctcacatcatgncagatggcaaggaggagcaagtcacatcttacatggatgnnagcagcaaagagagagagcttggagcagggaaactcctcttttttgaaaccatcagatctcatgagacttatttcactatcacaagaacagtacagaaaagacttgcccccatcattcaatgacctcccacctgtccctcccacacacacagaaattcaagatgagattcggatggggacacagccaaaccatatcattctgccctggcccctcccaaatctcatgatctcgcatttcaaaaccaatcatgcctttctaacagtcccccaaagtcttaactcatttcagcattaactcaaaagtccacagtctaaagtctcatctgagacaaggcaagtcccttccacctatgagcctgtaaaatcaaaagcaggttagttacttcctggatacaatgggggtataggcattgggtaaatatagccattccaaatgggagaaactggccaaacaaaggggctacaggccccatgcaagtccaaaatccagcagggcagtcaaatcttagagctccaaaatgttctcctttgactccatgtctcacatccaggtcatgctgatacaagaggtaggttcccatggtcttgagcagctctgcccctgtggctttgcagggtacagtctccctcctggttgctttcataggctggcattgagtgtctgtggcttttccaggcacacagtgcaagctgtcagtggatctaccattctgggtctggaggacagtgccccagtagggactctgtgtgggc

SEQ ID NO: 514340 - DNA, 93 bp, Homo sapiens
tgagactcgttgagatctttgttgagaaccactaatatcattcactagctcatatctgccggcagcaattgaaaagatccaatatttgaaaaa

SEQ ID NO: 514341 - DNA, 2193 bp, Homo sapiens
  misc_feature (251)..(251): n is a, c, g, or t
  misc_feature (1604)..(1605): n is a, c, g, or t
  misc_feature (1607)..(1607): n is a, c, g, or t
  misc_feature (1612)..(1612): n is a, c, g, or t
  misc_feature (1614)..(1614): n is a, c, g, or t
  misc_feature (1620)..(1620): n is a, c, g, or t
  misc_feature (1633)..(1633): n is a, c, g, or t
  misc_feature (1796)..(1797): n is a, c, g, or t
  misc_feature (1805)..(1805): n is a, c, g, or t
  misc_feature (1826)..(1827): n is a, c, g, or t
  misc_feature (1834)..(1834): n is a, c, g, or t
  misc_feature (1839)..(1839): n is a, c, g, or t
  misc_feature (1850)..(1850): n is a, c, g, or t
  misc_feature (1852)..(1852): n is a, c, g, or t
  misc_feature (1863)..(1864): n is a, c, g, or t
  misc_feature (1866)..(1866): n is a, c, g, or t
  misc_feature (1875)..(1875): n is a, c, g, or t
ctgaggatccatgcaatacctccctaccatggacccgcaaaggaacgagcttcgggcctttgtgaaaatgtgtaagcaggatccgagcgttctgcacaccgaggaaatgcgcttcctgagggagtgggtggagagcatgggtggtaaagtaccacctgctactcagaaagctaaatcagaagaaaataccaaggaagaaaaacctgatagtaagaaggtggaggaagacttaaaggcagacgaaccatcangtgaggaaagtgatctagaaattgataaagaaggtgtgattgaaccagacactgatgctcctcaagaaatgggagatgaaaatgcggagataacggaggagatgatggatcaggcaaatgataaaaaagtggctgctattgaagccctaaatgatggtgaactccagaaagccattgacttattcacagatgccatcaagctgaatcctcgcttggccattttgtatgccaagagggccagtgtcttcgtcaaattacagaagccaaatgctgccatccgagactgtgacagagccattgaaataaatcctgattcagctcagccttacaagtggcgggggaaagcacacagacttctaggccactgggaagaagcagcccatgatcttgcccttgcctgtaaattggattatgatgaagatgctagtgcaatgctgaaagaagttcaacctagggcacagaaaattgcagaacatcggagaaagtatgagcgaaaacgtgaagagcgagagatcaaagaaagaatagaacgagttaagaaggctcgagaagagcatgagagagcccagagggaggaagaagccagacgacagtcaggagctcagtatggctcttttccaggtggctttcctgggggaatgcctggtaattttcccggaggaatgcctggaatgggagggggcatgcctggaatggctggaatgcctggactcaatgaaattcttagtgatccagaggttcttgcagccatgcaggatccagaagttatggtggctttccaggatgtggctcagaacccagcaaatatgtcaaaataccagagcaacccaaaggttatgaatctcatcagtaaattgtcagccaaatttggaggtcaagcgtaatgtccttctgataaataaagcccttgctgaaggaaaagcaacctagatcaccttatggatgtcgcaataatacaaaccagtgtacctctgaccttctcatcaagagagctggggtgctttgaagataatccctacccctctcccccaaatgcagctgaagcattttacagtggtttgccattagggtattcattcagataatgttttcctactaggaattacaaactttaaacactttttaaatcttcaaaatatttaaaacaaatttaaagggcctgttaattcttatatttttctttactaatcattttggatttttttctttgaattattggcagggaatatacttatgtatggaagattactgctctgagtgaaataaaagttattagtgcgaggcaaacataactcatttgaggataaagttgtgttggatatgtggttcctgatgcatttgacttgtctttgnnantgctnantctggntctttaaagatgnatttcaataaaagctaattgggaccacccgtatttcagtaggacctgggtagggattggaagtactcggcaggacagcagcaatcttgctgtgtttgatataacatgcatccttgggcaggttgcccttaaatcttacactgtggtgaagggatgttttacanngtaatgcngcagtagagttggagtacttnngttctcntagtngtccagtatantntaataagtgtnntncatattatntccacgtaagggaaatacaggtagtacttagctgtcaatagttgcgtagtgctgaaaacagttcagcgtacgcttaagtcgagaaggtggccgcaagatacaggaggagagcctagctggcatctgcggacaattgagggacctcacagcgaacctgtcacctaggaacgcataaaagagaaggggccagacacaaagccgggacgaatcaaatcactggcgtgatcaatcgatgaaacaagacggaaaagataagtaacggaggcagtaatacagcggggctgagatgacagggaacagatagcacgataagaagaa

SEQ ID NO: 514342 - DNA, 1024 bp, Homo sapiens
  misc_feature (704)..(704): n is a, c, g, or t
  misc_feature (967)..(967): n is a, c, g, or t
ttttttttatgggggttcatgtgcgccttaataaggtgacccattatttgaaagggataaagggggaggaggggtggcgccccaagtacggggccggccatgtttaaggggttagtgaatggtatgggaaaagactcgaccacaggataggtggccgattaatttatgcgggcgtgaaatcatccacccgtgtgtgttgaagggttctgggcgcgttgataaaaaggacgcacaccacagtgtcgtgcccacacacacatattctgctgggtatgaggagtgatctacagtgttctcgcgaaaggtgtgccgttcttatcaacacacttattcgcgtgacttgtctcacagtggaggcgggggaggccactcactttattgtagtggggccttgggagcccaggaggtggcgttcatcataatagacgacgaggggagacgaggaagtgcagcgatggttatatacatacgaccggcaacggcgatacaaaggaggcccaccaccgcgtggttttacaacgaaaaccggcaggcgattcgagcatcgacatgttgaagagtcgaccttacatctgatgtggataagcgagagcggtgcccatctacaagaatggtgctctccccgatgaaaggaacacaatgtgtgttttccaccagaccgaagcgtggtgtggtactcccagtgagaaatcatcgacgaacgntgatcacgcaggtggggtagaaaaagacggatggtaggtagacaccacttttgttggcgctagagaaaagaggggtgtcacggcaagagagaatgtcattatataactatatcatagtggaaggacgactcaaaataagatactgttagtgctggccgcaatttgtttgtggggaggcgggagagacatcgtcatcctcttagagagagagaaagagaaacaacctcagggcaagtgtagtggggtacacccgcgacgacggnaacaacagacgcagtcgtggggggatactagaacagacttataggtgaagagaacaa

SEQ ID NO: 514343 - DNA, 291 bp, Homo sapiens
cacatcgttgacttcgcccagaagttcattgaaaatactatggtagttgcttttatttaaaccaggaaagtaaaattacaattaatttggtgtaggcggagcaggtgtccgaacccgggagttgcagctgcagtgaaccatgatagtatcagttcacttctagcctgggtgacagaatgagaccctgttccaaagagagaaagagagagagaaagagaaagggtgagatacagagagagacagggaaagagaaagggagagagagagagaaagcgaaagtcaacgatgtgt

SEQ ID NO: 514344 - DNA, 2080 bp, Homo sapiens
  misc_feature (251)..(251): n is a, c, g, or t
  misc_feature (1604)..(1605): n is a, c, g, or t
  misc_feature (1607)..(1607): n is a, c, g, or t
  misc_feature (1612)..(1612): n is a, c, g, or t
  misc_feature (1614)..(1614): n is a, c, g, or t
  misc_feature (1620)..(1620): n is a, c, g, or t
  misc_feature (1633)..(1633): n is a, c, g, or t
ctgaggatccatgcaatacctccctaccatggacccgcaaaggaacgagcttcgggcctttgtgaaaatgtgtaagcaggatccgagcgttctgcacaccgaggaaatgcgcttcctgagggagtgggtggagagcatgggtggtaaagtaccacctgctactcagaaagctaaatcagaagaaaataccaaggaagaaaaacctgatagtaagaaggtggaggaagacttaaaggcagacgaaccatcangtgaggaaagtgatctagaaattgataaagaaggtgtgattgaaccagacactgatgctcctcaagaaatgggagatgaaaatgcggagataacggaggagatgatggatcaggcaaatgataaaaaagtggctgctattgaagccctaaatgatggtgaactccagaaagccattgacttattcacagatgccatcaagctgaatcctcgcttggccattttgtatgccaagagggccagtgtcttcgtcaaattacagaagccaaatgctgccatccgagactgtgacagagccattgaaataaatcctgattcagctcagccttacaagtggcgggggaaagcacacagacttctaggccactgggaagaagcagcccatgatcttgcccttgcctgtaaattggattatgatgaagatgctagtgcaatgctgaaagaagttcaacctagggcacagaaaattgcagaacatcggagaaagtatgagcgaaaacgtgaagagcgagagatcaaagaaagaatagaacgagttaagaaggctcgagaagagcatgagagagcccagagggaggaagaagccagacgacagtcaggagctcagtatggctcttttccaggtggctttcctgggggaatgcctggtaattttcccggaggaatgcctggaatgggagggggcatgcctggaatggctggaatgcctggactcaatgaaattcttagtgatccagaggttcttgcagccatgcaggatccagaagttatggtggctttccaggatgtggctcagaacccagcaaatatgtcaaaataccagagcaacccaaaggttatgaatctcatcagtaaattgtcagccaaatttggaggtcaagcgtaatgtccttctgataaataaagcccttgctgaaggaaaagcaacctagatcaccttatggatgtcgcaataatacaaaccagtgtacctctgaccttctcatcaagagagctggggtgctttgaagataatccctacccctctcccccaaatgcagctgaagcattttacagtggtttgccattagggtattcattcagataatgttttcctactaggaattacaaactttaaacactttttaaatcttcaaaatatttaaaacaaatttaaagggcctgttaattcttatatttttctttactaatcattttggatttttttctttgaattattggcagggaatatacttatgtatggaagattactgctctgagtgaaataaaagttattagtgcgaggcaaacataactcatttgaggataaagttgtgttggatatgtggttcctgatgcatttgacttgtctttgnnantgctnantctggntctttaaagatgnatttcaataaaagctaattgggaccacccgtatttcagtaggacctgggtagggattggaagtactcggcaggacagcagcaatcttgctgtgtttgatataacatgcatccttgggcaggttgcccttaaatcttacactgtggtgaagggatgttttacacgcaagcgcttctcacatttcaatgcccaagacgccctcaccactatagttatagctcactagtggtctaaaccactctttcccacataaccgcaaaatccgcctacactatatttcacactaatccttaaaactattattcttctttttcgcttcaaatactagcgcctttactttttggagtcgtatgaacaaatatccatctctcctaacgcccgctatttacccccctgcttgcctttttcttccttcttctctacacactttattataagaatgcacaga

SEQ ID NO: 514345 - DNA, 399 bp, Homo sapiens
  misc_feature (172)..(172): n is a, c, g, or t
  misc_feature (185)..(185): n is a, c, g, or t
  misc_feature (215)..(215): n is a, c, g, or t
  misc_feature (270)..(270): n is a, c, g, or t
  misc_feature (305)..(305): n is a, c, g, or t
  misc_feature (328)..(328): n is a, c, g, or t
  misc_feature (357)..(357): n is a, c, g, or t
gcctagccccccacccccccggggacagccagtgattaacctttagcaataaacgaagttttagctaagctatactaaccccagggttggtcaatttcggccaagcccccgcggtcacacgatttacccaagtcaatagaagccggggtaaagagtgttttagatcaccccncccccaataaagntaaaactcccctgagttgtaaaaaactccngttgacccaaaatagactacgaaagtggctttaacatatttgaacccccaatagntaagaccccaactgggattagatacccccctatgnttagccctaaacctccacagttnaatcaacaaaactgctcgccagaaccctncgagccccagcttaaaactcaaagggcctggcggtgcttcca

SEQ ID NO: 514346 - DNA, 157 bp, Homo sapiens
ccttaccctgactggcttcttagtaactatccagtgaccccagtgagagaagacaggactctgaaacaggctccagcattggggctggagaacagaaatggaagcacccaatgacacatgctgacatgtggaatcatgtgcgctggctgggaggcga

SEQ ID NO: 514347 - DNA, 234 bp, Homo sapiens
gaagctccacttaggccctagttcctagggacattccccttcaactgcctgagatgagcatttgtgatttcctgaagcttccccagacactctgcctcttttctgtctggtctctattctctccgtgtcccttaatgattgcagagtagtctctgcagctgacctgtgccctagcacccctcctgcctgcccctacctccctcagagccctgcaagcaaggccctgctttggct

SEQ ID NO: 514348 - DNA, 265 bp, Homo sapiens
ccccacccaagaagagcttcgccatcctcatggctaaagcctcttagcaacgttttgccgtcctttgggcttatttccctttgcccaagaactctttgatgctgcccacgatcgcgtccttgtcgcggatctcgctcatgacgacccgatcgtccttcgcgaagtggtcacgtaagtccttgatgaactgcccggagccgtaggggctctcgacctggccgtacgcgaacatgttcgcgcgcggcaggatcttgttcttcgtgat

SEQ ID NO: 514349 - DNA, 1536 bp, Homo sapiens
  misc_feature (251)..(251): n is a, c, g, or t
ctgaggatccatgcaatacctccctaccatggacccgcaaaggaacgagcttcgggcctttgtgaaaatgtgtaagcaggatccgagcgttctgcacaccgaggaaatgcgcttcctgagggagtgggtggagagcatgggtggtaaagtaccacctgctactcagaaagctaaatcagaagaaaataccaaggaagaaaaacctgatagtaagaaggtggaggaagacttaaaggcagacgaaccatcangtgaggaaagtgatctagaaattgataaagaaggtgtgattgaaccagacactgatgctcctcaagaaatgggagatgaaaatgcggagataacggaggagatgatggatcaggcaaatgataaaaaagtggctgctattgaagccctaaatgatggtgaactccagaaagccattgacttattcacagatgccatcaagctgaatcctcgcttggccattttgtatgccaagagggccagtgtcttcgtcaaattacagaagccaaatgctgccatccgagactgtgacagagccattgaaataaatcctgattcagctcagccttacaagtggcgggggaaagcacacagacttctaggccactgggaagaagcagcccatgatcttgcccttgcctgtaaattggattatgatgaagatgctagtgcaatgctgaaagaagttcaacctagggcacagaaaattgcagaacatcggagaaagtatgagcgaaaacgtgaagagcgagagatcaaagaaagaatagaacgagttaagaaggctcgagaagagcatgagagagcccagagggaggaagaagccagacgacagtcaggagctcagtatggctcttttccaggtggctttcctgggggaatgcctggtaattttcccggaggaatgcctggaatgggagggggcatgcctggaatggctggaatgcctggactcaatgaaattcttagtgatccagaggttcttgcagccatgcaggatccagaagttatggtggctttccaggatgtggctcagaacccagcaaatatgtcaaaataccagagcaacccaaaggttatgaatctcatcagtaaattgtcagccaaatttggaggtcaagcgtaatgtccttctgataaataaagcccttgctgaaggaaaagcaacctagatcaccttatggatgtcgcaataatacaaaccagtgtacctctgaccttctcatcaagagagctggggtgctttgaagataatccctacccctctcccccaaatgcagctgaagcattttacagtggtttgccattagggtattcattcagataatgttttcctactaggaattacaaactttaaacactttttaaatcttcaaaatatttaaaacaaatttaaagggcctgttaattcttatatttttctttactaatcattttggatttttttctttgaattattggcagggaatatacttatgtatggaagattactgctctgagtgaaataaaagttattagtgcgaggca

SEQ ID NO: 514350 - DNA, 1598 bp, Homo sapiens
  misc_feature (109)..(109): n is a, c, g, or t
  misc_feature (149)..(150): n is a, c, g, or t
  misc_feature (1009)..(1010): n is a, c, g, or t
  misc_feature (1012)..(1012): n is a, c, g, or t
  misc_feature (1017)..(1017): n is a, c, g, or t
  misc_feature (1019)..(1019): n is a, c, g, or t
  misc_feature (1025)..(1025): n is a, c, g, or t
  misc_feature (1038)..(1038): n is a, c, g, or t
  misc_feature (1201)..(1202): n is a, c, g, or t
  misc_feature (1210)..(1210): n is a, c, g, or t
  misc_feature (1231)..(1232): n is a, c, g, or t
  misc_feature (1239)..(1239): n is a, c, g, or t
  misc_feature (1244)..(1244): n is a, c, g, or t
  misc_feature (1255)..(1255): n is a, c, g, or t
  misc_feature (1257)..(1257): n is a, c, g, or t
  misc_feature (1268)..(1269): n is a, c, g, or t
  misc_feature (1271)..(1271): n is a, c, g, or t
  misc_feature (1280)..(1280): n is a, c, g, or t
ttcatgccttttcccaccccaattatcctcccgagtttttttttttgtttacaagaaagaggtttaattggacttcagttccacgtgctggggaaccctcacatcatgncagatggcaaggaggagcaagtcacatcttacatggatgnnagcagcaaagagcgagagatcaaagaaagaatagaacgagttaagaaggctcgagaagagcatgagagagcccagagggaggaagaagccagacgacagtcaggagctcagtatggctcttttccaggtggctttcctgggggaatgcctggtaattttcccggaggaatgcctggaatgggagggggcatgcctggaatggctggaatgcctggactcaatgaaattcttagtgatccagaggttcttgcagccatgcaggatccagaagttatggtggctttccaggatgtggctcagaacccagcaaatatgtcaaaataccagagcaacccaaaggttatgaatctcatcagtaaattgtcagccaaatttggaggtcaagcgtaatgtccttctgataaataaagcccttgctgaaggaaaagcaacctagatcaccttatggatgtcgcaataatacaaaccagtgtacctctgaccttctcatcaagagagctggggtgctttgaagataatccctacccctctcccccaaatgcagctgaagcattttacagtggtttgccattagggtattcattcagataatgttttcctactaggaattacaaactttaaacactttttaaatcttcaaaatatttaaaacaaatttaaagggcctgttaattcttatatttttctttactaatcattttggatttttttctttgaattattggcagggaatatacttatgtatggaagattactgctctgagtgaaataaaagttattagtgcgaggcaaacataactcatttgaggataaagttgtgttggatatgtggttcctgatgcatttgacttgtctttgnnantgctnantctggntctttaaagatgnatttcaataaaagctaattgggaccacccgtatttcagtaggacctgggtagggattggaagtactcggcaggacagcagcaatcttgctgtgtttgatataacatgcatccttgggcaggttgcccttaaatcttacactgtggtgaagggatgttttacanngtaatgcngcagtagagttggagtacttnngttctcntagtngtccagtatantntaataagtgtnntncatattatntccacgtaagggaaatacaggtagtacttagctgtcaatagttgcgtagtgctgaaaacagttcagcgtacgcttaagtcgagaaggtggccgcaagatacaggaggagagcctagctggcatctgcggacaattgagggacctcacagcgaacctgtcacctaggaacgcataaaagagaaggggccagacacaaagccgggacgaatcaaatcactggcgtgatcaatcgatgaaacaagacggaaaagataagtaacggaggcagtaatacagcggggctgagatgacagggaacagatagcacgataagaagaa

SEQ ID NO: 514351 - DNA, 108 bp, Homo sapiens
tctcttctgcgccggcctcgtcgctacaccctggcacgtgcggtgcgcgcggagcttctccccaccgcgcgccgggtaggcctttggataccgcgtcctgcagctcag

SEQ ID NO: 514352 - DNA, 494 bp, Homo sapiens
  misc_feature (7)..(7): n is a, c, g, or t
  misc_feature (9)..(9): n is a, c, g, or t
  misc_feature (11)..(11): n is a, c, g, or t
  misc_feature (78)..(78): n is a, c, g, or t
  misc_feature (174)..(174): n is a, c, g, or t
  misc_feature (219)..(219): n is a, c, g, or t
  misc_feature (426)..(426): n is a, c, g, or t
ccaattngncnttggccgggggccttcagagctggatgcctgtcttcgcagacatgaaagcaatattaatctccttgnatatctccattagagctcttgggtgactatgtgcattgtcgatgagcagctaacattttgaaaggaatctttttttttctgagcagtgggtctcancagtaggcataaaaagatttagtaaaccatgctgtaaacagatgngctgtcatcagggctttgctgttccatttctatagcataggcaaagtagatttagcataattcttgaaggtcctaggatttttggaatagcagatgagcattggcttcaccttaaagtcaccagcatcattagttcctagtaagagagtcagcctgtccattaaagccaggcattgacttctctgtagagaaaatctgttgtttagngtagccaccttcaatgatcttagctagatcttccatataacttgccgcagtttctacatcagtacttg

SEQ ID NO: 514353 - DNA, 548 bp, Homo sapiens
  misc_feature (1)..(1): n is a, c, g, or t
  misc_feature (28)..(28): n is a, c, g, or t
  misc_feature (245)..(245): n is a, c, g, or t
  misc_feature (281)..(281): n is a, c, g, or t
  misc_feature (422)..(422): n is a, c, g, or t
  misc_feature (441)..(441): n is a, c, g, or t
  misc_feature (492)..(492): n is a, c, g, or t
  misc_feature (496)..(496): n is a, c, g, or t
naaaacacaaagggatgatcatatagtntttaccatcggactaatctagtgtagaaatccttccttatcatagagatatggtttacattaccgtttgttttcattgtgattgcccctatgtaacaatcatgaatattagattttttaaatgtagaatatcctaatattatagccagcagctgttacttgtttgtaaaattgcaaaaaaaacaaaacctgaagttggtttattgaaagaatataangatagcttctagggatattagtaatagatgccatgntcctgaagcctcttctcagaacactgtgggagataatactgacagtagaatcagtgaaaacagcctaacaaaacctctgacatcgtatatcaacttttaacagcccactcacgggctttctaaactacccaccacctgtanggtactggcattaagtccngcatctccagaaacagtggtgtgagtaactggagtccaaatggtcaagtancttnggatataccataggggtccgggctttagaatgggtatggaattcccgcctgc

SEQ ID NO: 514354 - DNA, 720 bp, Homo sapiens
  misc_feature (330)..(330): n is a, c, g, or t
ggcctctctctccaccccacccctctttctggcgtcatcccctccccaacaccacctctgctgctgcctctggctgtggacctgcacctcttccccatccccgccaggcccggggagcggggtgagcctggatgagagcccccccaacctggggctctcccaggccatggcccgtgtgctcccagggaggagccccggaccctgagcatctgctggaggcttggcagaggccccgcggggaccgtgtcttctgaggacaaaaggcggcggccagcaggcagacggagggggggggtggggggtggggggggtagggggaccggcagccanggcaggccagacgggtagcagggggccagcacctggcccccctcccagcttggcagtggcatgaagatgggagtgggagtgctatagtggcggaagcaccttgccgggacccccaccttgccagctagttggacaccccagggctgtgtgctggcccacctggttgtcccccaggcacccccgaggcctacccaggtgcacccttccggtgcctgctttccctgatgcctgcgatttggaccagctcgggctgtttctccggccactgaaggcgggagtgtccctggccgccgatcacctagggtcccccatgtgccccgggtgtggttacctggggttagccgcttgaccccctcggggtttcaagaatcctgttagagccggtgattc

SEQ ID NO: 514355 - DNA, 326 bp, Homo sapiens
ttctagaggactcgcttcatagtctgagtcacaaagtggcatacagtagccttggttaggttccttcaatgaacattttgcgactcctatgacaacattgaaatccgcagagccctgggaggaacaaatagattttaatcgtgagtccaaccagaatgtatagctatagatataagagtaagctggtctccacatcctctcccaatgccaatgcccacagcaaccccagatgatgtgaaaactctgagttaaaagttcttctaagacttattaggttccaagacactgttttccatgtcctgagagagatcaaacaggaaaggaga

SEQ ID NO: 514356 - DNA, 345 bp, Homo sapiens
  misc_feature (16)..(16): n is a, c, g, or t
  misc_feature (37)..(37): n is a, c, g, or t
actgagcctgccctantttagaagtcaatagcaattngcttgtgggtttagactagcaattctgtgacttgctgccctacttctgtttcagctttattcagtgtaagcagattgtgatatcatttttcagatcacaaagtgcaagtccacctgaagtttgttaataacagccacaaacttattttctgatttctaccaagtcccttcccctccaccgcattcaagcaagtcttctatcagaagtttaaattagtcattggaacaaacatttgagtcccctgaccacaaagaacttaaaataccagagagagatcaattcctgctattgaaacttctaaaactagg

SEQ ID NO: 514357 - DNA, 1324 bp, Homo sapiens
tagtaaaatcttttttattcaaaaaaaaaaaaccccaaaaaacaaaagtttcccaaccacacacgggagggatttgggatagggggagggtctcgtgctccactccagcccggggcccccagcccaggtgtggttgtgggcagcaaataaggggatagtggggataagggcccaaaaaattaaaagtggttgggtctggtgatagtggggaggaaagggtggtgcacaagccgtggggggagaggcggggaagagggggaagagggaacagaagcagaggtctcagatacgtgggaacacgccgcgacagagcggtggggaggcccatttatcataataaacatttcctgtggtggactccaaccccaccggggtggacaccacctatctcttgtgtgcccacattcaagacgagagacatataagcgcgctctgttgcgtcgagctcttgtggtgtgaaaaagaggaacatattgaagaggtgtgggggccccccaacgggtgtgcctcttggggaatcaagaaagaaaactcccggtgggctaaaaatatctcccccatatcgcgtggcaagcccagcgtgagtagctcccgcgggaatactccccgcgacacacatatattctgggtggggcgccccccaaagtgtgttcagaccccccatatccccgcgtgtaaaaaaaaatctgtggacacgcggggtccttggtggcccacaccccgagaggaaaactcccacaacccttacagggcgtgagtgccggtgcatgtgttgtgcagcaaacacggtattatcacccgcggggagatagcggggggcgggcccaaaaaacgggtgagcgggccaaaaattcccctgtgtattagcccccacagaaattgggtccgaggtttaccagaaacaggggtttccccgcgtccgcccatagtgacgtgtttgcaccgactagctgcagggagtgttcacacccgcgggccccttgcggcctttgacaaccgggggggggcatcgcccctccagagccatcgtcttgtttgcactccccgcgacaaccggggggatccaagctttgtccttggattttgctagcgcttagtgtgtaatcgagcaacaaccccctggtgctcactcgcgtcttctgctgtcaggtgccggctcgcatgtagatagtgcatacctcccgcaccgatgtgtacacgggggtttcacagcgctttatcttccctgggtcaaatggcgcgccgtgcggacaatctttctccttgcgttccaactgcgtccttgcacctgcacacgtctgcggtttcacccgttccgcgtgtg

SEQ ID NO: 514358 - DNA, 207 bp, Homo sapiens
gaggctcccccgggtccgctcggatgtggagcagcggctccccatcgctgcattcactgacgtgcatgccggctgcaggagcagctagcgcctgtcattgcgatggaagaagtctcagagtctctctcacactcaaagacggacagattggggacagaggatcctgagaagcttttcgttctcctgatgttcctggcttgcaatact

SEQ ID NO: 514359 - DNA, 887 bp, Homo sapiens
accccccaaggggcgcgtaaaacgacacccacaaggggacccacacggggaaattatggccccaaaagcccggcccccggggtgcaccccgcaagcaggtgcgcccgcccgggcccgggaagtgattacatcgggggcgaccccctcaagccctaagatgggggaaagcaaccccaggcggtgggagactcgcttaacctaatcaacaagtgtgagcgcagcggcccctcacaatcgggtcccccaccaagcgcagatgcgcgcgcaccatgtgggctacgccaatggggaacaggtgctcgaccgcgagtaagagactctctggaggaaaaagacacgcccccccgtgatgttaattagccccagatttggtaccccccccgggagggtttcttgggaggcacacacttgtgaaacccaaccgcctcgtatcctgcccaaaacacggatgtttccgatgttcgtgtccacacaagctgaggcgcctcaggcgcccccccatagacagtagctaccaattatagggactggtgtccccacgcggcagtccaacctgttatgttctgaaggtgctattcttttatgccacggggaaaagaagcaagcgtgtcttttcctggaaaggggcccacggacttctgggcacggcagataggagctctcccccacagtaggtcttctcagaaaacccatttggataacaggcctcctccaggaacgacttcaggcgcaacaaaaattaaacctccagaatgaaaatcagtccagtggacgcataaggctttacggctgcccccaagagaagactcagggttgtgaggagctcacgccactcaaccggccctcgcgcacccgcgcccaaccataggacccccgccagacatgac

SEQ ID NO: 514360 - DNA, 1433 bp, Homo sapiens
  misc_feature (124)..(124): n is a, c, g, or t
  misc_feature (669)..(669): n is a, c, g, or t
taaaaaataaaggccaagaataactaacttttaagatcccgggttttaaacaaggcagctgtagttctctccgatcatcctcgacgtgctccataggactttcttatccgtgggacgagaccancgtggtggcccagttgaaagcttgagaggggaccctgtgtggatttcaagagcgtggatggaaagtggagcctcatcctctcccccaagagaagtctgtgtgaataaccgtgcgtgagaagtcccatgaccaaacgtgaggggcttcaacgtgtgcgtcagaacaggactcctcgttcccgcgtcaggaaggcctattttgtgagggaagagcattatccggcgggtattcatgagaaagtgagggcatagacccaggggacaaaagtgcggtatgtagagggccaaaccacggtacaaccgtggtctcacaaggggagggacatgcctagtcttggggacgcccaaacagaggcccgtgatgttgtgagatatcccacgtgacgagatatcccgtgatgtgaccacccacccacgtttatctgcattacagggagggggggggatgacccacatagaagatagaccaagtcaggtaaaacatgttgacgagctgttccgcaaggccacatgtgtcgcaccataagggagaaatctccaagttcnctcaaaaaagcaaccccgtcaagagagagaaacccttggaagaatgggaagaagtgtgtcggggtgccccaacaatgcgtttcggtgggggtacttacaggggaccaaaaaaccccttagatgtttctgtggaaccaattgtgggggcactacccaaataaaagaggcgagggaaaaagtctccgacctgtaaacatccactttcaatccgtggggggcccatgtggtatttatacgtaaccagtaccgtgtgttctcccctcaacgccctctgtgttaaaagggaacgttaattgtggttaaggaaaccatgatcatgtggacacacgattttaagatgccacaaacttatatacgcgggcacacgcggccccccaagggggaaattacccccaagggaaaaggtttagtatctccttaacacacctggggcgctagaaaaatattcgctgtaactattttaagtaccttggaatacaattccgtgtggagggagaagatttcctttccataagaagcaaggggcatgtgtgtatttgccccccatggtgggatgtggggcggctttatgaaacacactccccatgaaagttggttgtgcatatcataaggggataccaccagtgtattgttgggtcgtgcacgacgaaacattccaagtagtagggagcttgacgtgtggaaacccacctgggtggggagtgtcctcccccacaaggcgttatcactgttgtgacaaaagcaagagacgttcgaaaggacta

SEQ ID NO: 514361 - DNA, 186 bp, Homo sapiens
ttgttgttccagaggatcccgaagcgcacgatggcgcgtcatatgggcaaaaagccggttagcgtgggcaggcctcctagggagaggagggtggatggaattaacgggtgttagtcatgttacgcttgtatcagtgtgcgacgatagtagtagtggtcgtggtgctaggagtttaatgttgcagta

SEQ ID NO: 514362 - DNA, 243 bp, Homo sapiens
cagtttcctggtggatccattgaccttcagacggaagacaatggcattagcattcttactctgaacaatccaatagaatgatgcctttccaggtgttatgggtgctacaacttctggaaaaggtaattgaattggaaaattggccagggggaaaggcctcatgtccgtggggcaaaaattactttctctccaggatctgatctgaatgctgtgaaatcactgggcacttccagaggagggatg

SEQ ID NO: 514363 - DNA, 346 bp, Homo sapiens
gttcactttctacacattgtatggatacagtatcttatctgtcatcagatgatggacatgtgggttgtttacacaacttggctattagcaatacttctgctatgaacatttgtgtatatgtctttgtgtggactgtgtttttgtttctcttgggtatatacataagagtaaaattactaggtcatacagtaagtatatgtttaaccttttgaggaactaccgaactattttccaaagtggctttaccattttccaatcccaccatcagtgtgtgaaggttccagttttccacatcctcactaacacttgttattatctgtctttttggttatagccattctagttg

SEQ ID NO: 514364 - DNA, 218 bp, Homo sapiens
ttaatctggatgatgagtacagggttttcatttaattattattttccaaaatgtagacatatgtttaatgtactctttatatatgagaaatttcacaataagaaatcttcaacattgtaagacacatattcatgtttcttttatttcttatttgatttaggtgagcatagctaccccaaaacagaaaccaaaaacttcattttgctttggtaagtact

SEQ ID NO: 514365 - DNA, 483 bp, Homo sapiens
gtgacctctctgcgcagcctcccgagtagctgtgattacaggtgcctccaccatgcctggctagattttgtatttctagtagagatagggtttcaccggtgttgggcaggctgttcttgaactcctgacctcatgatccgtctgcctcggcctcccaacatgctctgattacaggcatgaaccaccgcacctggccttctatttcttcggaaagtgaaatggttatagctaaacatactgacttttccccttgtgatactgtaatacaataagaaagatatatttgtccttttccccagtttctggcataaagctgctaaaatccttgtagtttcctagtaataagagcatctttggttataatattcagtcttagttcttggcacgtgaacttctgagacccttacaacctccagagtggtgtgtcttttgtatgctaatgagatgactggtagctgaggtccctgagatagcttagggatg

SEQ ID NO: 514366 - DNA, 719 bp, Homo sapiens
ggcacaatgaagacagagtttcagtttgggaaggtgaaaaaattttggagataggccaggtgtggtggctcacgcctgtaatcccagcatggtgagaggctgaggcgtgcagatacctgaggtcaggaggtcaagaccaacctggccaacatggtgaaatcctgtctcttctaaaaatacaaaaattagctggatgtggtgatgcgtgcctatagtcccagctgttcgggaggctgaggcaggagaattgcagtgagccgagatcgcgccactgcactctagcctggatgacagagtgagactccatctaaaaaaaaaaaggaaaaagttctggagataaatggtgatgatagttggagaaaatgaatatacatgaagttatatgtaatgatgcgaagtgtactttataaagggtaaaaaagtaaattaatgtcagagtgcagagcgcaaaaccggaaccccaacccaaaaacaaggccaccaaatggaaccaaagagaagagcacggacaaggcacaccgccagaggaccaacacaagacgacaggcctgggcgaggcccagaggccagacagaacaggaacagggcgcacacccagaaccaccgcgcccaacggcccagacccgaggcaaggacccacaacaaacgcaagacggaggagaaaggaaaaagaagagaacacacacgcaaccagcaacaacaagaaacaacacaaacaa

SEQ ID NO: 514367 - DNA, 445 bp, Homo sapiens
tagaaaatatggggaaaatgtctcaaattcagggagagtattttttattattacttccttctctattaatatcttgtgtctcctttatcactgtctatcttttagctcttttctttttcccacaatctacttaaactagtcttttttctcattcagttatttcaagtaccattggaagaggaaggacaacgtggtggacctatccttgcaccagaggagattaagactatttttggtagcatcccagatatctttgatgtacacactaagataaaggtaaatttgtatatgttagattggtagtaatttttttcagattgtacatatttattatgatctttgaggtacttctggttagctaaataagttttgtacctaaaacttcttattcccttattagttcctttgaatcatttgtctctttgttccactgcctcaaacaatg

SEQ ID NO: 514368 - DNA, 130 bp, Homo sapiens
cagaccggctatcggggatgggtatcggcgatggatatcggtgactggccgacgcgtgcgatatggatcgatatggtggccgggatcgctatgatgaccgaggcagcagagactatgatagcaggctatg

SEQ ID NO: 514369 - DNA, 451 bp, Homo sapiens
tacagattaaatgtaagtttgttaactggatcaggtttgagggaggagcaaggtcggttttgttaggccagtttcatttaataatcagaggaaacgcaattcagatgttctggagtgagaaacttaagtatttaatttccctttttgaaaaaggcagcggccaattttttcttccttaattataaattctagattatttattttacctatcatctggcagggttttttggggggggggggggtgttcctttgggttttttttttgtttttttttttggcaaagtttgtcaccccctgcaatccagcctgggagacataattcaaatcaattttggtcttaaatcttctaaggtttgggttatttcatgtgggccagtttctctttttgtcacaacaatttatcaatttgtggcaataaaaatgatttcccttttaaagtgtttgaatgtcc

SEQ ID NO: 514370 - DNA, 2791 bp, Homo sapiens
  misc_feature (29)..(30): n is a, c, g, or t
  misc_feature (34)..(34): n is a, c, g, or t
  misc_feature (36)..(36): n is a, c, g, or t
  misc_feature (40)..(40): n is a, c, g, or t
  misc_feature (44)..(45): n is a, c, g, or t
  misc_feature (47)..(47): n is a, c, g, or t
  misc_feature (52)..(53): n is a, c, g, or t
ggggccggcgaggaatggcggtatttgtnngagnantccntttnnanagggnnactcctagatatctccaacacaccagagtctagcattaactatggagacaccccaaagtcttgtactaagtcttctaaaagctccactccagttccttcaaagcagtcagcaaggtggcaagttgcaaaagagctttatcaaactgaaagtaattatgttaatatattggcaacaattattcagttatttcaagtaccattggaagaggaaggacaacgtggtggacctatccttgcaccagaggagattaagactatttttggtagcatcccagatatctttgatgtacacactaagataaaggatgatcttgaagaccttatagttaattgggatgagagcaaaagcattggtgacatttttctgaaatattcaaaagatttggtaaaaacctaccctccctttgtaaacttctttgaaatgagcaaggaaacaattattaaatgtgaaaaacagaaaccaagatttcatgcttttctcaagataaaccaagcaaaaccagaatgtggacggcagagccttgttgaacttcttatccgaccagtacagaggttacccagtgttgcattacttttaaatgatcttaagaagcatacagctgatgaaaatccagacaaaagcactttagaaaaagctattggatcactgaaggaagtaatgacgcatattaatgaggataagagaaaaacagaagctcaaaagcaaatttttgatgttgtttatgaagtagatggatgcccagctaatcttttatcttctcaccgaagcttagtacagcgggttgaaacaatttctctaggtgagcacccctgtgacagaggagaacaagtaactctcttcctcttcaatgattgcctagagatagcaagaaaacggcacaaggttattggcacttttaggagtcctcatggccaaacccgacccccagcttctcttaagcatattcacctaatgcctctttctcagattaagaaggtattggacataagagagacagaagattgccataatgcttttgccttgcttgtgaggccaccaacagagcaggcaaatgtgctactcagtttccagatgacatcagatgaacttccaaaagaaaactggctaaagatgctgtgtcgacatgtagctaacaccatttgtaaagcagatgctgagaatcttatttatactgctgatccagaatcctttgaagtaaatacaaaagatatggacagtacattgagtagagcatcaagagcaataaaaaagacttcaaaaaaggttacaagagcattctctttctccaaaactccaaaaagagctcttcgaagggctcttatgacatcccacggctcagtggagggaagaagtccttccagcaatgataagcatgtaatgagtcgtctttctagcacatcatcattagcaggtatcccttctccctcccttgtcagccttccttccttctttgaaaggagaagtcatacgttaagtagatctacaactcatttgatatgaagcgttaccaaaatcttaaattatagaaatgtatagacacctcatactcaaataagaaactgacttaaatggtacttgtaattagcacttggtgaaagctggaaggaagataaataacactaaactatgctatttgatttttcttcttgaaagagtaaggtttacctgttacattttcaagttaattcatgtaaaaaatgatagtgattttgatgtaatttatctcttgtttgaatctgtcattcaaaggccaataatttaagttgctatcagctgatattagtagctttgcaaccctgatagagtaaataaattttatgggcgggtgccaaatactgctgtgaatctatttgtatagtatccatgaatgaatttatggaaatagatatttgtgcagctcaatttatgcagagattaaatgacatcataatactggatgaaaacttgcatagaattctgattaaatagtgggtctgtttcacatgtgcagtttgaagtatttaaataaccactcctttcacagtttattttcttctcaagcgttttcaagatctagcatgtggattttaaaagatttgccctcattaacaagaataacatttaaaggagattgtttcaaaatatttttgcaaattgagataaggacagaaagattgagaaacattgtatattttgcaaaaacaagatgtttgtagctgtttcagagagagtacggtatatttatggtaattttatccactagcaaatcttgatttagtttgatagtgtgtggaattttattttgaaggataagaccatgggaaaattgtggtaaagactgtttgtacccttcatgaaataattctgaagttgccatcagttttactaatcttctgtgaaatgcatagatatgcgcatgttcaactttttattgtggtcttataattaaatgtaaaattgaaaattcatttgctgtttcaaagtgtgatatctttcacaatagcctttttatagtcagtaattcagaataatcaagttcatatggataaatgcatttttatttcctatttctttagggagtgctacaaatgtttgtcacttaaatttcaagtttctgttttaatagttaactgactatagattgttttctatgccatgtatgtgccacttctgagagtagtaaatgactctttgctacattttaaaagcaattgtattagtaagaactttgtaaataaatacctaaaacccaagtgta

SEQ ID NO: 514371 - DNA, 115 bp, Homo sapiens
gtctgcagacacagcacaagactggaggatgtacagaatgggagagccacggggtttctgctgaaggagaacatcaggccctttcagctctatgagatctatctgtgtactccct

SEQ ID NO: 514372 - DNA, 375 bp, Homo sapiens
gtgctggtcactctaaggatccgatgcgaagttcgatagcggcagcagttagcatctcaatttagagatgacattttgtggcagagaagctcagaaagcatcagaagaagtcttcactcatgggtggaagcttgtccttagactcttttggcaggagtgggtttcccatcttaatcctttgacctcttctaatctataatcaggaggaatgtttcttctttttcaccaagcttttcaacggtcttcttctattgggcttctccttgactttatccacatcaccaggtttttccccatctatcttggaatcttgcttcccttttttcccccagggttatcaggcaaaggcttctacaagcatcatctggcacttgt

SEQ ID NO: 514373 - DNA, 2435 bp, Homo sapiens
gctggtactattagttatttttcctgttcctctccttcctccttaccctccaccttccagtaggccccagtcaaaagatttggtaaaaacctaccctccctttgtaaacttctttgaaatgagcaaggaaacaattattaaatgtgaaaaacagaaaccaagatttcatgcttttctcaagataaaccaagcaaaaccagaatgtggacggcagagccttgttgaacttcttatccgaccagtacagaggttacccagtgttgcattacttttaaatgatcttaagaagcatacagctgatgaaaatccagacaaaagcactttagaaaaagctattggatcactgaaggaagtaatgacgcatattaatgaggataagagaaaaacagaagctcaaaagcaaatttttgatgttgtttatgaagtagatggatgcccagctaatcttttatcttctcaccgaagcttagtacagcgggttgaaacaatttctctaggtgagcacccctgtgacagaggagaacaagtaactctcttcctcttcaatgattgcctagagatagcaagaaaacggcacaaggttattggcacttttaggagtcctcatggccaaacccgacccccagcttctcttaagcatattcacctaatgcctctttctcagattaagaaggtattggacataagagagacagaagattgccataatgcttttgccttgcttgtgaggccaccaacagagcaggcaaatgtgctactcagtttccagatgacatcagatgaacttccaaaagaaaactggctaaagatgctgtgtcgacatgtagctaacaccatttgtaaagcagatgctgagaatcttatttatactgctgatccagaatcctttgaagtaaatacaaaagatatggacagtacattgagtagagcatcaagagcaataaaaaagacttcaaaaaaggttacaagagcattctctttctccaaaactccaaaaagagctcttcgaagggctcttatgacatcccacggctcagtggagggaagaagtccttccagcaatgataagcatgtaatgagtcgtctttctagcacatcatcattagcaggtatcccttctccctcccttgtcagccttccttccttctttgaaaggagaagtcatacgttaagtagatctacaactcatttgatatgaagcgttaccaaaatcttaaattatagaaatgtatagacacctcatactcaaataagaaactgacttaaatggtacttgtaattagcacttggtgaaagctggaaggaagataaataacactaaactatgctatttgatttttcttcttgaaagagtaaggtttacctgttacattttcaagttaattcatgtaaaaaatgatagtgattttgatgtaatttatctcttgtttgaatctgtcattcaaaggccaataatttaagttgctatcagctgatattagtagctttgcaaccctgatagagtaaataaattttatgggcgggtgccaaatactgctgtgaatctatttgtatagtatccatgaatgaatttatggaaatagatatttgtgcagctcaatttatgcagagattaaatgacatcataatactggatgaaaacttgcatagaattctgattaaatagtgggtctgtttcacatgtgcagtttgaagtatttaaataaccactcctttcacagtttattttcttctcaagcgttttcaagatctagcatgtggattttaaaagatttgccctcattaacaagaataacatttaaaggagattgtttcaaaatatttttgcaaattgagataaggacagaaagattgagaaacattgtatattttgcaaaaacaagatgtttgtagctgtttcagagagagtacggtatatttatggtaattttatccactagcaaatcttgatttagtttgatagtgtgtggaattttattttgaaggataagaccatgggaaaattgtggtaaagactgtttgtacccttcatgaaataattctgaagttgccatcagttttactaatcttctgtgaaatgcatagatatgcgcatgttcaactttttattgtggtcttataattaaatgtaaaattgaaaattcatttgctgtttcaaagtgtgatatctttcacaatagcctttttatagtcagtaattcagaataatcaagttcatatggataaatgcatttttatttcctatttctttagggagtgctacaaatgtttgtcacttaaatttcaagtttctgttttaatagttaactgactatagattgttttctatgccatgtatgtgccacttctgagagtagtaaatgactctttgctacattttaaaagcaattgtattagtaagaactttgtaaataaatacctaaaacccaagtgta

SEQ ID NO: 514374 - DNA, 142 bp, Homo sapiens
  misc_feature (110)..(110): n is a, c, g, or t
  misc_feature (136)..(136): n is a, c, g, or t
tgtgacggagtctcactctgtcacccaggctggagtgccagtgacgtgatctcagctcaccgcagcctccacctcctggagttcaagcaaccaactttagcccagttttnatttgcaaaacaggaaataaggcttnattctc

SEQ ID NO: 514375 - DNA, 465 bp, Homo sapiens
cgccgacgacagcaccgatgccgcgctggagatcctccgcgacagcggcgttctcctcccggtccagctcgcttagttcgcgcgtaccaccggtccccgcggccgggatcggagcctcctatgccgacgccgtccgtcccggccgcaccgcgcctgcggctcaagccgtcgccgctgccgcccaccggtttcgtggacggcgggtggtggcccgcttccgcggacctggcggccgaagtcccggccctcgccgcggcgctggcggagcggatcggcccggtgtggcgcgtggcgttcgccgtggcggcctggctgcccgcggagcctgccatcgtctcgcagggccggctcgtgcggctggaggggttccgctcgcaggacccgcacgtcgtgcacgtgaccggcggttcgatgcgccggctgacgctgctcgtcgtccccgccgggacacctctcgcggtcgcc

SEQ ID NO: 514376 - DNA, 901 bp, Homo sapiens
  misc_feature (34)..(34): n is a, c, g, or t
  misc_feature (96)..(96): n is a, c, g, or t
  misc_feature (242)..(242): n is a, c, g, or t
  misc_feature (251)..(251): n is a, c, g, or t
  misc_feature (253)..(253): n is a, c, g, or t
  misc_feature (273)..(273): n is a, c, g, or t
  misc_feature (297)..(297): n is a, c, g, or t
  misc_feature (305)..(305): n is a, c, g, or t
  misc_feature (309)..(309): n is a, c, g, or t
  misc_feature (314)..(314): n is a, c, g, or t
  misc_feature (326)..(326): n is a, c, g, or t
  misc_feature (355)..(355): n is a, c, g, or t
  misc_feature (358)..(358): n is a, c, g, or t
  misc_feature (373)..(373): n is a, c, g, or t
  misc_feature (415)..(415): n is a, c, g, or t
  misc_feature (434)..(435): n is a, c, g, or t
  misc_feature (448)..(448): n is a, c, g, or t
  misc_feature (461)..(461): n is a, c, g, or t
  misc_feature (474)..(474): n is a, c, g, or t
  misc_feature (482)..(483): n is a, c, g, or t
  misc_feature (507)..(507): n is a, c, g, or t
  misc_feature (582)..(582): n is a, c, g, or t
  misc_feature (599)..(599): n is a, c, g, or t
  misc_feature (700)..(700): n is a, c, g, or t
  misc_feature (735)..(735): n is a, c, g, or t
  misc_feature (779)..(779): n is a, c, g, or t
  misc_feature (901)..(901): n is a, c, g, or t
atacaggttacatagctgtaaccatcttaaggcnaatgacattaagtttgcaacaaatacttgctggtgaaaacacattactagcatttcaaaaanttacaaaaatgtaacaaaatatcctaaacagctatctttatatttgtaaaggaagtatgaacaactggcttaaccagtttccactgcacatcaaacaggtggcaaagtgatagggatcttctttgatttttaagggaataataaantctaatttntntcccacacattacaattctnggggatttgtgtcaggctaacacntgttgtcntctnctttnacagccttttcntttactcgttttgtcttgatactttacantgntttttttttttcctntaaggtaatcgttttgttgctgtaaaagccgtttttcttttnttttttttaattcccttannggaatcgtgtggnccatttcccattnggtttcataaacncccgtggnncttcgggcacaataggggggtggnggttttctttcggtttctggggtcttctctctgaaacatcagagctgataatagttcggcctatacatgcatgcngccatagataattgggnggtacgtgcacctcctgtttcaaaaacgcaagcgcgaacataggtctggacaagggcaagctgcaactcaatttctgctgcaaccctagctcaggtaagtnatgtttattccttcactttgctgatatagtcagtnagtatgttgatgccttcttcctgctgttctagggcatccagganaatgcccatcggtgtcctcttcaaacctattccttccattttattctccagtttgttcttgaggttccgaagtctcaacgatgcatggataaacatcaacagcaaaggaaaagtaatgccan

SEQ ID NO: 514377 - DNA, 1977 bp, Homo sapiens
  misc_feature (63)..(63): n is a, c, g, or t
aagaaaacggcacaaggttattggcacttttcttgctatctctaggcaatcattgaagaggangagagttacttgttctcctcttcaatgattgcctagagatagcaagaaaacggcacaaggttattggcacttttaggagtcctcatggccaaacccgacccccagcttctcttaagcatattcacctaatgcctctttctcagattaagaaggtattggacataagagagacagaagattgccataatgcttttgccttgcttgtgaggccaccaacagagcaggcaaatgtgctactcagtttccagatgacatcagatgaacttccaaaagaaaactggctaaagatgctgtgtcgacatgtagctaacaccatttgtaaagcagatgctgagaatcttatttatactgctgatccagaatcctttgaagtaaatacaaaagatatggacagtacattgagtagagcatcaagagcaataaaaaagacttcaaaaaaggttacaagagcattctctttctccaaaactccaaaaagagctcttcgaagggctcttatgacatcccacggctcagtggagggaagaagtccttccagcaatgataagcatgtaatgagtcgtctttctagcacatcatcattagcaggtatcccttctccctcccttgtcagccttccttccttctttgaaaggagaagtcatacgttaagtagatctacaactcatttgatatgaagcgttaccaaaatcttaaattatagaaatgtatagacacctcatactcaaataagaaactgacttaaatggtacttgtaattagcacttggtgaaagctggaaggaagataaataacactaaactatgctatttgatttttcttcttgaaagagtaaggtttacctgttacattttcaagttaattcatgtaaaaaatgatagtgattttgatgtaatttatctcttgtttgaatctgtcattcaaaggccaataatttaagttgctatcagctgatattagtagctttgcaaccctgatagagtaaataaattttatgggcgggtgccaaatactgctgtgaatctatttgtatagtatccatgaatgaatttatggaaatagatatttgtgcagctcaatttatgcagagattaaatgacatcataatactggatgaaaacttgcatagaattctgattaaatagtgggtctgtttcacatgtgcagtttgaagtatttaaataaccactcctttcacagtttattttcttctcaagcgttttcaagatctagcatgtggattttaaaagatttgccctcattaacaagaataacatttaaaggagattgtttcaaaatatttttgcaaattgagataaggacagaaagattgagaaacattgtatattttgcaaaaacaagatgtttgtagctgtttcagagagagtacggtatatttatggtaattttatccactagcaaatcttgatttagtttgatagtgtgtggaattttattttgaaggataagaccatgggaaaattgtggtaaagactgtttgtacccttcatgaaataattctgaagttgccatcagttttactaatcttctgtgaaatgcatagatatgcgcatgttcaactttttattgtggtcttataattaaatgtaaaattgaaaattcatttgctgtttcaaagtgtgatatctttcacaatagcctttttatagtcagtaattcagaataatcaagttcatatggataaatgcatttttatttcctatttctttagggagtgctacaaatgtttgtcacttaaatttcaagtttctgttttaatagttaactgactatagattgttttctatgccatgtatgtgccacttctgagagtagtaaatgactctttgctacattttaaaagcaattgtattagtaagaactttgtaaataaatacctaaaacccaagtgta

SEQ ID NO: 514378 - DNA, 2872 bp, Homo sapiens
  misc_feature (29)..(30): n is a, c, g, or t
  misc_feature (34)..(34): n is a, c, g, or t
  misc_feature (36)..(36): n is a, c, g, or t
  misc_feature (40)..(40): n is a, c, g, or t
  misc_feature (44)..(45): n is a, c, g, or t
  misc_feature (47)..(47): n is a, c, g, or t
  misc_feature (52)..(53): n is a, c, g, or t
ggggccggcgaggaatggcggtatttgtnngagnantccntttnnanagggnnactcctagatatctccaacacaccagagtctagcattaactatggagacaccccaaagtcttgtactaagtcttctaaaagctccactccagttccttcaaagcagtcagcaaggtggcaagttgcaaaagagctttatcaaactgaaagtaattatgttaatatattggcaacaattattcagttatttcaagtaccattggaagaggaaggacaacgtggtggacctatccttgcaccagaggagattaagactatttttggtagcatcccagatatctttgatgtacacactaagataaaggatgatcttgaagaccttatagttaattgggatgagagcaaaagcattggtgacatttttctgaaatattcaaaagatttggtaaaaacctaccctccctttgtaaacttctttgaaatgagcaaggaaacaattattaaatgtgaaaaacagaaaccaagatttcatgcttttctcaagataaaccaagcaaaaccagaatgtggacggcagagccttgttgaacttcttatccgaccagtacagaggttacccagtgttgcattacttttaaatgatcttaagaagcatacagctgatgaaaatccagacaaaagcactttagaaaaagctattggatcactgaaggaagtaatgacgcatattaatgaggataagagaaaaacagaagctcaaaagcaaatttttgatgttgtttatgaagtagatggatgcccagctaatcttttatcttctcaccgaagcttagtacagcgggttgaaacaatttctctaggtgagcacccctgtgacagaggagaacaagtaactctcttcctcttcaatgattgcctagagatagcaagaaaacggcacaaggttattggcacttttaggagtcctcatggccaaacccgacccccagcttctcttaagcatattcacctaatgcctctttctcagattaagaaggtattggacataagagagacagaagattgccataatgcttttgccttgcttgtgaggccaccaacagagcaggcaaatgtgctactcagtttccagatgacatcagatgaacttccaaaagaaaactggctaaagatgctgtgtcgacatgtagctaacaccatttgtaaagcagatgctgagaatcttatttatactgctgatccagaatcctttgaagtaaatacaaaagatatggacagtacattgagtagagcatcaagagcaataaaaaagacttcaaaaaaggttacaagagcattctctttctccaaaactccaaaaagagctcttcgaagggctcttatgacatcccacggctcagtggagggaagaagtccttccagcaatgataagcatgtaatgagtcgtctttctagcacatcatcattagcaggtatcccttctccctcccttgtcagccttccttccttctttgaaaggagaagtcatacgttaagtagatctacaactcatttgatatgaagcgttaccaaaatcttaaattatagaaatgtatagacacctcatactcaaataagaaactgacttaaatggtacttgtaattagcacttggtgaaagctggaaggaagataaataacactaaactatgctatttgatttttcttcttgaaagagtaaggtttacctgttacattttcaagttaattcatgtaaaaaatgatagtgattttgatgtaatttatctcttgtttgaatctgtcattcaaaggccaataatttaagttgctatcagctgatattagtagctttgcaaccctgatagagtaaataaattttatgggcgggtgccaaatactgctgtgaatctatttgtatagtatccatgaatgaatttatggaaatagatatttgtgcagctcaatttatgcagagattaaatgacatcataatactggatgaaaacttgcatagaattctgattaaatagtgggtctgtttcacatgtgcagtttgaagtatttaaataaccactcctttcacagtttattttcttctcaagcgttttcaagatctagcatgtggattttaaaagatttgccctcattaacaagaataacatttaaaggagattgtttcaaaatatttttgcaaattgagataaggacagaaagattgagaaacattgtatattttgcaaaaacaagatgtttgtagctgtttcagagagagtacggtatatttatggtaattttatccactagcaaatcttgatttagtttgatagtgtgtggaattttattttgaaggataagaccatgggaaaattgtggtaaagactgtttgtacccttcatgaaataattctgaagttgccatcagttttactaatcttctgtgaaatgcatagatatgcgcatgttcaactttttattgtggtcttataattaaatgtaaaattgaaaattcatttgctgtttcaaagtgtgatatctttcacaatagcctttttatagtcagtaattcagaataatcaagttcatatggataaatgcatttttatttcctatttctttagggagtgctacaaatgtttgtcacttaaatttcaagtttctgttttaatagttaactgactatagattgttttctatgccatgtatgtgccacttctgagagtagtaaatgactctttgctacattttaaaagcaattgtattagtaagaactttgtaaataaatacctaaaacccaagtgtaaaaaaaaaaaaggggggcgtaaagatatccaaggggcaaattgaggtacaagttttttacaagggcccaggggggaataaa

SEQ ID NO: 514379 - DNA, 131 bp, Homo sapiens
  misc_feature (30)..(30): n is a, c, g, or t
  misc_feature (55)..(55): n is a, c, g, or t
cggcggcgggcgtagaacaagcagcttagnaaagcagtgagcaatagaaactgtncctcaatcccacagagaaagaggagggggccaagagccaggacagggagagacaggcagacacccagcccggccgg

SEQ ID NO: 514380 - DNA, 100 bp, Homo sapiens
tggcgtaacttaactcatgcatgtctccaatatgcatgagttacagttacgccagtttatttaaatagtgctggtctctcaacacagttatctacatttc

SEQ ID NO: 514381 - DNA, 3058 bp, Homo sapiens
  misc_feature (29)..(30): n is a, c, g, or t
  misc_feature (34)..(34): n is a, c, g, or t
  misc_feature (36)..(36): n is a, c, g, or t
  misc_feature (40)..(40): n is a, c, g, or t
  misc_feature (44)..(45): n is a, c, g, or t
  misc_feature (47)..(47): n is a, c, g, or t
  misc_feature (52)..(53): n is a, c, g, or t
ggggccggcgaggaatggcggtatttgtnngagnantccntttnnanagggnnactcctagatatctccaacacaccagagtctagcattaactatggagacaccccaaagtcttgtactaagtcttctaaaagctccactccagttccttcaaagcagtcagcaaggtggcaagttgcaaaagagctttatcaaactgaaagtaattatgttaatatattggcaacaattattcagttatttcaagtaccattggaagaggaaggacaacgtggtggacctatccttgcaccagaggagattaagactatttttggtagcatcccagatatctttgatgtacacactaagataaaggatgatcttgaagaccttatagttaattgggatgagagcaaaagcattggtgacatttttctgaaatattcaaaagatttggtaaaaacctaccctccctttgtaaacttctttgaaatgagcaaggaaacaattattaaatgtgaaaaacagaaaccaagatttcatgcttttctcaagataaaccaagcaaaaccagaatgtggacggcagagccttgttgaacttcttatccgaccagtacagaggttacccagtgttgcattacttttaaatgatcttaagaagcatacagctgatgaaaatccagacaaaagcactttagaaaaagctattggatcactgaaggaagtaatgacgcatattaatgaggataagagaaaaacagaagctcaaaagcaaatttttgatgttgtttatgaagtagatggatgcccagctaatcttttatcttctcaccgaagcttagtacagcgggttgaaacaatttctctaggtgagcacccctgtgacagaggagaacaagtaactctcttcctcttcaatgattgcctagagatagcaagaaaacggcacaaggttattggcacttttaggagtcctcatggccaaacccgacccccagcttctcttaagcatattcacctaatgcctctttctcagattaagaaggtattggacataagagagacagaagattgccataatgcttttgccttgcttgtgaggccaccaacagagcaggcaaatgtgctactcagtttccagatgacatcagatgaacttccaaaagaaaactggctaaagatgctgtgtcgacatgtagctaacaccatttgtaaagcagatgctgagaatcttatttatactgctgatccagaatcctttgaagtaaatacaaaagatatggacagtacattgagtagagcatcaagagcaataaaaaagacttcaaaaaaggttacaagagcattctctttctccaaaactccaaaaagagctcttcgaagggctcttatgacatcccacggctcagtggagggaagaagtccttccagcaatgataagcatgtaatgagtcgtctttctagcacatcatcattagcaattacccattctgtttccacaagcaatgtaattggatttactaagcatgtttatgttcagcgcctaaactctactggtgggcgctctcagtactcctggtttcaatctgtacgtcattctgctttccgagctagtttttcagagatactagaaggaaatactgatttttcaaatttcaaaaaagttctttccaagtcatctttgacatttgtgaagaattaggagatttgccaaccactaatggaaacaagcctcatgaagtttaatggtatcccttctccctcccttgtcagccttccttccttctttgaaaggagaagtcatacgttaagtagatctacaactcatttgatatgaagcgttaccaaaatcttaaattatagaaatgtatagacacctcatactcaaataagaaactgacttaaatggtacttgtaattagcacttggtgaaagctggaaggaagataaataacactaaactatgctatttgatttttcttcttgaaagagtaaggtttacctgttacattttcaagttaattcatgtaaaaaatgatagtgattttgatgtaatttatctcttgtttgaatctgtcattcaaaggccaataatttaagttgctatcagctgatattagtagctttgcaaccctgatagagtaaataaattttatgggcgggtgccaaatactgctgtgaatctatttgtatagtatccatgaatgaatttatggaaatagatatttgtgcagctcaatttatgcagagattaaatgacatcataatactggatgaaaacttgcatagaattctgattaaatagtgggtctgtttcacatgtgcagtttgaagtatttaaataaccactcctttcacagtttattttcttctcaagcgttttcaagatctagcatgtggattttaaaagatttgccctcattaacaagaataacatttaaaggagattgtttcaaaatatttttgcaaattgagataaggacagaaagattgagaaacattgtatattttgcaaaaacaagatgtttgtagctgtttcagagagagtacggtatatttatggtaattttatccactagcaaatcttgatttagtttgatagtgtgtggaattttattttgaaggataagaccatgggaaaattgtggtaaagactgtttgtacccttcatgaaataattctgaagttgccatcagttttactaatcttctgtgaaatgcatagatatgcgcatgttcaactttttattgtggtcttataattaaatgtaaaattgaaaattcatttgctgtttcaaagtgtgatatctttcacaatagcctttttatagtcagtaattcagaataatcaagttcatatggataaatgcatttttatttcctatttctttagggagtgctacaaatgtttgtcacttaaatttcaagtttctgttttaatagttaactgactatagattgttttctatgccatgtatgtgccacttctgagagtagtaaatgactctttgctacattttaaaagcaattgtattagtaagaactttgtaaataaatacctaaaacccaagtgta

SEQ ID NO: 514382 - DNA, 444 bp, Homo sapiens
tcgacgcaccgtctgaagagatgtcctccacgccttctaccgctatcgctccagcacgatgcttatcgtgactgtagacgcccgttctgccacgccggcctgccgtggacagagattgggccgtcctgggcaaactggtccttagtcttatgcacttggccaatgaagttgatgaagtgctccccctagtttggcacaccctgttccggccagtctgtgaactggaactggcggacagtccgggactggacatcccgggcatctgtgaccttgaactctcgcaggatatactgaggcatagttgtattctgccatcggatctatcacaaagtactggtagcggggcagagcgctcggccggccagtactggtgacacttcttccgggccatactcccgcaggttggtacagcattaacacgatcgtcgaaatgttctcccccaa

SEQ ID NO: 514383 - DNA, 2736 bp, Homo sapiens
  misc_feature (29)..(30): n is a, c, g, or t
  misc_feature (34)..(34): n is a, c, g, or t
  misc_feature (36)..(36): n is a, c, g, or t
  misc_feature (40)..(40): n is a, c, g, or t
  misc_feature (44)..(45): n is a, c, g, or t
  misc_feature (47)..(47): n is a, c, g, or t
  misc_feature (52)..(53): n is a, c, g, or t
ggggccggcgaggaatggcggtatttgtnngagnantccntttnnanagggnnactcctagatatctccaacacaccagagtctagcattaactatggagacaccccaaagtcttgtactaagtcttctaaaagctccactccagttccttcaaagcagtcagcaaggtggcaagttgcaaaagagctttatcaaactgaaagtaattatgttaatatattggcaacaattattcagttatttcaagtaccattggaagaggaaggacaacgtggtggacctatccttgcaccagaggagattaagactatttttggtagcatcccagatatctttgatgtacacactaagataaaggatgatcttgaagaccttatagttaattgggatgagagcaaaagcattggtgacatttttctgaaatattcaaaagatttggtaaaaacctaccctccctttgtaaacttctttgaaatgagcaaggaaacaattattaaatgtgaaaaacagaaaccaagatttcatgcttttctcaagataaaccaagcaaaaccagaatgtggacggcagagccttgttgaacttcttatccgaccagtacagaggttacccagtgttgcattacttttaaatgatcttaagaagcatacagctgatgaaaatccagacaaaagcactttagaaaaagctattggatcactgaaggaagtaatgacgcatattaatgaggataagagaaaaacagaagctcaaaagcaaatttttgatgttgtttatgaagtagatggatgcccagctaatcttttatcttctcaccgaagcttagtacagcgggttgaaacaatttctctaggtgagcacccctgtgacagaggagaacaagtaactctcttcctcttcaatgattgcctagagatagcaagaaaacggcacaaggttattggcacttttaggagtcctcatggccaaacccgacccccagcttctcttaagcatattcacctaatgcctctttctcagattaagaaggtattggacataagagagacagaagattgccataatgcttttgccttgcttgtgaggccaccaacagagcaggcaaatgtgctactcagtttccagatgacatcagatgaacttccaaaagaaaactggctaaagatgctgtgtcgacatgtagctaacaccatttgtaaagcagatgctgagaatcttatttatactgctgatccagaatcctttgaagtaaatacaaaagatatggacagtacattgagtagagcatcaagagcaataaaaaagacttcaaaaaaggttacaagagcattctctttctccaaaactccaaaaagagctcttcgaagggctcttatgacatcccacggctcagtggagggaagaagtccttccagcaatgataagcatgtaatgagtcgtctttctagcacatcatcattagcaggtatcccttctccctcccttgtcagccttccttccttctttgaaaggagaagtcatacgttaagtagatctacaactcatttgatatgaagcgttaccaaaatcttaaattatagaaatgtatagacacctcatactcaaataagaaactgacttaaatggtacttgtaattagcacttggtgaaagctggaaggaagataaataacactaaactatgctatttgatttttcttcttgaaagagtaaggtttacctgttacattttcaagttaattcatgtaaaaaatgatagtgattttgatgtaatttatctcttgtttgaatctgtcattcaaaggccaataatttaagttgctatcagctgatattagtagctttgcaaccctgatagagtaaataaattttatgggcgggtgccaaatactgctgtgaatctatttgtatagtatccatgaatgaatttatggaaatagatatttgtgcagctcaatttatgcagagattaaatgacatcataatactggatgaaaacttgcatagaattctgattaaatagtgggtctgtttcacatgtgcagtttgaagtatttaaataaccactcctttcacagtttattttcttctcaagcgttttcaagatctagcatgtggattttaaaagatttgccctcattaacaagaataacatttaaaggagattgtttcaaaatatttttgcaaattgagataaggacagaaagattgagaaacattgtatattttgcaaaaacaagatgtttgtagctgtttcagagagagtacggtatatttatggtaattttatccactagcaaatcttgatttagtttgatagtgtgtggaattttattttgaaggataagaccatgggaaaattgtggtaaagactgtttgtacccttcatgaaataattctgaagttgccatcagttttactaatcttctgtgaaatgcatagatatgcgcatgttcaactttttattgtggtcttataattaaatgtaaaattgcagtaattcagaataatcaagttcatatggataaatgcatttttatttcctatttctttagggagtgctacaaatgtttgtcacttaaatttcaagtttctgttttaatagttaactgactatagattgttttctatgccatgtatgtgccacttctgagagtagtaaatgactctttgctacattttaaaagcaattgtattagtaagaactttgtaaataaatacctaaaacccaagtgta

SEQ ID NO: 514384 - DNA, 421 bp, Homo sapiens
  misc_feature (55)..(55): n is a, c, g, or t
atttctcttcacctggtatgatcttttacctgcatctctacttgtagacatcctnggtaccctccgtgcctctgtgaggcgcgggcctgattgcccttgaaggctccctggttctctgagataaactggctgaagcttttgactttgggatttagttggtgggtgagattgacatctcggtctggcttcatttcatagaaacgacacatattggctatttcctttgctgcagggaatcccagcttctcgaaagcttccggggtaatcaaggatagaggcagagccagaatttgcctccttcccgtactgcctctggtttgtcgtgtttattccagaattagccaggccagccttcttgatgcctcctctgtctatacatgggcatgttccctcaaggaccaactcaagcccacgtcttaca

SEQ ID NO: 514385 - DNA, 2807 bp, Homo sapiens
  misc_feature (29)..(30): n is a, c, g, or t
  misc_feature (34)..(34): n is a, c, g, or t
  misc_feature (36)..(36): n is a, c, g, or t
  misc_feature (40)..(40): n is a, c, g, or t
  misc_feature (44)..(45): n is a, c, g, or t
  misc_feature (47)..(47): n is a, c, g, or t
  misc_feature (52)..(53): n is a, c, g, or t
ggggccggcgaggaatggcggtatttgtnngagnantccntttnnanagggnnactcctagatatctccaacacaccagagtctagcattaactatggagacaccccaaagtcttgtactaagtcttctaaaagctccactccagttccttcaaagcagtcagcaaggtggcaagttgcaaaagagctttatcaaactgaaagtaattatgttaatatattggcaacaattattcagttatttcaagtaccattggaagaggaaggacaacgtggtggacctatccttgcaccagaggagattaagactatttttggtagcatcccagatatctttgatgtacacactaagataaaggatgatcttgaagaccttatagttaattgggatgagagcaaaagcattggtgacatttttctgaaatattcaaaagatttggtaaaaacctaccctccctttgtaaacttctttgaaatgagcaaggaaacaattattaaatgtgaaaaacagaaaccaagatttcatgcttttctcaagataaaccaagcaaaaccagaatgtggacggcagagccttgttgaacttcttatccgaccagtacagaggttacccagtgttgcattacttttaaatgatcttaagaagcatacagctgatgaaaatccagacaaaagcactttagaaaaagctattggatcactgaaggaagtaatgacgcatattaatgaggataagagaaaaacagaagctcaaaagcaaatttttgatgttgtttatgaagtagatggatgcccagctaatcttttatcttctcaccgaagcttagtacagcgggttgaaacaatttctctaggtgagcacccctgtgacagaggagaacaagtaactctcttcctcttcaatgattgcctagagatagcaagaaaacggcacaaggttattggcacttttaggagtcctcatggccaaacccgacccccagcttctcttaagcatattcacctaatgcctctttctcagattaagaaggtattggacataagagagacagaagattgccataatgcttttgccttgcttgtgaggccaccaacagagcaggcaaatgtgctactcagtttccagatgacatcagatgaacttccaaaagaaaactggctaaagatgctgtgtcgacatgtagctaacaccatttgtaaagcagatgctgagaatcttatttatactgctgatccagaatcctttgaagtaaatacaaaagatatggacagtacattgagtagagcatcaagagcaataaaaaagacttcaaaaaaggttacaagagcattctctttctccaaaactccaaaaagagctcttcgaagggctcttatgacatcccacggctcagtggagggaagaagtccttccagcaatgataagcatgtaaaagagtacgaataaatagcaaaatacaatcattagacaggatataccaaaataaacatacacattagatagactatcaccttaattctttgaaaggagaagtcatacgttaagtagatctacaactcatttgatatgaagcgttaccaaaatcttaaattatagaaatgtatagacacctcatactcaaataagaaactgacttaaatggtacttgtaattagcacttggtgaaagctggaaggaagataaataacactaaactatgctatttgatttttcttcttgaaagagtaaggtttacctgttacattttcaagttaattcatgtaaaaaatgatagtgattttgatgtaatttatctcttgtttgaatctgtcattcaaaggccaataatttaagttgctatcagctgatattagtagctttgcaaccctgatagagtaaataaattttatgggcgggtgccaaatactgctgtgaatctatttgtatagtatccatgaatgaatttatggaaatagatatttgtgcagctcaatttatgcagagattaaatgacatcataatactggatgaaaacttgcatagaattctgattaaatagtgggtctgtttcacatgtgcagtttgaagtatttaaataaccactcctttcacagtttattttcttctcaagcgttttcaagatctagcatgtggattttaaaagatttgccctcattaacaagaataacatttaaaggagattgtttcaaaatatttttgcaaattgagataaggacagaaagattgagaaacattgtatattttgcaaaaacaagatgtttgtagctgtttcagagagagtacggtatatttatggtaattttatccactagcaaatcttgatttagtttgatagtgtgtggaattttattttgaaggataagaccatgggaaaattgtggtaaagactgtttgtacccttcatgaaataattctgaagttgccatcagttttactaatcttctgtgaaatgcatagatatgcgcatgttcaactttttattgtggtcttataattaaatgtaaaattgaaaattcatttgctgtttcaaagtgtgatatctttcacaatagcctttttatagtcagtaattcagaataatcaagttcatatggataaatgcatttttatttcctatttctttagggagtgctacaaatgtttgtcacttaaatttcaagtttctgttttaatagttaactgactatagattgttttctatgccatgtatgtgccacttctgagagtagtaaatgactctttgctacattttaaaagcaattgtattagtaagaactttgtaaataaatacctaaaacccaagtgta

SEQ ID NO: 514386 - DNA, 206 bp, Homo sapiens
cctcttgggcggatgtgatctcatttctttggtgcttgtggtaaaacttgaagacataaacaagaaagctgatcgaaccattagcagaaagtatcacagacgttctcgtaagggacaaaacgggactggctagttaacacaaagaggctgggatgggctttgtggcagttcttcccatgtagacggaccctagaagtgtggcatca

SEQ ID NO: 514387 - DNA, 188 bp, Homo sapiens
tcttgaggatcccctcagcagctctgctcccgccgccgctcctgcagtgacttcagagcctctgtggggatggctcgtcagcaggagccgccccaccactgccatgcccctcacaggacacaatgtacccaccacccaagcgccaggctcctcttttggaggaagaaggtggggggagcggtggagca

SEQ ID NO: 514388 - DNA, 1415 bp, Homo sapiens
cgagacagatagaatcgagccggaccggaagaggctgccggcacgatgagcatggacggagtcgcgtcgcgagccatcatcgttagcaggtatcccttctccctcccttgtcagccttccttccttctttgaaaggagaagtcatacgttaagtagatctacaactcatttgatatgaagcgttaccaaaatcttaaattatagaaatgtatagacacctcatactcaaataagaaactgacttaaatggtacttgtaattagcacttggtgaaagctggaaggaagataaataacactaaactatgctatttgatttttcttcttgaaagagtaaggtttacctgttacattttcaagttaattcatgtaaaaaatgatagtgattttgatgtaatttatctcttgtttgaatctgtcattcaaaggccaataatttaagttgctatcagctgatattagtagctttgcaaccctgatagagtaaataaattttatgggcgggtgccaaatactgctgtgaatctatttgtatagtatccatgaatgaatttatggaaatagatatttgtgcagctcaatttatgcagagattaaatgacatcataatactggatgaaaacttgcatagaattctgattaaatagtgggtctgtttcacatgtgcagtttgaagtatttaaataaccactcctttcacagtttattttcttctcaagcgttttcaagatctagcatgtggattttaaaagatttgccctcattaacaagaataacatttaaaggagattgtttcaaaatatttttgcaaattgagataaggacagaaagattgagaaacattgtatattttgcaaaaacaagatgtttgtagctgtttcagagagagtacggtatatttatggtaattttatccactagcaaatcttgatttagtttgatagtgtgtggaattttattttgaaggataagaccatgggaaaattgtggtaaagactgtttgtacccttcatgaaataattctgaagttgccatcagttttactaatcttctgtgaaatgcatagatatgcgcatgttcaactttttattgtggtcttataattaaatgtaaaattgaaaattcatttgctgtttcaaagtgtgatatctttcacaatagcctttttatagtcagtaattcagaataatcaagttcatatggataaatgcatttttatttcctatttctttagggagtgctacaaatgtttgtcacttaaatttcaagtttctgttttaatagttaactgactatagattgttttctatgccatgtatgtgccacttctgagagtagtaaatgactctttgctacattttaaaagcaattgtattagtaagaactttgtaaataaatacctaaaacccaagtgta

SEQ ID NO: 514389 - DNA, 705 bp, Homo sapiens
catgcccttattcctaaggagtcttcataaagctctgatttgtgccacgcttgggggcttcacgtttctgcgtagcgcagggtaacaagagtggtgcggacttttaaaaccgtaaagagggtatcattaacagagtgcaccctgggacagagctcacaaggaacacggttcatttgggcacacagacacaagataggatcaagttctgtgctggtcccggtgagctgtgtctgagtacccttcagctggaattgctgcttaggtctgggacgtgtgtgtgactcttagaccattgctgtctgaaaatgagagagaagacttcggaagcacacttgtgttcataaagtactcccccaatggcccgtcccattgctatctatttcttgttatccacgaggcttaattaaatgatcgtggtaaaatcgatgtctgagcacttaagacacacagtcaattctttaattctgggtggaaagatataccggagttaaatttattctgtttaaaaaaatgacccaacagttatcaccccaaaccccctttcccaactcttgcacctgtttgttttggattgggtttgggggaaagaagatagtttttcttagttgtctactttgtttgaacacttttgttgtggttcaagtgctgttttgtgtgttggggcccaaccgttgtcaataactttaccagcgagcattttaaata

SEQ ID NO: 514390 - DNA, 1292 bp, Homo sapiens
  misc_feature (29)..(30): n is a, c, g, or t
  misc_feature (34)..(34): n is a, c, g, or t
  misc_feature (36)..(36): n is a, c, g, or t
  misc_feature (40)..(40): n is a, c, g, or t
  misc_feature (44)..(45): n is a, c, g, or t
  misc_feature (47)..(47): n is a, c, g, or t
  misc_feature (52)..(53): n is a, c, g, or t
  misc_feature (1067)..(1067): n is a, c, g, or t
ggggccggcgaggaatggcggtatttgtnngagnantccntttnnanagggnnactcctagatatctccaacacaccagagtctagcattaactatggagacaccccaaagtcttgtactaagtcttctaaaagctccactccagttccttcaaagcagtcagcaaggtggcaagttgcaaaagagctttatcaaactgaaagtaattatgttaatatattggcaacaattattcagttatttcaagtaccattggaagaggaaggacaacgtggtggacctatccttgcaccagaggagattaagactatttttggtagcatcccagatatctttgatgtacacactaagataaaggatgatcttgaagaccttatagttaattgggatgagagcaaaagcattggtgacatttttctgaaatattcaaaagatttggtaaaaacctaccctccctttgtaaacttctttgaaatgagcaaggaaacaattattaaatgtgaaaaacagaaaccaagatttcatgcttttctcaagataaaccaagcaaaaccagaatgtggacggcagagccttgttgaacttcttatccgaccagtacagaggttacccagtgttgcattacttttaaatgatcttaagaagcatacagctgatgaaaatccagacaaaagcactttagaaaaagctattggatcactgaaggaagtaatgacgcatattaatgaggataagagaaaaacagaagctcaaaagcaaatttttgatgttgtttatgaagtagatggatgcccagctaatcttttatcttctcaccgaagcttagtacagcgggttgaaacaatttctctaggtgagcacccctgtgacagaggagaacaagtaactctcttcctcttcaatgattgcctagagatagcaagaaaacggcacaaggttattggcacttttaggagtcctcatggccaaacccgacccccagcttctcttaagcatattcacctaatgcctctttctcagattaagaaggtattggacataagagagacagaaggtatgccggtcgnatacattcttggttatataaaaatagtttatatccattgtaggtttaatttactccattttggcttttttaaattggtaaattatctttaaatatagttggtcagactgctaaagtaattgttcttgcacctctatcccatctccatctctaggaacagaactgactttttgttttctcaaatgaaagtactatctcaacctataggataccctcatctgttaaa

SEQ ID NO: 514391 - DNA, 729 bp, Homo sapiens
tcatttcaattttaatacacatgtatttcctccttgcacaggattttgataggatgtaggcgaatatcctaagtggtagcctcccatagatagcagtgagttgatcatttgcagtctgcttttacatgcctatgcacgcgctaccttttatatctacaaccttgaaaactagaatctaactgttctagccccacatacagaaagtagtttctttgcatatgtatactaacttttgttactggtacccaatgttcatgaaagagctatgtcggtcgtattgtcataggggatctccattttcatcataagttaggaagtgtccctaaggtacttccacttcgacctcaacttcgttctaaatacaattctagtgatctatgctagttgtgctatcaaggaatctctatcatattttatatcgcttaccttcatcagacatgtcatagttcttcttacgttacatcatatctcttcacacgacatatgaaatacttggtcaacacacacaaggtcagaatctcgtctgtgatcttcacgctaagggcaattcttatgtactggcgttacgctgggttcattactcccgtaaagtgtattggcatcccctttgtgcatctgtctaaagaaaaccctaaacgtttccaattaaccggatagggttcccaaaaaagtctccataatttttttaccttggcgcctctccacaaagcaaatttggaaaagtcggtt

SEQ ID NO: 514392 - DNA, 166 bp, Homo sapiens
  misc_feature (43)..(43): n is a, c, g, or t
gctcggcccaagttacccgatgtttgaagaagactgcagttcnagagctttaaagtcagggaagaaaataagcagcaacccaaatcctgttgtccagatgtcagttgggcacaaggcccaggagagcaagattcgatacaaaaccaatgaacccgtggggtaggag

SEQ ID NO: 514393 - DNA, 325 bp, Homo sapiens
  misc_feature (11)..(11): n is a, c, g, or t
  misc_feature (72)..(72): n is a, c, g, or t
  misc_feature (124)..(124): n is a, c, g, or t
  misc_feature (136)..(136): n is a, c, g, or t
  misc_feature (138)..(138): n is a, c, g, or t
  misc_feature (141)..(141): n is a, c, g, or t
  misc_feature (263)..(263): n is a, c, g, or t
tgcctcagcanttttcttggcagcactgatgacatctgatgtatttttgagtggtcctttacctcgggtatngtctgtcatctccatcataatcaagcacaacagaaagaaaagctgcacaganggccttgtcacngncgncccatttgtacacttcttcatccagcttgctcttttcttcctggaagccccccacctgttccgctctcttcgctttttgctcctggggaagctgagccatgatcgcccgggctctctggccngctatcatctgatcgtcttctgtctggccgctcgccctgcttctgccctccccttcttctgt

SEQ ID NO: 514394 - DNA, 121 bp, Homo sapiens
aattttttaaaaaggttttcaatatggggattttctatttatgtaggtaatattgttccatttgcaaatattcagataatttatttaatatcctttaaataaaggcgactgggcattgtta

SEQ ID NO: 514395 - DNA, 531 bp, Homo sapiens
  misc_feature (296)..(296): n is a, c, g, or t
  misc_feature (395)..(395): n is a, c, g, or t
  misc_feature (526)..(526): n is a, c, g, or t
gtactattggctttgaatcaagcaagctcaaatctagtggaacagtcagtttaactttttaacagatcttatttttttattttgagtgccactaattaatgtaaaaaggggggggctctacagccagtcgtgatgaaatttaatatatattcttgtcctcgagattttagggaagggtgtagggtgagtaggccatttttaatttccgaagtgctaagtgtttctattacagcaaaacaaaaagtcaattttgctttccaccagtgcgagagaggatgtatacttttcaagagacngttcgggatgtcaggaagtgccggtctaatggattgatttatgcactgttatctgtttttgacacagatttccttgtaaaatgtgccctagtttaccanaattaacaaaggggggggaaaaggaccttagaacttttaagggtaaaatcaaatatagctacagcataagagaatcgagaaaatttgatagaagggtaaacttggttttaattgttaaaattcttaatcgnttgaa

SEQ ID NO: 514396 - DNA, 1758 bp, Homo sapiens
acttaagtctagatcgcgagcggccgcaccttttttttattttctttagctttctctcctagggaagtgcgtgcacagatcacctcagatgaaagatgcaatggacatgaagactgagcccccgtgaggccccaccaactatcttatcaggtccgtcgcacacgtaaaggcccgacaaagatcatcacattccaacggtggataatagatgaaaactcgcagcaccaagtaatactattcaaaaacgggctcgagccatacacgggagacataggatagcacaacgagaactgaagataagacacaactacgtcgcacacccagcagcgacacactgacactacaccgcaccagggcaagacccaaaccccaaaagataaacaacatgagccacacccctcccggacacaacctgaacctaggtacacagaccccaaaccgaggtactatacccccccttgaaaaagcgactcttccggcacaaatcaaaccaacaccaacacaaagtcgaatcgctctacacacgagctctggcacacgctagtcagtgtacaccaaacgcgggcacaaccgtcgcgcacttacattccacatctaggcacccacagccaaccatcataagcactaaagaccatagactgaagaccgcgcacaccgccactgccccagaacgatacacgagaaccaactgcaccgcaacgccacgcgcacgagcccatggctagacacaccctcctacaacagctcactaatacctatgcgcaaacaagcccgggaatccttgagcgcccccctgtaccacagggtcgcggatcacgcgcccacccggcgaattccccaacccaggcacaaacaccaacgagacatccaaacacaccatcagcccacagcccctgcgaactcgaaccagcacaatcgaccccgcaaccaccaaactgacacgcggaaaatgaaccaaggacaggaccaattgaacccggacatcagcacagccagctgactctagaccatcgaccctgcacctagccaccacgcacccgcccacgagacaataacacagcaacacacatagacacggcgaacacaccactgcccggcgccgagcgtgagccagcgagtagccaagcgccagcatccaacgggaagaccgcactaccttgccccaaggcgatccgccacagcatagctcgggctagcagccccacaaggacgcccacacaatgcaaagccacgccgggaccacaatcacaaacatacacacaaacaagcgcgccaaccacagtcacagccgcacgccacagcaccacgatgccaccaaacagaacgagcgcactaccaaacactcgacgtgctccaaaagacacacacccaggcaactacactaacactcatcacttccacaaaccaccacatccactatcgacacacacctcactagggagcgaacaacaccaacactaagccggacacctagccctcgggaagaccgcacacacatcctacccgcaccacacgccagtccgccacgcacccacccggaggacgaccgcaacaccgagacacaagcgacacacggacaactaaacatagagtacgagcccagctacgcaggcgcgatcacgacgcacagccaagacagtcgaagagacgaccctaacacgcaaacatcgagagaactccgccacctacaacacaccgaacaaccacgacggcacgcacagcgacatcacgacgaagtccaccaaggcgcaccgaact

SEQ ID NO: 514397 - DNA, 456 bp, Homo sapiens
  misc_feature (249)..(250): n is a, c, g, or t
  misc_feature (277)..(278): n is a, c, g, or t
  misc_feature (327)..(327): n is a, c, g, or t
  misc_feature (346)..(346): n is a, c, g, or t
  misc_feature (349)..(349): n is a, c, g, or t
  misc_feature (365)..(365): n is a, c, g, or t
  misc_feature (396)..(396): n is a, c, g, or t
gtcaagatgagggaatctcgctgggaagctgacaccctggacaaagagggactgtcggaatctgttcgtagctcttgcacccttcagtgaccctagaagaatgattggacagatgtgagccatctggagcagaggggcactaacccaggctgacgccaagaatgaagtggcccactgcagccctggcgagcaggcttctttcatgagacctttgttactcggtggttactgggtcctgtgcctgtccgnntgggggcatgcagccctctatcatttnnggctccgagaagagggcaaggggcccccgcagggtacttctgtgcttgncctcgccctgccagaaggnagntgtgcccctggcctgnccttcccgggaaccccttattccaactcagntcctctttggactggaatggggaatccacaaccctcagggaccaaccctccccacagtat

SEQ ID NO: 514398 - DNA, 360 bp, Homo sapiens
tgtcataaaatcctcctgtttgagctaaatgtggcctgctgaagtcttaaatgcccatatttttcaggctaaggccatggtggacatagctaactccactagaatcctagctgggggtgttggaaaaaacggtacagtgcccctctcagactccaggctcacgtccgtctcccctccccgcacattataatctactacttctctaatgctgctgcgtagtttgtcttaaagccccaagactggccagatgtgcacctgagtaaaggtcagccatttcatctgggggctctttcttgacttttaatgaattttcttctgtgaaaaaatgtatttttaataaaaaattttctgtggccagca

SEQ ID NO: 514399 - DNA, 149 bp, Homo sapiens
  misc_feature (60)..(60): n is a, c, g, or t
ctgctatgtcagcatctgtaggctggagtgtgtagaaactgtgtccagcctcatatgatnctctcataatcaaaatttcactcttaatatcatcacctccatggacacaagacagcctggctctgagttactctagagggaggagtcac

SEQ ID NO: 514400 - DNA, 1079 bp, Homo sapiens
atgacccagcagaatttcatgctgatgaagcagcggggcgtggggggcgaggtctacagccagccgccccacatgctctccccgcagggctcccatcatgggccccccgcgcccagcgagaacgctcatggtgtcccaaccaccttcggcagacgcagtgtgatccactggacagaccagatgggcgtaccatcgccggacaccttgtcggcatggccagacctgcaccttcataggaagctcgcctgccagaggcatggagccggagggcaatgatagcaaaatacgaataacactataaccaaagattcgttccccatcaactgatctggagactggacctggagatcgctgggagtggaggtgagaggcggagatgagagaggaggagctagatgatagagagagatggcatatatagatggaaagccagaatggtgctaggacagacatagaggggaagctggcacgaagtggaggctagggcggacttccgacaacacggaggagcgactacggagatgcgcaaagtagcacaggacacaacccaaagggaaacctggagcacaccatcaccagccaacagtacagaaaccacgcgaagagacgaccacaaacgtgcgcaagcaccagtcagtcaacaacgataagcgagacgccatacaaggagcgcacaaagaaagacaaatcaccccgtgagcacaaccccgaacacaaaaaaacgccacacccactgacacagcgcactaacacgagaactgcacgaaggggaaagaaacgcccctagggaaaattgggcagaacaaactccccggagggaagcgagaaacgaccagcaacgcggcagcaagcggaagacaagcggacacaacacgaccaccatccaccacgacacagagacacccaccgcaacacatagacaatgacgcaagcgaacaagccgacagcaacgaacgcgaacaccacgaggcacacatccagagcaaagcggaacaccgcaagtccccgaacagccaaagccttacaacacacaatgtggacaaaacacacgcacatacgacaccgcaggaacacccacg

SEQ ID NO: 514401 - DNA, 127 bp, Homo sapiens
agtacactgcctgtcactgatcagcatatactgacttgtagccattatgtgaacttgacttcttatgtgtgctctatgagtttgttgtaattgtcttcttgaaattgcgatttttcactgacagtaa

SEQ ID NO: 514402 - DNA, 315 bp, Homo sapiens
tcgagtcgtagaggatcccctgcgggtctcatatctgtctcatctgcctttatactggtgtaaaaaaggccgtacatagtgccatttacaacctgtaaacttacagctgcaaggctactatatcctttaatcacattatatatctgttcttcacaattctaagcctttgaaaagtagttagtaactggatatttcttcgaaacagatgtcctggatgatggccataagaataagtgaagaagtaggtcaaaatgtatggacagtttttccggcgaaattagtagctaatgtcttggctatatagtcgaggggtaa

SEQ ID NO: 514403 - DNA, 203 bp, Homo sapiens
atgcctgcctcccaaagtactggggattacggcatagcactgtgcccagccctgtagcattatgtctaacaacaaacaattagaaaaattaaacactgcctatttttttttttttttttttttttttttttttttttgggggggtttcctaaagggccccggggggggttgaaaggggggcgagggggcggttttaaaaaaac

SEQ ID NO: 514404 - DNA, 88 bp, Homo sapiens
cctgggggggggggggggggggggggcccccggggaaaccccccccaaattttttttttttccccaaaaaagggtttttcccccccca

SEQ ID NO: 514405 - DNA, 214 bp, Homo sapiens
tgtcagagctgacgtgaacgtttctcacttcttctctgtctctctcttttcctttactgtccttcccctcactcctcttccttcccttctctatcccccagctgtctgagtttaattctaattgtaatctattataattgttctgctgttagaattatatataaaatagagtcattctattctcatcattagtctaatggttacatataacggt

SEQ ID NO: 514406 - DNA, 877 bp, Homo sapiens
ccgcgtttggcgtcccatggattcgatgctcggcggtctacagccaaggcggcgtgggttcccttctccactttgcgtccctggcccccctgggacgggtgggggtcaaacctaatgcctctcccgaggcccgttgtcttctgggaccatgcgcggattagacatttcctggactcgagggcctggtcaccccaagagaggtccccaggctaccttgaggattagaaggaatgggcctccctaggggtcaccccatagtgccccggtatcgaggggggcccacaagacctctggcaggtcaaggggccctggccacagcccagatcttggagcttctgctccctgctgcggagtccccggagcgcttctgcgttgacccagttcccgtaagatactggctgatggggcacggaggtccagcgccttgggctcttctgggccctcctagaggcgcccttggagcttcgcagctctagacccccccctttgaattttacattaacttcaaatagtagttggatccttggcacgtctgtcccgtaaataggaaaccccttgcctcaatccaattttcctgatttcaccactcgccaatattttaccccaatgcccttgggagaagctgccatgcaaaggtggacaccattctgccagacttcaggggatatgactcgtcccgggcaccggtggtcagcaacgtgtccttctggactaaggcacacctcggggggacactccaatctggcgtacacaccgagatttcggcaccccctgggtggagtcgtccctcgtgggcgctttgggaaagcatggcaccctcagacccccccgtaccccagattttcggagccaataaaaggcctttgttattttttta

SEQ ID NO: 514407 - DNA, 323 bp, Homo sapiens
tgcaagatagctctaacctaccacatcacgacaggggtctcgaagagaacaggagtaagacatcctccaggatcttaggaaataacactccgaaactcctgctccatggactcatatgagatcgagcagggtgtatcttctccgaggtcaaagtgtgacacttcgatcgcggaacacagaccttatttcggacacatctagtgacttccgcaagctgatggttgccctggcaacagggtaaaaaagcagaggatggctctgtcattaattatgaactgattgaccaagatgctcgggatctctataacgctagagtgaagagg

SEQ ID NO: 514408 - DNA, 130 bp, Homo sapiens
ctctaggaaaacatggctgatatagcagaataccagcgtgcatagcaggagaacgtcgctatggaacctgcatctaccagggaagactctgggccttctgctgctgagcttgcagaaaaagaaacatgag

SEQ ID NO: 514409 - DNA, 206 bp, Homo sapiens
acccccaaccctgtgctctctgaaacatgtgctgtgtccactcatggttaaatggattaagggcggtgcaagatgtgctattctagcgtacagcagaaaggtggagggctcagtgaggtggctcacacctgaaattccaatgctttgggaagccaaggttctaggattacaggcgtgagccacccatgcctggatgatcctcacct

SEQ ID NO: 514410 - DNA, 406 bp, Homo sapiens
ctcaagggcagcagacagatctttgctgtctgctctctgcagcctcagaggagaacagtccacaccccacaaggcagtcctgcctgctctgggtctgctgcagccaagtacaatgctgggctggtgaagaaagaatgaaacttaattacaaccaatgtggtggctgcccatctatctgtctaattccctacaagagagacatcattcatttattctacaagagaggaggtatagagaatgcagctctttgcttttaaaccagttatttcacctctccaagacccatttttctcatcttgatcttgaaaccacctttgcaaaaattataactgaggaaattatgacagtgggagagattagacctaactactccatcttgctctgaccttaagtggtcctgtcatct

SEQ ID NO: 514411 - DNA, 785 bp, Homo sapiens
agcggagggtgtggcccggccgctcggactgagcaggactttccttatcgccagttgattgtgcaccgtactctgcctgtcgcttgtcattctatacaccatggtttcttctgatatccaggtgaagagaagctggtagaagcgctgcgctcagagccacggctgtttgacgctgatgtctcagactcctcggctgaagagatgaagtctgtggcgcatgatatttcgccccgttggcccgctccataaggagagcaagtgatcgttgcgcctggcagtgaatacctgtcagtgcaaggaacactgtagaacgcggtgcagagagcaggacgacgcaaggttcccgatgaagagctgaggggtcttgtaaccagcgagctggcatgcagaacaccgagcacgcacgcagacatacgaaggtgccttctaggagaggcaagtaggagaggagaagctgagtcacacttcatggtatagacattggcagaaagaggaagactgaccactagcagaatactggagatgcttagagtgaacatgatgaactctgacggaggtcagaagattggtgtgccagaagttggtgaacggcttggctgaggagtaaggagtaagctacgctcggaaggatatgtgcgagtaatgagacgtagagaagtccacagagtgacccctggctgaccgaagtaccgtgacacgcgtgacctgagttttgtgactggaggaagcctgaggaagtgttcttactcgttggttcttaaagtgttgggtcttttctaagtgta

SEQ ID NO: 514412 - DNA, 122 bp, Homo sapiens
aaccggcatcgatcactagaagatcaactctaatttctttatgactatgcggttcttggctcaagatgtacagtgagttatcccattgctgttcgtctttgtgtgaggatcctctagagtcg

SEQ ID NO: 514413 - DNA, 101 bp, Homo sapiens
  misc_feature (48)..(48): n is a, c, g, or t
  misc_feature (51)..(51): n is a, c, g, or t
atttcggcacaggggagtgagagaacgagtgagtgagtgagtgagttnctntgtggggggactcggcttgttgttgtcggtgacttccccctccccttcgc

SEQ ID NO: 514414 - DNA, 121 bp, Homo sapiens
tccatatgtgtgccacacacatagtataggcagaatagggtttcgttatgttgcccaggctggtcttaaactcctgatctcaagtgatcttcctgcctcagcctgggcacacattatggag

SEQ ID NO: 514415 - DNA, 406 bp, Homo sapiens
ggctaccgaaagctgtatagtggctgatatatacctttgcccttttacccacagctggtgtggctggtgatgcaggccaccaagtcctgagactgcactaaacaggaaggccctgtggcctggcccagtgaatccatttttgcctcctagtgcctctgggcctgtaatgggatgggctgctatgaaggtctctgagtatgccctgtgagactgtttaccccattgttgtagctgattaacattcagctcctgctgcgtatcagcaatcaccaggctgcacaccttaccaaaccttttacacgctgctcacctcttgaactgcttagctgcttatgaaactttcttctgtccacgatagccctaaattatgctctctcaagattcaaatgttccccatgatctccgg

SEQ ID NO: 514416 - DNA, 682 bp, Homo sapiens
  misc_feature (15)..(15): n is a, c, g, or t
  misc_feature (69)..(69): n is a, c, g, or t
  misc_feature (73)..(73): n is a, c, g, or t
  misc_feature (141)..(141): n is a, c, g, or t
  misc_feature (144)..(144): n is a, c, g, or t
  misc_feature (251)..(251): n is a, c, g, or t
  misc_feature (305)..(305): n is a, c, g, or t
  misc_feature (371)..(372): n is a, c, g, or t
  misc_feature (379)..(379): n is a, c, g, or t
  misc_feature (434)..(434): n is a, c, g, or t
  misc_feature (436)..(436): n is a, c, g, or t
  misc_feature (442)..(442): n is a, c, g, or t
  misc_feature (481)..(481): n is a, c, g, or t
  misc_feature (496)..(496): n is a, c, g, or t
  misc_feature (509)..(509): n is a, c, g, or t
  misc_feature (513)..(513): n is a, c, g, or t
  misc_feature (544)..(544): n is a, c, g, or t
  misc_feature (583)..(583): n is a, c, g, or t
  misc_feature (605)..(605): n is a, c, g, or t
  misc_feature (607)..(607): n is a, c, g, or t
  misc_feature (611)..(611): n is a, c, g, or t
  misc_feature (656)..(656): n is a, c, g, or t
gggcggccgcgcgtncctcccccgcctcccccgtcggtcgccccggcctacctcctctccttccccttntgcngggggcggcgccaagccattctctgtcacagagaggggctgcgggcccccaaaatggaactttattcngtnccagaccctgaccctcccatggccccagatgcgagagcctggggccccgcggtccatccccggtccttggggtggggcggggtagggcgctggccaggggccgtccngtctctggcttccggcctggggcctccgggggcggccgcggtggcctggccgcnccccatgctgggggcttggcttggtgccccccccccttcctggctgggcgctatggggggctctgnnggggatnaaatgggatgcgagcgaggtgcttggggagctgggcggccgccctattcctgctnangggtanaggaagaaggtgaaggcggctaggtgcccataagaaaangctggcacaatcttnattcccgccagtnttanttcagtctcaaaagaagagtatatggctganaaatggaaggatactccaggctccctacggagttgtgcnggggccatgctgagctgccctngnaggnagccctgggtgctgggggcagaaatgcaggacactgggaagagtnagaaccacaggtgggagggaatctca

SEQ ID NO: 514417 - DNA, 404 bp, Homo sapiens
aacaacacaggcgtgagccaccatgcctgacttctgcccgctttttaatgaagttatttgttttttgcttgttgatctgtttaagttccctattgattctggatattagacctttgttggattcatagtttgtgaatattttctctcattctgtagggtgtttactttgtttttttgtttgttttttgagacggagtcttgttctggtcgcccaggctagagtgcaatgatgtgatctcggcttgctgattcacctccacctcctgggttcaagtgattctcctgcctcagctacttgtgaggcggaggcaggagaattgcttgaacctgggaggtggagggtgctgtgagctgagattgttccactgcactccagcctgggtgacagagtgagactccatcag

SEQ ID NO: 514418 - DNA, 394 bp, Homo sapiens
  misc_feature (223)..(223): n is a, c, g, or t
  misc_feature (234)..(235): n is a, c, g, or t
  misc_feature (360)..(360): n is a, c, g, or t
  misc_feature (368)..(369): n is a, c, g, or t
tactttcacatggtacagatacatgatgatttctacatcatgattccttagcctcttggcgttgattctcatgatagacatatagctcatgagcgagaacacaaaaacaaacaaacaagaaaacaatgccattaagagcattgagaaattatacaaaggaaaaagaagaaaactaaacagcacaagcatcttctaggaaagaagaactggaggaggccagacnttattaccatnntggcactcacactcaatttccttgagaaaacctttatatgaagttacagtaccagtctcttcttagagtcttatcttagaagaaccagtagtttggggcagatttagaaagcctttagttgtaangcaaaagnncctgacttgagttaaattggtaagt

SEQ ID NO: 514419 - DNA, 107 bp, Homo sapiens
cgggtctacgataacaagctgtgctctccgaagataattctatccaggaccatgatcagcttttgagcaagggaggaaggtggacgcagcctgacggagacgcctga

SEQ ID NO: 514420 - DNA, 620 bp, Homo sapiens
ggagaacaagggcttcctgcggaatgtggtgtcgggcgagcactaccgctttgtgagcatgtggatggcgcggacgtcctacctggccgccttcgccatcatggtcatcttcacgctgagcgtgtccatgctgctgcggtactcacaccaccagatcttcgtcttcatcgcgcccctgctgaccgtcatcctggccctcgtcggtgaggacccgcactcggtcctcggccgtcgtgcgagaagctggcactcgtgtagaaagccgtggactcagctcgtagctgcatagtgtttgagggaatcatgtcggacttcttcaacgacaccaccatctgccttctacatcatcctcatcgtgtggctcgcggaccagtatgacgccatctgctgacacaccagcaacagcaagcggcattggctgcggttcttctactctctagcacttcgccttctatgcctatcactaccgcttcaatgggcagtatagcagcctaggactggtcacctcctggctcttcatccagcattccatgatctacttcttccaacactacgagctagctgccatcctgcagcaggtcagatccaggagatgctgcttcaggcgacgcactgggacc

SEQ ID NO: 514421 - DNA, 417 bp, Homo sapiens
ctaatgacctctgacttatcgggctaacttctgtctgatctaaggtatcagactcgacaattgacttgcccacttagacgtctcttgaccatccatagctatgtgactgacagaggcctctcgctgctgatgctgtgtgcctgaccatccttgtgattcaagggtctccattgacgagctgtaagtacaacgcactctgcttctatgtaacagcgattcgacgtgatgatgcccgcacatacgctgtcatggtagagcagatgtctagtagcccttcgagcccttcagtcgctactgctgcacaagctcgtgcgacgaaggcctgtgtgctgtccattgatgcactgatgattctgagccaataacgactgagacccatccgtgttcgccttgtgactgccccatgagcactgggct

SEQ ID NO: 514422 - DNA, 303 bp, Homo sapiens
cctgtgctccagatccagctctgcggctgctctgcatgcacttgcacttctgacagtggcatctctgtggcccaaacatgcccatgtgctggacctaccaccaaggggcatccccttggccacaactacccctgatagaaggaaaagagatcagcagcactgcagcaccttttactgccaaagaccccaatatatgcaaatcaatcaatgtgatataacacattaacaaaacgaaagaaaaaaacccagatcatcacaatagatgcagagaaagcatttgacaaagttcagcatccattcatg

SEQ ID NO: 514423 - DNA, 555 bp, Homo sapiens
cctccccgttgtgtatacgtaccatattttatttatccattcatctgctgatggacacttggattgcttccaaatcttggctattgcgagtagtgctacagtgaacatggtgcagatttatcttcaatatactgatttcctttctttggggtatatacctaccagtggaattgctggattgtatggtaactctatttttagtttttgaggtacctacaaactgttctccatagtggttgtactaatatacacttccacagtgcacgagggttcccttttctccacatcctcttcagcatttgttgttacctgtcttttggacagaagatattttaactggggtgagatgatatctcattgtagttttgatttgcatttctctaatggatcaatgatgttgagtacattttcatatgcctgtttgccatttgtatgtcttctttcgagaaatgcctattcagattttggtccagttttcggattaatttttttttctatagaatggttatagttactgatatagttatagttacagctcctgatatagctagtgat

SEQ ID NO: 514424 - DNA, 779 bp, Homo sapiens
agtttttactacttttatataaactttactttccagatgaagagctgagcctgattcaaatggtttttctgctttatacttctttttagttcatggtttttatagtagaggttttctatttttttttttttttttactacatttatatgtctggatacatatacgggcttgggagacaatcaaagtaacaactggaaatatggtggaaagtacaccattatttggacaaaattcccttgaatttttatccttggctggcgaacaatttaagactcaaagtcacgggtatatgggattaagtttttccggtgtaatggcaattatagaaatacactcgggagacacaacaaatggttggccattacaggtttcataaaattacactggactgggctggttactggatcttaggaaacagcacagtttaagatatcgtggaattctggacttatactttattaaaggctataaatctaaatagaaaaaaacaaaaatagaaaaacagcgggcgacaaacgaagcacgaaacaacgagcacaacaactctggtctgggcccgtggagccccaaaagaagcttccaaaaccattcgctgtggggggcgcggcggacccagaggtgagagagaccactggccacagacgttcccagggacctcgggtcagcaacggtctctgctccccaccataataaagcggcgggcacggctgtcgaaccaacccagaggtctggggctcaggctctcacaaggaccacgggacgaaatacagcgcgtgcgt

SEQ ID NO: 514425 - DNA, 720 bp, Homo sapiens
tcggcgtggatgagccgccagtgttctatcaatggtggctggtgtactccagcaatcttccagaacgtgaatgcatctgtccgcgctggtgtgcgaaacgcagcgctactccgccgtgctggatgcctgtgatctccagtcgcctggcctcctcatgtgcgaagaagctgcacgtcgcacctggcctaagggtgctagtgtatgagttgttgggaaggggcctttcgatggtgtgtgggggccaatggaaggctctgttgggacaggcaccagagctgatggtgttgagttggctcgtgcttcaaggttcttcggtagtgtgaggctggtcagtgagggacctgtctggagatgtggtgattccaggcgctgtgtcctagaccttcgccagcgtgcctcgtatttgtgcagtgtgaatcatctctctagaggaccgtgctccggctttatgtagttagtttcaaggagacaagggtttgtcgctatcagggtccgggcttccaatgcgtggattggatgtgcccctggactgcgaatctcgcgttcaccggaatagcctacttgtcctccttggggtttcaacggcggattcgtccttgcgtttcaggccctttcttgagcaggatgggggacttatgcaaggggggttgggcctgcccccttcccaaattctgtggggatatctggatcaggccttgaatgaactttaaaagcccctca

SEQ ID NO: 514426 - DNA, 316 bp, Homo sapiens
  misc_feature (314)..(314): n is a, c, g, or t
aagtggttgtggtaaccagtgaatcaggccgacctattgctcaagcctgccctgcccggcattgcgctgagacgatggcgtctgctgcaccgcgtcaaacaggctcacgccgccgagttgttccacgtcacccagtcgaccatttcccgctgggaaagtggtgtgcaggccatggagcctgcagcgcaccaacaccttgaacagttgctggccgcacgcctggaggccgccgccgatcaagtcctcgcccgactggtcaaggaaagcccgcggcccatgcacctggtccttattcactggtacagcaatccatntg

SEQ ID NO: 514427 - DNA, 402 bp, Homo sapiens
  misc_feature (285)..(285): n is a, c, g, or t
  misc_feature (361)..(361): n is a, c, g, or t
gacagctacctgatagagcagcgaggatcttatacaagcgcgtcgcgtaacactcttagcactggagctaccagcagcagctacatctggaatcccaactctgggaaaataaggagggaggattgcttgaggccaggagttcaagaccagcctggggaacatagtgagatctcatcactccaaaaaattaaaaagcttagctaaggccgggcgcggtggtgagctcctgtagtcccacttactcgggaggctgaggcaggagaattgcttgaacccagtaggtgngaggtgcagtgagccaagatcatgtcactgcactccagcctggttgacagagcaagactctgtctcaagaagaaanaaaaaaagaataaaattaaaatctgtggtcagaaggttaca

SEQ ID NO: 514428 - DNA, 182 bp, Homo sapiens
ctgatatcgagctcggtccggaatttcctttcactaaccctgcagtggaaggcaccattgacaacggttcaaaaatcaccaacttcttagagggacaagtggcgttcagccacccgagtgtcctttcccccctaagctggcacataggagcaaaagttcactaaccctgcagtgaaaggaag

SEQ ID NO: 514429 - DNA, 1154 bp, Homo sapiens
  misc_feature (458)..(458): n is a, c, g, or t
agcggctcttttccgtggcgcctcggaggcgttcagcgtgcttcaaccatgaacgcatgaacatctccttcccagccactggctgccagaatactcattgacacgtggtacgattgcaacgcggaggaacttctgtactttcgtataatcaagcgctatggccacgagaagtctgctgctgacgctctgggtagacgaactgcgacaagggcttatgtcgcgtccgaaatcagtggctgtggccaacgagcgaaaacaagtgttatccccatgtaacgcatggatgctcgttgagccaatggccagtgtcccgtccgtgcccactcgatgtcaagggagtgctagttccctcttgttacacgcaccgagacggtacgagactggggagcaacggggaccacggatcagagaactcaatctctgctggatctcgcaattcgatggactgcagatactcntcgatgccgttcgtcaacctttggttactcgtgggccacaagggagaagaacggaatattcgcgtaggaaccgtgaccttgattgcatatcaggttgccttcgaccggtcgcgttgaagccacacgagacaatcaagcataaggcctgatagtcctggtagatccctttttgtcattttcctcgtctaaacgcaacggactgattgttccggcgcagctactggtgtgtccaggaaggagcgccgttcccgcgtaatccgacaggcgtcaagaaaatccctgaggggaagcaaattaaggcacgacccatggcggatgtcccactgctggtaactttcgctttaccgcccatcgctgtgtccccttgccaaggccacagagaatcgggcaccgggcccgtcttatttgtcttcgtggaaaccgcacatgacagagcggttcaccccacacgtacatcaagagttaccaggcacaacgcagggtggcgtgtcgcggtaacaataattggctgtactagacatattctgggagccataagcgaaggacagttgacacgggaggggcctaaatgggtgatgaaacgcctcctggagatgtacacggaaaccttgtcggaaaggcaagaacggcaacgcaccttatctcctctcgtgggcaagctctaactacagtactgtaatgttctgtacctcccag

SEQ ID NO: 514430 - DNA, 906 bp, Homo sapiens
  misc_feature (351)..(351): n is a, c, g, or t
tatggtggcaagtgcctgtaatatcagctacatgggaggctgaagcacgagaatcacttgaatcagggaggcagaggttgcagcgagccaagatcgtgccactgtactctagcctaggtgacggaggtgagcctccgtctcaaaaaaaaacagggaaacggcacacgaagtataggggacatgggaataaggttaaaaatcaaagggactcacctcatgtgtttctaacatcttttacttctgtgacctttggaaacttccaaaaatagtagtagtataatctatggtcacaatcatactataccagttagaaaaaccttaaagtgaggcctaaaaagatcttgggtgaantcatcctagaattattgtgtataacagtattttcccatgagggaagactttggattccaggcattacaccacgcgcagaaaaaattctccaggcatcacaggagcagggagataactttggactctggttccccgtgttccagcgcagggacagagcacggggacgaaacatttttgtgtcccatgggaaacaatgtactcagtggcccttaaagggacgatttccatcccgaattccaatccaatttccctgtttcacttgccacaaattttcaaaatgatacaggcacccataaaattgtggcgccacactaacagggagaggtcctcaagggagaaatgtgggccttaaggttttacgtggtacaccaaggccttcaaaggctggggggtctcacaacggcgcctcctggagaccgagacacaccttctgtcaaacccggttccggagcatctgtggtgtggtcaaccgcaaagcgtggtgtgccacatttctcaaatgttaatgtggtcgcagggggcacccgtatcacagttgtggagcggaggggaccc

SEQ ID NO: 514431 - DNA, 103 bp, Homo sapiens
caggatggtaaggaacctaaggcctacccagaagcagaagccactatgcttcctgtacagcctgcagaactgtgagccaattaaacctcattgctgtacaaat

SEQ ID NO: 514432 - DNA, 271 bp, Homo sapiens
acccttcctcacgctcagtgaacggtcgggcgtaagtcttcgccgatcgcagagctgctgcaaataggtgacatcagttgtcccaacccgtgaatacctacgggcagtgacagtcattattccctgatggctgcaaggagggtgacataatccttcgcattgtatctttgatttcgcactactcgagcgtactagaatacgtataagtacaagagagacccagcaccgaaccccttcctctaacctctacggtctctaccaaacataggta

SEQ ID NO: 514433 - DNA, 135 bp, Homo sapiens
tatagaggatcccccgccgtactgactatattccagccacttcagggttgactgtgatgaccgttatagagaagggctcgaccggcagaagaaactggggtgtgtttattctcattcaacaaacccaaataaaaa

SEQ ID NO: 514434 - DNA, 212 bp, Homo sapiens
tacgttggagttttcttcttgttgcccgggccggaatgcaatggcgccatctcagctgaccgcaacctctgcctcccaggttcatgtaattcccctgcctcagccttcgcaggcatgcaccattacgccctgctaattttgtatttttagcagaaacttgggttctccattttggttaggctggtcttgaactcccaacctcaagagatctg

SEQ ID NO: 514435 - DNA, 355 bp, Homo sapiens
agtatagccgtggtgctggagtttaagttgagtagtacgaatgcagtaatagttaggataatatacacatagttaaattaagaatggcttatgcttagcggttgtacggtacaactgctattattcatcctatgtgggtaattcaggagtatgctaacattttgcgtacctgggtttggtttactccacctcaactgcctgctatgatggatcggattgacgcacgagtgatgacatggcttacgtttcgtgagggatagattctggtatactaatggagatgggggctagctttttgtcatgtgagaacaagcacggccggatgtcagaggggtgccttgggtgaccgctgcga

SEQ ID NO: 514436 - DNA, 358 bp, Homo sapiens
gctagttgttcttagtagtgtccccctgggagcgtttctcgcaggctatggacattcctggcccccagatcgcgatttccccgcagactttttctcgacagggatgcaacagatgctgttgattctgatgaaggcgctgtcgtttaagaaggtctctcttctgaggtgcctgtgctgggggcataaccgcactcattgctgctgcaaaatatccatcttacatccacaagatggtgatctggggcgccaacgcctacgtcactgacgaagacagcatgatatatgagggcatccgagatgtttccaaatggagtgagagaacaagaaagcctctagaagccctctatgggtatgacta

SEQ ID NO: 514437 - DNA, 670 bp, Homo sapiens
  misc_feature (42)..(42): n is a, c, g, or t
  misc_feature (643)..(644): n is a, c, g, or t
tttctctctgaggtcaggggggggggaacaaactcacctatnccccacagcgctcgcttctgaatcccggcaccctattggctcctgagcggcaccaggctaattgtactaagttttgtggaactgttctaaaatctggcgtgcgatcttcactttccggggtttcatactttttggggggggggggtgccctacccaccggcccactcctagaagaacaaaacgcaaatcttttccacatctgagccggcttttcacgtactttataacttcataaacataagcgatcctcaccactaggccaatactacactcacgggccggggagccgactcactattcctctgctttattttcagatcctgcccttgtagcaaaaggaaaaggtcacaccacccataatctaaccttttccctcactcacttttgaggataatcgccatggcgcccacatatctcatcccccccctcttcgggcccccgggtccctgtacgtaaatatgtactcaacatacctcttgggtggtcctccgtcgtcccgctttttttttggctttggtcctttcttcgagatcacctttttctcctctgtccctccttgcccacacctcgtctctggttttttcctttctgtctcccgccnncaccacccacaacgtaataaagacaa

SEQ ID NO: 514438 - DNA, 1097 bp, Homo sapiens
gcaggctggtaccgcccggagttagggatacgagcaagacgaagccactccgataaggttggctgcccggtgggtctctgtgagagatccgagtgtagatgtgtgaacgtgacccggcaagctgagtggcaggcctaggcccccagacgcatcagaccctgaaggactgcgtggtgggagccctgcacctgttcctggcccctgtggccccctggatccgtctggggcgcctccacccagctgttagcatgatgtcttacctcaaacaaccccatacgtgcatgaacgtggctgtggcctggactgggcccgccatggacctcctgcacccatccgtgggctatccgggtgagcaccagaacctcccgacaccttgcctcagactctcaaactgttggaggacccaccagacatgtaggatttgagtgcaagctattgttgctgagacaagcccagggagccggactgagaacacagggcccaatgtcatgtttaccaactacatgggaccacacaatgccagtgacgccattggaggcaagaggtacgtgaggcgatgtgaggtgggccaatgggcttgaggaaaaacgacggcaagtatgaggcacattccacggggacacggaatcaaccgagaaaacactaaaactcacgggatatgttggtacgcccaagacaggaaacagtgtgaccaagaagccatcaagtattacgctttgcctgtgatttccgcataacccacaagggtggaggtaataggtacttcggtgcctataagtaccgcccgagccaatgggaaagtgtcgagtaagttcttggtgacaactaccgactaagagacccatgaacggaaacaaaaggccaagaacttatacccataatttaccgaagaacgaggacagagactagaatataaaagggaaaatacaatacaatagatacaaaaaataggatctactaaaaatagaatgataagtaaaaactatattaaggcaataggaaagacatatgaacgaagtaggaaaagaaaaaaaaagaatgatataaataaaattaagagaccagaaacgaaataaaagtagagataataaaaaaat

SEQ ID NO: 514439 - DNA, 846 bp, Homo sapiens
  misc_feature (82)..(82): n is a, c, g, or t
gcgacaaatagcggatagtgcagagtacctggatgcgttgataggtactgatggacccatctcctgagcgcacgtccctggncgcgtgcatcgttggcataacacgaggtactgctgggccgagaagggtggtggtctgtacgcatgtgacaggcatccaactgatttcagtggctcaactattctactagaacacgaagcttgaagtacctggcgtttccttccgctaggcggatgaacaccaagctcttctcctgaggcctcttaccagttccgggccccacaagcccgtgatcttcatggacggactcgtgctgaggtatgtcttgcaccctacaaaaatcaagtcgagggcaatgctcgctctggaccgtctcaaggtgtatggacggacgatcccatccgttccttagcgaccaagacatagaaggcggattggtggttcctgcttgccctcaaggtcgtggcgtctgaagcctacaagacaagtatgcctattctgggtgcgacctggcatcacgaagtctggctggagacgtagccaggcagtgacatgccacacctggactgagaagaggaatagaagacacgccaaagtatccaagtagccgagaagggaacgacacaccagcgtcagtgaaggcgtaacggagaaacgggtccgatcacagtaacggttcggagcccgacaaattgaccaaagtaccacacgagacggtccgtcgaagaacccgaaggatgtccgtggatcgtgaggcacgaataaacgagctggtaagtaccctcccttgccgttgtgcttggcctttacctcggatggtttgaccttggaaatgttcggggaac

SEQ ID NO: 514440 - DNA, 337 bp, Homo sapiens
cttaattagatttagttttttgaaacatcttatgtaatgttctttttcagtctaattttgtttaagccaaaatatggacagcaatcaaaaataaatactgttgagcattttctatatggagataatgatgctaggtcaatgggggatgtaaagataaggcttagttcctgcacctaaaattcttctacacagtgatataagatacatataccactctgatgcaaaataccatattttaaaatattttaaaagcagaataaaatgctgtgtgttcaaaaaaaagtggtagttgaacaaactaaagaaagctttatgaagtagtaacatcaaagtgggc

SEQ ID NO: 514441 - DNA, 463 bp, Homo sapiens
  misc_feature (17)..(17): n is a, c, g, or t
  misc_feature (26)..(26): n is a, c, g, or t
  misc_feature (65)..(65): n is a, c, g, or t
  misc_feature (172)..(172): n is a, c, g, or t
  misc_feature (203)..(203): n is a, c, g, or t
  misc_feature (268)..(268): n is a, c, g, or t
  misc_feature (289)..(289): n is a, c, g, or t
  misc_feature (298)..(298): n is a, c, g, or t
  misc_feature (340)..(340): n is a, c, g, or t
  misc_feature (415)..(415): n is a, c, g, or t
  misc_feature (436)..(436): n is a, c, g, or t
  misc_feature (455)..(455): n is a, c, g, or t
ggtttctccatattggncaggctggnctcgaacttccaaagctcaggtgatccgcctgccttggnctcccaaaagtgctgggattacaggcgtgacacctgctcccggccatgcttatatctttaatccaaccatatactatttttgtgaatgatgggaagtaaggctcccnctcaagttaatttttctccaatctgggcttncaggaaaagggggtttctgggggagatttttacccgagcaaacgtagggaaaacggctgcctggntacctaccccttttttgacanccacacgtncttcggcaactttacatacactgcgtgattttatcctaaagncactttttaaaatcttagtgtgtaaacagagaaactggggcgttcacataaggcaagtgacctgtcacagcctgnttcggaggaacccggtaacgnttcccagagacaagcactngaacataa

SEQ ID NO: 514442 - DNA, 851 bp, Homo sapiens
cagcgattgtgtatcttacagcgttttccggcctcaagactgatcagcgcttgctagaagtgaacagctccagagagaggccacaggagactgaagatccggaccatctgctgggctaggggtgtcacttcctagaagggggaagggaaactcttgggtctcacggagtccactcagtgggcccactgtgccgtctcccctcaggtgtcccttcatgacagtgactcctctctctcaagcgctgcctgtttcttccccctcctctaagctactcttccttgagccctcctggactgcttcctctcgctcatccgtcagatgcaatctgtgggccgcccctctccctggccgctaagcagcctccattgatttccgctcgtgtttataggatttccacttagcagtgatcagtagttaagcacaggaaaatcccttgccaccccccctctccttgcgtcgatgccattgattctgaccagcggctcctaaaccgcattacaagctgagctagaaagatgaggagacggcatgtcacggagatttcacctgccttcgggatgtaggtggaaaacatgaacgaaagagtgtgtaggaaatgggttgggaaatcgcagctagaactctagaaattcttatcggactttagccactgtgcccagctcaggctcagagagtagagtgacctcgctgtggaagtttaggcgcaaatttgttccctagacctaggagaggagttaagaaagaaccaacagctgccccctacccacgcccaccgtgattgagacagcttctcaaggctcaaggggaagatgcagacctcatattaaccaccgctggtcccatgctgctac

SEQ ID NO: 514443 - DNA, 937 bp, Homo sapiens
  misc_feature (937)..(937): n is a, c, g, or t
gttcccagatgccacaccgttgacataaggtggatgcaatcacaatgattgggccatagatctccatggttactctgttggagcgcggtaatgactagggtctaggcccctggtatacgtcttacaacagtccgaccaatatagaacacaaaggcagtcagtctggggaagcaggataccactgaatgggagttatttggacgaatccctgagaagctacatccctgggaacaagaagagtgagtctttgtcggcgattaagaagaaggaagtaaagggcagacttaagtagcttatctcgaggaaaagctactaatgagtaataattgtgccactgcctttatttatttaaccagaaaagcaggaaaattgtctcgattgaacttgttttctacttgtgtaccactcactctttacttgaggatttctcagtagcatcccagcacattgtcatgcaatcattgacacttgagctggactaggaaatattctatggtatggcgcggcgacgttccctagaagtctctcagaaaatcgtaatagaactttgagtcttttgtagggttattaagaatggagagtgattgtttccagatttctttgcaaattgctgtacagtcagcttacaactcccatacacttgcgagcttacaaatgggtaatccactggcttttcactcgccgtttttttccccaacgaattattgcattgagaacctctcggtctgaggtaaatgattcgaactctgttccacgaacaggatggtgaagctgcccatcttttaagacactttcacttggcaaggaattggggcttgttaatgatcttgaagaattttgatgatccaaacatggcttttaatcgtccgaatgattcttttaaacctactggggggaaacattgcctctcgacttgatctttaggaaaccgaaagcn

SEQ ID NO: 514444 - DNA, 919 bp, Homo sapiens
  misc_feature (247)..(247): n is a, c, g, or t
  misc_feature (889)..(889): n is a, c, g, or t
acctgatgtgttctctccgactgatgagagattgcctaggtgcatatacccgtcacagagaacaagttgcattagtgtcgaagtgatttacacaacataactccatatagagcacaccgcgagcagttagatacggccacgcatgagcgtgtgcgaatctgagaagactgcatttcgcctgcggcggacgcaaattatatacagctccatgtcccgcacgacaagtatccgcgatgagcacccctanggcctacttgctactcaatctaaccaatcatactctctgcacgggcgctcaccacggtgtcaccatcatcaatcactactgcgtcggggcatatgtaatgtatactctcgcactgacacctgagtaacacccacatcctgctctaacatacgcagagtcccacatgcctaaggggccctactataagtctgagtacctccaaccagatgcttgtgaggggttacaacgtccaagtccacataccttccatgggactcacccgtggcaaaaacttatagccttgctagtacaacctggccctggagttgggaagcccccagtggaggccgcaatcgatggagcacctagagtactcctatcactggaaatggtggggcctaacgctgatccccatttggagttctactgacatgacatcgaaagaatagagtctctgtctcaacgctcccaactcatcctttttgaaatctactgcccgttaccaaggttgtaaccccagtactacgtggacttactatccaacttatgcacctaggcttgtgaggcagaacacgcacgccttcttcgcaacccgaaagcgtgatcatctgtcaggcaaccgagcgtgcgtagtacccgaaaccttggcaaatatgcccgggntaaccggcaagattgcacgatgagcaactg

SEQ ID NO: 514445 - DNA, 432 bp, Homo sapiens
  misc_feature (281)..(281): n is a, c, g, or t
tgggggacctcccttgggagatcaatcccctgtactcctgttctttgctccgtgagaaagatccacctacgacctcaggtcctcagaccgaccagcccaaggaacatctcaccaattttaaatccggagcttgctacacttgctggaaatctggccactgggcaaggaatgcccgcagcccgggattcctcctaagccgcgtcccgtctgtgtgggaccccactgaaaatcggactgttcaactcacctggcagccactcccagagcccctggaactctgnccaaggctctctgactgactccttcccagatcttctcggcttagcggctgaagactcacactgcctgattgcctcggaagccccctagaccatcacgcacgccgagcttcgggtaactctcacagtggaagaaggcaggaatgtcaggcca

SEQ ID NO: 514446 - DNA, 187 bp, Homo sapiens
  misc_feature (182)..(182): n is a, c, g, or t
ctgcttaaaatttgggggaaaatttaaaaaaataattgccaggattattggaaatttgttataatgaatgaaaccttttgtcaaaaaagattcatatttccttcttaaacatttgaaaaagtaaggcatggttgtggttaatctggtttatttttgttccccaagttaaataaatcataaancttga

SEQ ID NO: 514447 - DNA, 399 bp, Homo sapiens
atcccctcgcagcagacacagcaacaacaacggagattccgtctcaggatgatgtatttgtgtgtgaaggaactttcagtgaccattattttaaagaatgtcctttggatctgtgctacattccgtgcgtcagactccatcttcttccctacggcattgagattgtaccgaatgaatgaattagacggaaggtccaggttacctgctggcactcttgtccacttgggtcttttgtcactgaatctgtttccatggaagttctgcctcgcattgctatttgggtaccgatttttctcctggacacagttatcaggtattactgagcttctccctactcgagtgtcctttggttaccgttgctctgcagtatagccaggtggttttgaaattgggagggct

SEQ ID NO: 514448 - DNA, 935 bp, Homo sapiens
  misc_feature (86)..(86): n is a, c, g, or t
  misc_feature (116)..(116): n is a, c, g, or t
  misc_feature (168)..(168): n is a, c, g, or t
  misc_feature (198)..(198): n is a, c, g, or t
  misc_feature (214)..(214): n is a, c, g, or t
  misc_feature (248)..(248): n is a, c, g, or t
  misc_feature (269)..(269): n is a, c, g, or t
  misc_feature (288)..(288): n is a, c, g, or t
  misc_feature (324)..(324): n is a, c, g, or t
  misc_feature (327)..(327): n is a, c, g, or t
  misc_feature (367)..(367): n is a, c, g, or t
  misc_feature (382)..(382): n is a, c, g, or t
  misc_feature (398)..(398): n is a, c, g, or t
  misc_feature (404)..(404): n is a, c, g, or t
  misc_feature (413)..(413): n is a, c, g, or t
  misc_feature (455)..(455): n is a, c, g, or t
  misc_feature (501)..(501): n is a, c, g, or t
  misc_feature (547)..(547): n is a, c, g, or t
  misc_feature (556)..(556): n is a, c, g, or t
  misc_feature (638)..(638): n is a, c, g, or t
  misc_feature (647)..(648): n is a, c, g, or t
  misc_feature (651)..(651): n is a, c, g, or t
  misc_feature (665)..(666): n is a, c, g, or t
  misc_feature (668)..(669): n is a, c, g, or t
  misc_feature (671)..(672): n is a, c, g, or t
  misc_feature (674)..(675): n is a, c, g, or t
  misc_feature (677)..(678): n is a, c, g, or t
  misc_feature (680)..(680): n is a, c, g, or t
  misc_feature (800)..(800): n is a, c, g, or t
  misc_feature (852)..(852): n is a, c, g, or t
  misc_feature (902)..(902): n is a, c, g, or t
ctctttagcgctcagggcgctagaacccactgctcttcctcttaagaaagtgctccattccttccggcgcccgagagctgctggcncaaagggatccggagcgagctagggcaganaccatgaacaccctatgatgataagttgctgggggagaaactgaagtactantatagcagcagtgaggatgaggacagtgancacgaggacaaggacngaggcagatgtgccccagccagcagttctgtgcntgcagaggctgaagactaggnaggcgaaggaatctcagtnaacacaggcccaaaaggtgtgatcaatgactggcgncgnttcaagcagttggagacagagcagagggaggagcagtgcngggagatggaaaggntgatcaagaagctgtnaatganttgcaggtnccatctgagatgaagaggaggagcaacagaaacagaaagacntccaggagaagatcagtgggaagatagactctagaaggagtttgcnataatgaatgaggaccaagatgatgaagagtttctgcagcagtacnggaagcagngaatggaagagatgcggcagcagcttcacaaggggccccaattcaagcaggtttttgagatctccagtggagaagggttttnaaaaaaaannaanaaagaacagaaaannannannannanngntcatatttatgaggatggcattccagggaccgaagccatgaatggttgcatgatctgccttgccgcagagtacccagctgtcaagttctgcaaggtgaagagctcagttattggcgccanaggtcagttcaccaggaatgcccttcctgccctgctgatctataaggggggngattgatcggcaattttgttcgtgtactgacagctgggggatgattcttnctgtggacttgaagctttctcaggaatttggat

SEQ ID NO: 514449 - DNA, 159 bp, Homo sapiens
cctatctccaatctgtcataggagatatatctttgatcttttatgataagggtagaatatagattaagatcatcacaatccaatttcacatgtggcactaggacaaatggaatgctatacaaattaatcccctatcacccgtggttacgggatgcgtgt

SEQ ID NO: 514450 - DNA, 356 bp, Homo sapiens
taccgagggttgcttcacgatcgaaagtatccacagcaccgacatgaatttgctgtggtgccccaggactctacctcactgcacagtgtggaaaccacagctttcagttgtctatctttttttaaaattatttttattttttgagatggagtcttgctctgtcaaccaggctggagtgcagtggcgcgatctccacctgctgggttcaagcaattcttgtgcctcagccttccaagtagctggggttacaggagcccaccgcaacgcctggttaatttttgtatttttagtagagactgggttttgccctgtcggccaggctagtctcgaactcctgtcctcaagtgatccaccca

SEQ ID NO: 514451 - DNA, 249 bp, Homo sapiens
aattccattccagcgtagtggtggcttccaatagttttttcttcatgggccctaacccatggtcacagacaagggaatggaactgtgaagaggaaggaaacacacacagtgggtcagcatgcccattaccttgaatggcttccatatggtcttagagccatcctgggctctgaaagcaaaaactggtaatggaacattctgtgctgtgacatatgcacagagacacacacatacgcgggaatggaatgg

SEQ ID NO: 514452 - DNA, 694 bp, Homo sapiens
agatcgagctggtaccagattcaaacagtgctctcccgccggcgttaggattctctctcatctacctgtgtcggtttgcggtacgggtacatataacacaatagcggcttttcttgacggctccctaaccgacttccctactaattttcggtacgcttaacgttttccccttgtatggtgggttttcctcccatacaggtacttcgcttgccccggtttttgtcctcccgggttcggtttcagtctccgtgtccccacagttctgattatatgtagtacaggaatctgtacctgttatccatcgactacgtctttcgaccttgccttaggccccgacttaccctgagtagatcagctttactcaggaaaccttagatattcggccaagaggattctcacctctttctcgctactcattccggcattctctcttcttattactccaccattccttccggtatggcttctacgcctctaagaatgctcctctaccaatgtatataatacattcctaggcttcggtgttgtgtttagccccggacattttcggcgcaggacctctcgactagtgagctgttacgcactcttttaatgtatggctgcttctaagacaacctcctagctgtcttcgaaatcccacatccttttccacttaacacacactttggggccttagccgtaattctccgggacg

SEQ ID NO: 514453 - DNA, 144 bp, Homo sapiens
gggcaaaagtgtatattttgttaacaccaattccaggctcagtattgtgcccggggacccccaggggcccccccgcccattccgttcccttacccaagggcttgtgacgcggaaaaaaccgattaaacccgtttgagaacctca

SEQ ID NO: 514454 - DNA, 852 bp, Homo sapiens
  misc_feature (207)..(207): n is a, c, g, or t
tataaaatttttagtttaaaaggggaaataggttaggagttagcggtggtaagggcgatgagctgtggggaggcaagtgggggtgggtttgggtatgtctcaacacgtggtccatttctattattaacgctgtgtaagaatatggggcagtaggtgtgcattgagggtggcgtcggattaggcgttaggctagcaaagttagagagngttaagggagggttgaagagggtgggctatgaagtgggtaggggaattgaatgagagggcataatgtgggttctaagggtgaaaattcttcgggacaatacagtgggtcccaatatgtgggcgccaacaaaagacgcccgcgatataccgcggcggggcgcgcagagacccactcccccatagcgcgcagcaaagcgacagcggcttgcgcaagtatgggcacactaacaagaggggggcggaatacacagcacacaacgtgtattacacaccagcgtgagcgattccaccccacggcgcagccccgccacaaacaatgacggtccaccatacagcggcgacaccgaacgagcgagcacgcgaggcaagaccaacaagacgcttgccgaagcacgtcacgagcacacgacgaaacacccgcccgcaggcacagccacagcccaacacagccgggacataccacaagcatcaacaccagctagcggccaaaccacaaaccagtaggccgaaccacgtagaggcacccaacccgggtcaccaacgcggaggagccacggccagacgcgggcgccaaacccacaaccaccgcagaggcgaccaccataacacatacacacacaaccagcccacaccagagagagtgcc

SEQ ID NO: 514455 - DNA, 845 bp, Homo sapiens
gaactaatcatattttatatcttcttcgaaaacagacttatccccaccttggctatcatcacccgagtgaggcaaccagccagaaggcctgaacgcaggcacatgctgcctatgtctacaccctaagtaggctcccgttcccctactcagtcggcactggatttgacccgtcacaacacaacctagggtgcactgaaacaggtctgactgactcactctcactggcccaaagaactataaagactcgctgagccgacaaggtgaatatgactagctgacagcaatagctgacatagtacagataccgtctttagcggactccaattatgactcgcgtaaagcccatgtcgaagcccccgatcgctgggtcaatagtagctgtgacgcagtacttctttaagaactaggcggatagtgggtataatacgccgtcatattcagttctcaagaccctctgacataaatagaataagctctgacccccttccttgtagctatccctgatgaggcgataattgtataacaggctccatctgactatcgagaacagacctaaaaatcgctgcattgcgatagtcttcaagtcagccagataggcctcgttagtaacagccattctcatgcaaaaccccctgaagcgttcaccggcgcagtcattctgataatcgtccacggacttacatcctcattactattctgcctagcataaggcaaactatggaacgcactcacaggcgcatcataatcctctgtcaaggacttcaaaggtctggtcccactaatagctttttgaatgagtctagcaagctcgtaactcgcttacccccatattgaactactgggaa

SEQ ID NO: 514456 - DNA, 421 bp, Homo sapiens
ctggggaatagagcaaaccagtcttttaaatttgacacccaagggtgtgtggaccccccattgtaaaattcgccccctaaaccattggtgggcccgatcaaaaaattggggtgggcggtggcccggtttgctttttataaacccaactctttttgaaatccccccaaaaaaaatttaacccccaagggggtccccttgttttaattttgtccccccgggcaaggggcccccaaaattcccgttttttttttcccaaaagtttgggcaccggataatttgccaaaaaaaaaagaaacttttctttttttggggttccccccaaaaccattccaaagccttttgttttttttttttccccattcccatttccaaatgttcccaagggggtataaaaaaaaaacttccccccccttttttttta

SEQ ID NO: 514457 - DNA, 135 bp, Homo sapiens
  misc_feature (20)..(21): n is a, c, g, or t
actccagaggatcccgtgtnncagccaacaggatacatttctacagctagcaggataacagatgagttaaggggcctctctgaattcgcttcatcagatgcgtgacataacctgctatcctgttggctggcgaca

SEQ ID NO: 514458 - DNA, 209 bp, Homo sapiens
tggagtgatggcgaccggtaagtttactgtggccagtgtactcatggacctacttgtaatcgccacccttacggtatcatccatgagcctgccctctatacttatcatcttcacaatactaatgctactgactatcctagaaatcgcgtggcgcctgattcctaggctacgtttgcacccttctagtaggtctctacctgcgcgcccgc

SEQ ID NO: 514459 - DNA, 194 bp, Homo sapiens
cacacgtaacgcctctttcaacttttatcaggttcagtggtacatgtgcagatttgttatataggtaaactcgtgtcacgaggctgtggtatatagaacatttcatcatccaggtactaagcatagtacccagtatgtattctttctaaatcctctctctcctgacttccaccttctagtaggccccatcattt

SEQ ID NO: 514460 - DNA, 828 bp, Homo sapiens
tccttaacaatatgtggtataacccaacaatgaaatatccttcaatgaaaatgacgctataaaacaataaaatgtggggaatcctaaaaactttgtgagtgaaaaaaaccaaacccttcagactacttagagttatgatacaattttttggaagttcaaaaagaaagaaaatctataaaataagtcacttaagggatactattatgttatttcaaggtctttctactttcgaccaatcttcttttaaaaagagagcgggggggtcggcaaagataggagaagaggctcaatatagtattaacattaccaagccctccctataagggttttatccttaaagataggggtgaagtgagttaattatgcctgggataaattcttttgggctttccccctttttacctctttttataagacttccaatttattcctttttcaatttataggttcccctatttgtatgctttacggtgtcgcctcaccttttatacttctggcgtgggtgttcctaaaaaactaatgctcttttttttatacatggcggacgtcgcctcggtgtttacgtgggccacatctcagggggttcgggtttctacttttaaccgggggaaaaaccactggtgtgctttttctctaagagggtaatttccctcagggatcctcctaagggacggacacggcaccgacaggaattttcaagggtgttaccagggccaggccaccagtggtggtctcaacggctttatataatcccaggccttttggggagaggcgccaagggggggggggatcaacccttggatggtaactaaagttcgggacacgccg

SEQ ID NO: 514461 - DNA, 271 bp, Homo sapiens
tgtaatcccagcatcgggaggtggaggcagagaatgcttgagcccgggaggcggaggtgcagtgagccgagatcgcgccattgcactccagcctgggcaacaagagcaaaactccgtctctaaataaataaataagaaacaggatttgggcactcatccctagatgtttgaatttactgtacattccacttcactctcttatcttagaatgcgttaatgttttttcttttactttttttcccactttccagtcggaaatctacatttctga

SEQ ID NO: 514462 - DNA, 822 bp, Homo sapiens
acgagcccgcgggggtcctaaaagggccccgtgggggcaccccatgcgggaaggtcgtggaacctccacaggatccccccacttggacaaaccgaaggatctcggatcgtccgccccccgtccggatttctcccacacccacgagcacatctgcttctgcccccacaacgaaacaaacacccaggaagggcgagtatacccccacagagagaacacagcggtgtataagcgcctctctcagagaacacccggcatacagcgcgtcaaccgggaccaccttctacgccgcccgtgatgaacaggggagcaccaccagaaaggagggacggccccaaggggctaggaacgaccccagaaggctcccacgagcggaaatcctaatacccccggaggtggaccgcccgcaagcctcccgggggtgacaccatacaaatctggggaggcttactcccacggcgcatctccacgacgggaatgtcggcgttttccccccgggaacatacccacgcagggcgaaaactagtggagaagaacatcaacagcggacctcaggcacgccaccggtctgtccactcgtgtaaccctccttttcttgaatcccgattggcgagtgcaacatcctggcagctgctccttgagccatagcaaagtcgatctggtagaactcggttaccccagacatcgtggagaagacggatgggcagaggttagagacaagtttcattttgtattggtccccacaatgccccaacaacagcggggtaatggccgccccagagcaccccacaattacaaaaggggaaacgggcggcactcataaca

SEQ ID NO: 514463 - DNA, 414 bp, Homo sapiens
tccacaaggtctgaatgcggaaccaggaagaaacccaccaacccaaatgccaggagccaaaccagtatgcacaggagcacatatggctaagttcgctgagggcgcattctcgtgaccactgtgtgggatcaaagccaccaattcattcacttgctctgttgaaatgaagcctgtccctgtggcacgtgagacaggtaatgctatctctcccggtgaattccacatatgggacttgaccaatggcttcttcgtgctctggttcagccagcaaccggtccgtgtcatcttcgcgctttcgctcgcagagaggaggggcgagcaacagcgaatattctgagaccacatgcccgttatatgcctgtggtgtcatgtcgcacagcgcgcgctctccccgcgtgccgtattcctacagcc

SEQ ID NO: 514464 - DNA, 228 bp, Homo sapiens
atctaccggagcttaaattgaggtcgggtgggcggctcctgatatcaggagatcgagacatcctggctaaccagtgaaaccccgtctctactaaaaataaaaaaaaaaaaaaattagccgggcttggctggtaggcacctatagtcccagctactcaggaggctgaggcagggagaatgggcttgaacccgtggacgtggagcttgcagttgagccaagcattgggct

SEQ ID NO: 514465 - DNA, 220 bp, Homo sapiens
accgcctggggcagaacaaagagaagctacaacccccccttaatgcaagaagaaacccccaagaagaagacgaaggcaccaggaggactctctaaagcagtagcaaccaccactttgtaaaaggactcttccatcagagatgggaccaccattggggaggactaggacccatatgggactacttccctctccagggccgcagcagccacagaatggatct

SEQ ID NO: 514466 - DNA, 115 bp, Homo sapiens
tatgactgtgtgaaacaaaatgttagagctaaaatcctgtaagaggaaggtgacaactgaaaatcaaccatcatgacaaaatcaatggaaatgaggagggtacctgagctctgaa

SEQ ID NO: 514467 - DNA, 413 bp, Homo sapiens
  misc_feature (13)..(13): n is a, c, g, or t
  misc_feature (270)..(270): n is a, c, g, or t
ttaggcacatagncccaatagaacagaatagagaaccccagaaataaaggccaaatacagcaaactgatccttcaacaaagcatacaaaaacataaatttggcaaaggacacccctattcaataaatggtgctgggaaaactggaaagccacacgtagaagaataaaactgaatccccggccaggttcagtggctcatgcctgtaattgcagcactttgggaggctgaggcaggtagatcacaaggtcaagagatcgagaccatcctggnaaacattgtgaaaccctgtctttactaaaaatacaacaaaaacgcctgtagtcccagctactctggaggctgaggcaggagaatcgcttgaaccaggatgcaaagattgcagtgagccaagatcacaccactgcactccaacc

SEQ ID NO: 514468 - DNA, 148 bp, Homo sapiens
  misc_feature (67)..(67): n is a, c, g, or t
  misc_feature (134)..(134): n is a, c, g, or t
ctatgtctgttctcgtgtagcagcaactgagtctgtccatcagcagacaggcagggaggtgcactgncgtggttctgccttgctgctggtactgatacttcttgcttcagttcatctacatgatctttcctctnaatccagatcttga

SEQ ID NO: 514469 - DNA, 222 bp, Homo sapiens
ttaaagtaatgtataggcaggatcaaaatgaaacaaatataccttatcctagagagctcatagcaaatagggtacctccactgtataaactcagacctactttttgaaggtaactgctttggacctctccttacaagatttttggggttgatgtatttaattttggcccatgtctcagattctcatggtcaaagaggtcaatatattaatatacctgtggtc

SEQ ID NO: 514470 - DNA, 1901 bp, Homo sapiens
gctctgaactcctgaacgtgcaagtggcgcttcgagaggaacattctgcgcgggagcacgggccagctcgctgacattgatcagctggactcccgaaatgaatcttatacatattcgcgaacgcagtggaagactgtgagtgacgggaggcgcgacaggtcgaattcgcatggagcagctcagagatagcgtgaggcccaggccacagtgcaggagtcactcatcgcgaagacctggttcaaggcctcgaccggtctgggacgatccttgcatgtagcttccagtgaccggggtgccacaaaggatgggcagagctctactcgattggcgcagaaccactcagttggactggcacccgacggtgaatttcaccgaggaccgtgaagagcatgggagaacctagtaagcaaattccattgatggacagatctcacatggcaggatcgcacgcagttcacttcccctagtgtgcaaggaagtgtggaacctgcggggcctccattgcgagacagctttgaggactcggtgtatcaccagtaggagacagggcgctacagtctacgcaaaatgattcactccaggagtatgggcactactcaattacatctggtcgttaaaggcgaacaactccttggggagacactctcgaaacgagggaaggaatacgtccccgattgggggtgcaccgaaggataggccaaaggactaggcgctttgaaagaacgaacgctaaggagcacgaaaaagggtacttcgtacactacaacaatcaccgataccttgagaatacgcgtttccaacaccctctgacaatttggcaccaagatcaggaatcctggtcgggtagcaccattacactcagcacgaccgagggaaaggtagcccttcattatgaaaagagggttagcgctctctgagggaacagccgcagcgaaccccacacgacttagcattaggattggtcagctcatccgttgaaatatactcacacattcgcgaacagtgtgcacattccgcggtgtgacaaagtagaaccgcacaactactagaatctcgtcaggttcgcccctaggaagggcattcaggcggttcacgggcaccagtatgtatcggaacaagtgcgggaaagcgagcccgatgatggagacccgtaggaggctgaggataaaaatcaatagaccatttataatttagcgtgtgttactttcgtaacggtgcacgcagaaacgctatagaagtaccactaacatgcgtggacattagtgcatcaagattcgacggactacacgtgtaacagcatggtatgacggtgaactcgcattggaaactgtgtgccaatgatgaaaggcaatgattgaagactcaccaaagggtaggcgaacaccgtgtgatgcccgaagtaacatcgtatatactcggtgggcgtatacacgctcaaaccgaagcacgaacgacaacaccctaacccgcaagcagtcgtaggccaaatagtgaacacacgaaaggggtgtaacaacatagttaggcaacagcgagctcctcacggagcaacagcgcacggcacaaaatgttgtagacggcggtcttgacacgagagagccacaactctaaaaagtagacaattcacagacacaacacgactcgaagagtaacaccgaacaataagtaagacaacatatacaaaaccgaaacacctaaaatccaacaaacatccaccaactgctatcagacacaaacaacatagaacaaacactaagaagatagaatagaaacactatacacacaccacaaaagaaataatacacaagcataaaacaacataataaaagaagacaacacagaacactaaacaacaacacgaacaaacaactaagcagtactctactctatcctacttgggt

SEQ ID NO: 514471 - DNA, 121 bp, Homo sapiens
agaataataacggcagaacttgttagagcctccagtcgccctatcaaggaagcgccattgtagaggggggtgccttaaaacttacgggacaccgggcgcggtgtctcacgcctgtaatccc

SEQ ID NO: 514472 - DNA, 246 bp, Homo sapiens
ctacaggatccccggcaggcaagtctcgttcctcacaatggtcacagaattgtccacgagcgatgctacgcaaaacggctgagtatcaggcaggtgagtggatcttgcatccgcctaatcaatgtgctcacagctatcacattgctgacaggaaaaaaacatcccatcacgacgtatcatcgaatattgtgtgaattgctcctagacctacactgacaccaaatacacatcagaatactcagggta

SEQ ID NO: 514473 - DNA, 182 bp, Homo sapiens
atctgtggccctaacgagcaccatggtagatacaagtagacttcaatgcgacatgctctacaagtatacagcagcttacttgctagcacctagttgggccatgttcccggatttgagtgccagacaacacaaacaatataggcacccatcgccctactctgctatggaactgcgctgataga

SEQ ID NO: 514474 - DNA, 227 bp, Homo sapiens
  misc_feature (224)..(224): n is a, c, g, or t
aacgctttatacttccacgcttatacttcctcaacgcttatacttctcaacgctttatacttcttaacgctttatacttcctcaacgctttatacttctcaacgctttatacttcctcacacgctttatacattctcacacgctttatactctctcaagcgctttatacattctcaagcgctttatacatctcgtgcgccgctcgcctcgcaccgggtaccgangct

SEQ ID NO: 514475 - DNA, 539 bp, Homo sapiens
ctcgtagagctattagtgcgggaaaagctggcggactcgggacactcgcgcctagaccatgcgcttgacccgaagcaccgatcatcgccctggtcacgacgtatactcagatcgggtttggctgtagacaggcgattggacttcgacctgatgggctgagttgaagtttcttgtacgtggcccacttcacaagccggtcccgggatctagttcaggaaatccggcccgcgttggaacggttgtcagacgtgactcgtgagacggtccatctggggatgatggatggaacgcatgttctccatgtggacaaagtggatagccctgagcgatacggcatttcctcgcgcattggcagccgggcggtgccacatctcaccagcttgggaaaggcgatactcgcggcggaatctccgcagttcgtcgacgcctatctcagaggcaagggtaggaccgcatcgccgtatcggatccaaaacgttgaggatgaaagagcggagatagagaggacgcgggcaaggggatacaggttaccgagctcg

SEQ ID NO: 514476 - DNA, 462 bp, Homo sapiens
tcacgagtcgttctagacagtataaaggaggaagatagcacactggggtgtatgacatagctacaaactatcagcgtctgttaaatggtcatgaacaggctacatcctacagacctgtcagcataagaatagtctatgggacatgtgatattcgagcaatagaattgtactcagcgacaatacgcagtatgtttctatcacgcatcatgagtagatctcaaaagcatggtgagcaagataagttagatatgtaatagaatgtggagagctagaaaatgcagaatttctggtggtcaggctctcaatagaaagcacccatgaatggtgaagacagccaagacagcatgaggaagtaccattactagagtggcagtaatgctctagcatactgattgggagtggagctcacactcgcactatctctctctctctctctctctctctctctctctctcgctctct

SEQ ID NO: 514477 - DNA, 338 bp, Homo sapiens
cgtatctggcatttgcaacccattggtacctgaaaatctattagtgtaaattggaatcataccatagggaaactaatgaaatgattagaagtcatgattttccagatcttctagggattagtataaaacgataaacactttgtttcctttgtcttttgttacagactttgagaatcactactagaaatactgccttgtggtgaaggttctaagacgtgtgatcgtttccagatgagaattcacaagctactcattgtcttgcactgtccttctgagattgttaagcagattacttccttccgttttgagccaggagttgaggtggtagtcaccattgc

SEQ ID NO: 514478 - DNA, 155 bp, Homo sapiens
  misc_feature (110)..(110): n is a, c, g, or t
ccagcggcggcggcggcgggagctggggcgcgggcccgggccgcctctcccagagcgcggggccgggcggcgggcgcgcccaggcagcggctgcgagcgccttcccgcgnccgtttcccgcgccccccgcgccgtgcccccgtttgcttggctcg

SEQ ID NO: 514479 - DNA, 121 bp, Homo sapiens
cctcgacatcgacggtatctcactctctatatacaggtatatttcaggtacctactacatagccagaactgtcttgggcacagaaggtatttcagtgacaaaaaaagaaataaattcagtc

SEQ ID NO: 514480 - DNA, 579 bp, Homo sapiens
atttttcaaattgatatttaggaagaattataactaatacatttgaatggaggtcctgggatatttggatagtaaaataaatagccataaaaggtcctagacttcttattgtgaagttcaaaatttcttattttgaaaaagttgacaatttatgagcttgtgaagattgtgctaaaatttaaaataatttatagctccaaaaacaaaaatatactgtgtatattgtcacagagaaaaaaaatgcaaaatttataatagagttacattaaccttgtgtgtttacctttcactgatttcttatatggtataacattaaagttcaggcattctatggggagaaaaggccctccccaaccgacccgccacctgccacctctgacggagtgggcagaagttagtctgtgctaagatagtactgagtccccagatgtgtatactgtaaattacagtataatgccaaatgcagcaaaatcttccagctgtacgttacaagttgtggtcatttggaagcttgacatttaagttgtgccattatgttaaaaacatctaaataggtgtagttctcaggagtagatggta

SEQ ID NO: 514481 - DNA, 417 bp, Homo sapiens
  misc_feature (43)..(43): n is a, c, g, or t
  misc_feature (98)..(98): n is a, c, g, or t
  misc_feature (159)..(159): n is a, c, g, or t
  misc_feature (252)..(252): n is a, c, g, or t
  misc_feature (254)..(254): n is a, c, g, or t
  misc_feature (335)..(335): n is a, c, g, or t
accccatttaatttcttcaaagaaaaaaaaatggaggcaggtntaagagccagagccaacttttttccccaatatatcataccagcttttggaggtanagatttttttcttattaaaaaatggcttttttttttttttggccaggtaaggtggctcacncctataatcctaggactttgggaggctgaggcaggcagattgcttgagctcaggagttcgagaccagcctgggcaacatggtgagaccccgtntntacaaaagtacaaaaattagccaggcgtggtggcacttgtctgtagtccagggtacttgagggcctgaggtagggggatcncttgaacctgggtggtcgaggctgcagtgagccgagatcgcgccactactccagcctgggtgacaaagtaagaccctgcctc

SEQ ID NO: 514482 - DNA, 496 bp, Homo sapiens
  misc_feature (52)..(52): n is a, c, g, or t
gactctagacgatcccatgatctggaaaaggggagtagggtaacaaaatctnacttgggaaaagaattggggaagaaaacaacaaatggcttcattcaagggtggggacagggaaagaggtaaggccagggaccggagcatttcacattactaaactaacttgggaagctgtaagggaccctcttccactggccttaagaagagaacccgattgctgatgggagaatccccaggagggagaagaggaaaaggaacgtggctgggaggaggcaatagcccctttctttccgggcacaggaaggcagccagggcaccaggtccaggcagtgacctcacaaggacagcacagtttttgcagcttagagatcacccaccttgtccctaactagctactcattctgcccagcgctggctggtgtagggccactctccggccccgagggagtggatggctctgtagcctggggccctgcctcttcttctgaggctgcactag

SEQ ID NO: 514483 - DNA, 364 bp, Homo sapiens
gaggatccgcccacatttgtcaggagttgacaattagtccgcctgtatccgctgtactcgatatgtacagataccattggtggccaactcgatttgatgtgtaagtggagggatcgttgacgtcgatcggtcatgtaaaggatgcgtagggatgggagggcgatgaggaccaggatgatggcgggcaggactagcttcaaacggattccgattgcctgagcgctctgagactggtgcggatgagttagatcggtcggtgatgtggaaaaaccgggggcgtacaggactaggaagcagattaggaaaatgattatgagggcgtgatcatgaaaggtgataagctcttctatgataggggaagtac

SEQ ID NO: 514484 - DNA, 191 bp, Homo sapiens
aaaaaaaaaaaaaaaaaaattcagccgggcttggtggggggggcctgtagtcccagctcctcggggggttgagtcaggagaatggggtgaccctggtgggtggggcttccagtgagccgggtttgtgcccctgctttccagcctgggtgccaagaggggggctccccccccaattaatttaatttaattta

SEQ ID NO: 514485 - DNA, 461 bp, Homo sapiens
ccccttggcacactctggctaccttctggttgtcttctctccctctcttccacctgctgcttgcctttgccactgtgtttatatcatccagatgaggtgttggcaaactatgtctcatgttggcatccttttttaaaataaagttttattggaacacagccttgccatttgtctgtctgtggctacttttgtgctacatgactagatgcaacaggccacatggtccaccaacctgtgtattcaccatttgtcccttgaggaaatttgctgacccctgctctggatctgtgctaatatgatagccagtttagtcttagaggctgttttagcttaagtaaaatttaaaaattagttccttagtcacattagccacatttaatgtgttctatagccacgtgtgactggtggctaacatattgggacaacacaggtaaaagatattttagtcattaaagaaagtg

SEQ ID NO: 514486 - DNA, 370 bp, Homo sapiens
acaatgaaattaaaaagaaaaataaatatggacaaaattgactttacattcaaactgttgatttatcttgttgtattgtgttccgagtatcggaaaataaattattaaggttcagaaatcagaagtacgtcgtatgcatgaaaggttttagctaatggaaacttgctcctccggttgcaacacaaacacgctaagctgcggcctcagcttatctttccaaatatgcaggccagatccaacgtccctttgcttgctattaatctcaaccacaaccaggatctccgttaaccggttaacctcgatattcacagtgaattccccattgtggccctccaacctcaccccccaatcccccttctgtcgtcttctc

SEQ ID NO: 514487 - DNA, 358 bp, Homo sapiens
  misc_feature (321)..(321): n is a, c, g, or t
  misc_feature (334)..(334): n is a, c, g, or t
ggtttcttggcaccataatcaatggctgcacttgatcttattggctgcagctccaatatgggggtagggttttgggttcctcattatttcatgaccttctactccaaacctctacatatcaacattaaatatcagtacatgcatcatgattgctctgcaaagccagcttcagacaagctcctaaacctccagtcagactgtggccccaggtccctgagtaaagatcttgggagccaccactgggccagatgagaagtacttgagagacccagcatgaccagcctctcctggcaggagcccccaaagtctctggagcacagnctgtgtaagaacncaaataaaacaaatacagaagcca

SEQ ID NO: 514488 - DNA, 284 bp, Homo sapiens
attggatagcggatagggtcatgattggacacaccgactcggtgaggctgcccaggaacataaggggtgacttcagcgtacacatcagcaggaatgtcatccacaccagcgactccgtggaggggtgccagcggaagatccagctgtggttccagagcagtgagctggtgagctgggcagacggtgggcagcacagcagcactcacccagcctgaggctcaagcttgccttaccaacccatcccccacgcagggccaactacctccgtcagcaagaacccaagc

SEQ ID NO: 514489 - DNA, 841 bp, Homo sapiens
  misc_feature (11)..(11): n is a, c, g, or t
  misc_feature (64)..(64): n is a, c, g, or t
  misc_feature (80)..(80): n is a, c, g, or t
  misc_feature (94)..(94): n is a, c, g, or t
  misc_feature (99)..(100): n is a, c, g, or t
  misc_feature (114)..(115): n is a, c, g, or t
  misc_feature (119)..(119): n is a, c, g, or t
  misc_feature (148)..(148): n is a, c, g, or t
  misc_feature (154)..(154): n is a, c, g, or t
  misc_feature (162)..(162): n is a, c, g, or t
  misc_feature (166)..(166): n is a, c, g, or t
  misc_feature (177)..(178): n is a, c, g, or t
  misc_feature (234)..(234): n is a, c, g, or t
  misc_feature (246)..(246): n is a, c, g, or t
  misc_feature (250)..(251): n is a, c, g, or t
  misc_feature (255)..(255): n is a, c, g, or t
  misc_feature (264)..(265): n is a, c, g, or t
  misc_feature (267)..(267): n is a, c, g, or t
  misc_feature (273)..(273): n is a, c, g, or t
  misc_feature (307)..(307): n is a, c, g, or t
  misc_feature (637)..(637): n is a, c, g, or t
  misc_feature (660)..(660): n is a, c, g, or t
  misc_feature (673)..(673): n is a, c, g, or t
  misc_feature (679)..(679): n is a, c, g, or t
  misc_feature (835)..(835): n is a, c, g, or t
tttcctctggnggttctgccactttaacttcaaaccggtcctggacgtcattggggtttttggnatcattctcgtcaggnacaaaggtggtggntaggnntttggtgccaaggnngccngcccggggcacccggtgcgggtgggtgtncgggtnctcaggtntgtngtagttaaagnngatgttggttcgctcgttgttcatcccccggccaaacagattggtggccaccaggntccgccgctggngatnnttgngctgctganngngtgagnggggctcctcctgggccatgccccggtggatggngatggccgggaagttctgctccacgaggagctgggccagggccatgcagcgctgcactgacttgacgaagattatcacctggttaaactccagcacatccaagagatcaaagagcttgcggttcttctcactgtctttgagtttgacgtagtactgctgcaggccgtgcagcgtgagcttggtctcgtcgtccacaaacacctccatgggatcctgcatgaacttcctgcacacaggccggatgtccttgctcagggtggcgctgaacatcatgcactgcttctcgtgtggtgtcaggcggaagatctcctgcacatcccgccgcatgtncagctgctccagcatcttgtcanactcgtccagcanaaagtntttcacattctttaggctgaagctcctattccgcacgagcgccaggatgcggcccggggtcccaccacgacatggggacagttcttcttcaacacttcttcatccttcttgatggagagacaccgaagacacagaaacttgacgctgggcatgtantggaaa

SEQ ID NO: 514490 - DNA, 284 bp, Homo sapiens
cggatccttgtcgacggtaccaacacacttcatccaaaagtctgttcaacagatggcaacgggtagcagtcacttcacaatctgatgcagtggttccgtgagagcgtggcagggctgtgaaaacagccatttttcctaccctaattgtgggtttgttgctcaagggaggaaacgatattacgccaattacaaaggcaggaaaatctggcaggttcctcctgctattggtggccttcagaaacacttttccaaatttttcctgggtccaaatggctcctggattt

SEQ ID NO: 514491 - DNA, 287 bp, Homo sapiens
tgtatcagaagactgtaactagggctgtgggaattatgaaccaggaacagtggatgaaaaccaatatatgtcataacactacaaatatattttactgatgtatacaattagaataccgagttctaaagtcacttcaaataattatattctctggtcattttactaattttctgtaaagttaggtttatttgtttcattttgtattcattttgagggctaaaaaattatattgctaagaatgtgtaatagctattttgaaaagttagaatacagagatgtataaaaag

SEQ ID NO: 514492 - DNA, 723 bp, Homo sapiens
acttgttccgttggtcaagttatcctagggattgcaggtgcaatcctattcgtatagtcgatatcaagaatagggtttacggactcgatgttggatcaggaatcccgatggtgcagcgctattaaaggttcgttagtcaacgattaaagtcctacgtgatctgagtcagaccggagtaatccaggtcggtctatctattcacagtaccctcccgtgtacgaacaggacgaagagacaataaggcatacttaacaaagcgcactagcccgcagagaaaatgagtatcagtgctccaacattgagcaattatacaaccaacagcccagcccagaaccagaggacggacaagactaacaacaaaacaaacgggcggcgcgagcacaaaaggagccacgagaaggggacccaaagaaacaacgcggaaaacccaacaccaaccatgtggctccacaacaagtgggcgaccccccaacgaaacggcaagcaccacacaattaaaccagccgaaagaacaacatggaccgagacgccatgcacacccgagacgaaatagggacacaccactgacaaacaagcgagacaatagcaggaaagggcacaaagaaaccacagtgtcggtggggacgagttaccacggcacctcaacgaacagcaccacgaaccacaagcagcaacaacggaacccccagtcagacagtacacacggggctcatcagccgtcac

SEQ ID NO: 514493 - DNA, 903 bp, Homo sapiens
  misc_feature (21)..(21): n is a, c, g, or t
  misc_feature (190)..(190): n is a, c, g, or t
  misc_feature (225)..(225): n is a, c, g, or t
  misc_feature (248)..(248): n is a, c, g, or t
  misc_feature (257)..(257): n is a, c, g, or t
  misc_feature (270)..(271): n is a, c, g, or t
  misc_feature (275)..(275): n is a, c, g, or t
  misc_feature (296)..(296): n is a, c, g, or t
  misc_feature (301)..(301): n is a, c, g, or t
  misc_feature (309)..(309): n is a, c, g, or t
  misc_feature (313)..(313): n is a, c, g, or t
  misc_feature (315)..(315): n is a, c, g, or t
  misc_feature (327)..(331): n is a, c, g, or t
  misc_feature (339)..(339): n is a, c, g, or t
  misc_feature (347)..(347): n is a, c, g, or t
  misc_feature (351)..(351): n is a, c, g, or t
  misc_feature (357)..(357): n is a, c, g, or t
  misc_feature (370)..(370): n is a, c, g, or t
  misc_feature (372)..(372): n is a, c, g, or t
  misc_feature (379)..(379): n is a, c, g, or t
  misc_feature (383)..(383): n is a, c, g, or t
  misc_feature (409)..(409): n is a, c, g, or t
  misc_feature (419)..(419): n is a, c, g, or t
  misc_feature (424)..(424): n is a, c, g, or t
  misc_feature (431)..(431): n is a, c, g, or t
  misc_feature (437)..(437): n is a, c, g, or t
  misc_feature (489)..(489): n is a, c, g, or t
  misc_feature (499)..(499): n is a, c, g, or t
  misc_feature (505)..(505): n is a, c, g, or t
  misc_feature (586)..(586): n is a, c, g, or t
  misc_feature (713)..(713): n is a, c, g, or t
  misc_feature (725)..(725): n is a, c, g, or t
  misc_feature (741)..(741): n is a, c, g, or t
  misc_feature (784)..(784): n is a, c, g, or t
  misc_feature (894)..(894): n is a, c, g, or t
aatgttcagtacaatgcaganaataggacagaaaatgtataaagctattgttaatattttagaaagataaaatctcttctcactaaagaaactagatgactttatgcaattaacaagcaacgatattttacctaagaataacttgagtttgtgtgatttaagtgtgaattaatatattgcacctttttanagtctgttcaagatctaaaactagaaacaatagcnacttttatttccccacataaacnatgaaactnttacatggtaagnnagangaactctcacacactgttggnagggntgcgaatnggtncngccattatgggnnnnngtacaggngttcctcnaaanattaanaataaatctatcntntggtccngcgntcttcaccctcactactgggtatatngccaaagggnatggnatcggtnggttgnggggacatctgcgctcccatgtttattggggcgctattcacaattgcgaaantatgggatcnacttanatgcccatcaacaaatgaattaacaagggaaatgtggcatatatacacaatagaatactacacagccataaaaaaaattanatcctgtcatttgtgacaacatggatgagcctggagaacattatattaagtgaaataagctgagaacagaaagaaaaatactgaatgatctcactcatatgtgaaatctaaaaaacttgatagtggntaccagagactngggagaacaggggggnggggaagatgaggagaggttggtcaatgggtataatgttacanttaggtaggaggaatacattctggtactctatcacacagtaaggtgagtatagctaacaataatgcattgcatatttcaaatagctaaaagagatgattctgaatgttcncccaaaaaa

SEQ ID NO: 514494 - DNA, 896 bp, Homo sapiens
cgggcatttctgactgactcggtattttccctgcgggtttcagacgcaatgaccactcggggtactaaacctcccacatgcttacgaagcttgccccgctccctcttcccgaacgacgtcatgtggcgctactcgtctacttgccttgcgaaggaatgatgtatctaacaggaaatgctaccatggcgcgtacttatcagtcaatgaaccgcgccaaccagagtgctggtaagtatgctactgaagtctgcctgtggcccctgcaccatgatactgattcatctccgcacttgacctcttgacttgttgtcagtcacgatcccggttgcacagcatgggaccactggcgcctcctggtgagagcctcccgctgtatcacccctgtcctctacggtccaaggtgagcttcatgtctgctctttgcatccatgtcctccagccacaccttgcatagccatctgttccacctatgacgagagcctacctagtcatgcagatcggccatcctcgaggataggccaagaggtgacccagggtggtccccagggcgttctaaaaccccacctagaccaccctccatgtcaggtactgagcaaggccccagatccttctctctggaggaagagggaagcccaggggtcctgtttgtaacaacaagcggatggcaacagctcactcttccagagctgtctctgcctttatcctgcgcagatggggaggaagccccataactctgctgtttccccgcgtggaggaagcccacccagcaagctcatctcgctaccccaggtaaaaggtgctcgtttcgcctagggtttgaattccagcgctgccacttcctctatgcacctccatggcaagtttcttcaattcccaacatttaaagcgatggcaca

SEQ ID NO: 514495 - DNA, 246 bp, Homo sapiens
acacacacacaaacaacagaatatggtaggttctctagtaccaaagtcagaggtggagggtagtacttactttcgtaagacttgttgtacttttttcattagttacctctctattctcatgtccaattaggatcaagaaaagaattgcttgagccaagttcatcatgaaagtccagatatgcaagtcaggtgctctgtatctagttagatctacatagatgacaccactaccttattcatactagt

SEQ ID NO: 514496 - DNA, 117 bp, Homo sapiens
cgctcctaccgtacataggctcaggctcaacacagtcatacatagccaacatttaacagatgttgacaaaatggttactaataatattatatacggaaccagccagagcctcatgtg

SEQ ID NO: 514497 - DNA, 405 bp, Homo sapiens
gtaataaaatttttaaaactggcctgtggatttctttaaaaaaaaaactggaaagtcttgcttgaattcatatacttggaagcgaatagttcctgtgttataaacgtgaatatgaataagctagataggaacaagatggttctaagtaatctgtatgaagagagacttctggacaatgttataaatattatgaaaattcacaagtagataaatgtagagctacagaaaaaaaagatgtcaattttatttgtgtttgtttctgtccttcttacgaattccaggtactaatagcaatgtatacttctttgaggagcagaaatgccagttgttctcactataatataatgtatttctagactatatatattcttccaaatcaagaataaacttttaaaacaaaataaa

SEQ ID NO: 514498 - DNA, 384 bp, Homo sapiens
acccccagcacgcatagatattaccggttcaaagtggaagacaagtgagagatatttcataaaaatttcggccagaacaaaaaaaaagggaaattatttttccttaaagacaactagaaagaaaagggtccccccaacccacctttttttttttttactttgaaatctcccacccagacgggtttccgggggtaaatctgtttctgtaaaccctaatttaaggcctttatattttttctttgacgagagccatccataaaaggccccttgtttttaacagggcctgccttccaggaacccacccaattccagaaccggggacctaaaatttggaaaataagttaccgggcctgaaaaacacaagccttggggttcaaggggggg

SEQ ID NO: 514499 - DNA, 1112 bp, Homo sapiens
  misc_feature (11)..(11): n is a, c, g, or t
  misc_feature (22)..(22): n is a, c, g, or t
  misc_feature (39)..(39): n is a, c, g, or t
  misc_feature (132)..(132): n is a, c, g, or t
  misc_feature (174)..(175): n is a, c, g, or t
  misc_feature (209)..(209): n is a, c, g, or t
  misc_feature (239)..(239): n is a, c, g, or t
  misc_feature (242)..(242): n is a, c, g, or t
  misc_feature (281)..(281): n is a, c, g, or t
  misc_feature (284)..(284): n is a, c, g, or t
  misc_feature (287)..(289): n is a, c, g, or t
  misc_feature (294)..(294): n is a, c, g, or t
  misc_feature (297)..(297): n is a, c, g, or t
  misc_feature (314)..(314): n is a, c, g, or t
  misc_feature (330)..(330): n is a, c, g, or t
  misc_feature (342)..(342): n is a, c, g, or t
  misc_feature (346)..(346): n is a, c, g, or t
  misc_feature (359)..(359): n is a, c, g, or t
  misc_feature (439)..(439): n is a, c, g, or t
  misc_feature (988)..(988): n is a, c, g, or t
  misc_feature (993)..(993): n is a, c, g, or t
  misc_feature (995)..(995): n is a, c, g, or t
  misc_feature (998)..(998): n is a, c, g, or t
  misc_feature (1018)..(1018): n is a, c, g, or t
  misc_feature (1023)..(1023): n is a, c, g, or t
  misc_feature (1026)..(1027): n is a, c, g, or t
tgcgaaaagtnactttcaatgnactgaaccagattattntcatagaactgggcaccaatccgctgaagagctcaggaattgaaaatggggctttccagggaatgaagaagctctccaacatccgcattgctnataccaatatcaccagcatacctcaaggtcttccaccttacnnaacgaaataacatcttgatggcaaaaaaatcagnagagttgatgcagctagcctaaaagaactnaanaatttggctaagttgggattaagtatcaacagcatatcngcngtnnncaatngcnccctggcccacacgccncatctgagggagcttnacttggacaacnacangcttaccagagtncctggtgggctggcagagcataagtacatccaggttgtctcccttcataacaacaatatctctgtagttggatcaagtgncttctgcccacctggacacaacaccaaaaaggcttcttattcgggtgtgagtcttttcagcaacccggtccagtactgggagatacagccatccaccttcagatgtgtctacgtgcgctctgccattcaactcggaaactataagtaattctcaagaaagccctcatttttatagcctggcaaaatcttgttaatgtcattgctaaaaaataaatgaaaagctagatactggaaacctaactgcaatgtggatgttttacccacatgacttattatgcataaagccaaatttccagtttaagtaattgcctacaataaaaagaaattttgcctgccattttcagaatcatcttttgaagctttctgttgatgttaactgagctactagagatattcttatttcactaaatgtaaaatttggagtaaatatatatgtcaatatttagtaaagcttttcttttttaatttccaggaaaaaataaaaagagtatgagtcttctgtaattcattgagcagttagctcatttgagataaagtcaaatgccaacnctagntntgnataatccccacattactggnaaagnctnntttgaatgggtgaattcaaaacaggctatgtaaaatttttactaagggccttattttgaaaaaataaattttaaaatcccttcca

SEQ ID NO: 514500 - DNA, 146 bp, Homo sapiens
cgcccagaatctcgtttacactagatgacatgtacataaacgcccaaaggaagttgcttggacagtataagccatgctcttactgtaggtcacaaagttgatctgtcttatcaaggtccccaaagtccatcagagagaggcagcag

SEQ ID NO: 514501 - DNA, 780 bp, Homo sapiens
  misc_feature (23)..(23): n is a, c, g, or t
  misc_feature (107)..(107): n is a, c, g, or t
  misc_feature (656)..(656): n is a, c, g, or t
  misc_feature (661)..(661): n is a, c, g, or t
  misc_feature (663)..(663): n is a, c, g, or t
  misc_feature (666)..(666): n is a, c, g, or t
  misc_feature (686)..(686): n is a, c, g, or t
  misc_feature (691)..(691): n is a, c, g, or t
  misc_feature (694)..(695): n is a, c, g, or t
cgcccccccaccccaccaagccnacccccccggccccccccgacccgggtgatagcgctggttgtctcccttcataacaacaatatctctgtagttggatcaagtgncttctgcccacctggacacaacaccaaaaaggcttcttattcgggtgtgagtcttttcagcaacccggtccagtactgggagatacagccatccaccttcagatgtgtctacgtgcgctctgccattcaactcggaaactataagtaattctcaagaaagccctcatttttatagcctggcaaaatcttgttaatgtcattgctaaaaaataaatgaaaagctagatactggaaacctaactgcaatgtggatgttttacccacatgacttattatgcataaagccaaatttccagtttaagtaattgcctacaataaaaagaaattttgcctgccattttcagaatcatcttttgaagctttctgttgatgttaactgagctactagagatattcttatttcactaaatgtaaaatttggagtaaatatatatgtcaatatttagtaaagcttttcttttttaatttccaggaaaaaataaaaagagtatgagtcttctgtaattcattgagcagttagctcatttgagataaagtcaaatgccaacnctagntntgnataatccccacattactggnaaagnctnntttgaatgggtgaattcaaaacaggctatgtaaaatttttactaagggccttattttgaaaaaataaattttaaaatcccttcca

SEQ ID NO: 514502 - DNA, 757 bp, Homo sapiens
ctgtgcacgggctgcttccacatgccccaattcattcggcttcactctgcacgtccgcacggaggcggctggcgactcgggagacggtgcggggccatctccggaggagagaggatttcttgaaaaccgtggaagggagggagctgcagagtgtgaaggccccaggaggccttcctcaagggaactcgatcatcccatttgtatccagaattgggcacatcgacacggcgaagatcaccagcaccgtgatcgcccatgggccacatccatcgagactagctggggtcattggctggatggggtggtgttcccaggcattgctgaatggagctcatcgcggagatccacagaaggtctctgggaagagagagagaatgcgggtgtcgaccccacgctcgctatccccaatgatccgagaagggatgcacccccagcggggagcggggcatgacagcgaatccctgggcaagagagagtgccagaggaggctaacttcatgagtgcggtccccgtggatggtcctatgggctggcatgctgcggggcatgggctggagacttgaggaggtgcatagtgcgagcttgcaatcaggtagtgaagccccgtggtcaactcactgaggcccaaggggttagggcggggttgctagctgagcgaggcccagggcttgaccgcaatggccctcccgatgctaggccagatgatggcagcaaggaaagagacagctcaggtgggctgagagcaggtgcagcggcta

SEQ ID NO: 514503 - DNA, 1072 bp, Homo sapiens
gtggagtgtgtgcagcgggtggctactgacagcaggaccgtggagtgcctgcggcaggggtggcagtggtggctggcgtgctggctggccggtggatggttacaaccgcagcagtggtggctatcaacccagaggtcgtggaggttggccggtggaggacagaggtgtgcatggcgcgtgaagatgaccccgtgagtgagctttcaacgtaacaatctctgcaggtggcaccgtcgagaggacccaagtgactcacagtctagtgcagctccggagacagggataaatttcagcacaaacagagcaccaagtcctcttgttgcaaggcgcttgggatgacgaaatgttacagattgacgatcgtgttggcatgaagttacttcagaggcaggattcggtcagttcactacaagagcagaacaatgaagaacgtggaacaagccccattgattcaagtgcggtaccacagggagccaggggaagacttggaccaaagcttgaacaggggacagagggccacacgtgctcctccttgtggagggaccccccaccgtgtccagccttagagggacaagccttgattggcacctgaggtttcctgacatggtccagaggaaattactcccgcgcaaaacttccgctagtccagaggggtctaccaattcatggcataactgttccggtccggagggagcgaggaaaccgtcgtctcgacgtccctgcgcgggaatagaataggcgcgcaaagttgaggatccggaacagcgcacagtggaccccggactggagagcacgaaagctagacggcgcaaccccaccagatttgggaccaccgatgccggaaatgcacgaatcaattggcacagtcggcttgggatggagccacacgctgagcataggacggtggcggacgaggccccgcaacccaaccgcgacagttatcccccacgtgatgcggcaatgtatttgggctgggccaagggactggggccaggagcacacgggccaaccacgggacggcgttgccggctgaacatggggacaaatatgtcaccgattacagtcccgccca

SEQ ID NO: 514504 - DNA, 110 bp, Homo sapiens
cctgcgtccacgctgccaagcctgtacgaggtttgggcctccctcccaggcgtgggagttgagggtgggcaggccaggagcaggctcatctgacagccacagattgcctg

SEQ ID NO: 514505 - DNA, 1288 bp, Homo sapiens
tagggtaaaaaatgttcatttaagggattatcacttccactacacgtgaggcctcgtgaaaagtgttcacaaattttctcaaaagcagcagggggctacacaattttttaccacaacacaaagcaaaaacagatctggccattgtgtggtcatctcgtgcgtgacgagtgcataataggtgggggtttcaaagcttttccacttgtgttataaagtgcgtgcttctgaacgttctccagtgacagaacttacacgcttggggtgacatcttttatactccacaggctacaagaggtctgaagacattggcgatatacaacacccacggagagaactcctttgagctcacacaggccaataccacccaagagatggctcacccacaatacacacacaccacgattcctcatccggagccggtctcacccctatgcacggtggtccatcacggagtagatcatcccgtggcccagctgtgatcccacagacgatatggcggtctcactgagcaaagtacaccacgacaacaaacgacatctcatcccgtgttaaaccagaccctatataaccgctcccctctccaccacacacagcacgttctcacgagcaacgctaacgcgcacagcggcgtgccatctgcccagccaacgcgggacactcgaaaaataaaggccctccccccccctgcagactcacccccacgacacacgagaccaacctgcacacccagacacgaaacgacatagctaccccccgatgccgccacacatcaccctcccccagcacgagtgagcaaaacaaccagagccctgcacacaacacaccactggccccacgcaaacaacaacaagggccccaaatcgggccccatccgagatccccctggaacaacacaaaaccacaagacaccaatacccacaaaaatcaccacatgacaacacacagacgactcagaaacaaactcccccgagaaacgaaaacacaccaacaagacagctaggtgatcaggaacaacgcccagaagagtatatagcaaataacggaccagaaagacaccgacactccgtgggacaccaaccagacgcgctatgcgaacaaaccaccgctccaaaacagaccgtcaaagacaggcaaaataccgacccccaactaagagaggctactatgtgacaccacaccgcacgcctaggcaacaccacacgcaggtgcagctaactgcgaaggagcccccccagccatcggccaaactatatacggacagcggaacagcctacgaaaggaagagaag

SEQ ID NO: 514506 - DNA, 634 bp, Homo sapiens
ggcacgaggcagtccccgaggcttggcaaagcaggagccctctgtggcagtgcttgggtgtcggggctctgaggatccggcctcacctctccacggggtcgacgggaacgtctccggatgccaggagtcgcaaagggccgaccacgatgaggaaaccccaggcggggacgggggaagcagcacgggatcccagcctcaggcctgcccggacggtgttggttggggatcaagatgagtacactgcagccgagaacaagagccccagaggaactctttgtcccacaggagagcagcggatccacgccagagaagatgcttgtatcttttcacggctcttctctgagaaatgaagccacaccacgatacagtcagcaagaggaagccgggaatgggagatggcaacagtccctgtcactggaacgctggcctccctggacaagccaccctttaggaaccccaccccttatgcctgtggcggtggcacggtgctgtatcctgcctgggctctggcctctactctctcctccctctggctctgcctcccctgtttctcaggggcctggatgcctctcgctctggccaaatgccttcaaaaaagatgacttcccagtccgtcagggagacacttcctgga

SEQ ID NO: 514507 - DNA, 394 bp, Homo sapiens
  misc_feature (60)..(60): n is a, c, g, or t
  misc_feature (95)..(95): n is a, c, g, or t
  misc_feature (100)..(100): n is a, c, g, or t
  misc_feature (123)..(123): n is a, c, g, or t
  misc_feature (148)..(148): n is a, c, g, or t
tatgtggtgaaagctctgagcctcacacctgttgtctgtttgctaaaaaggaatttaatnagcctggttttcccacagcagtttctcccatgatnatacngggatccacaccggaaccgcatntcgatggcaaggattttaagcatantgtcggttgtgagctcatacgttttgtcggggtcggtggcctgggggatccctaaggtcaggcagagcctctcaagtttcttgtgtctgggcagtttatcaaagtcgacattgaagggcaccctctggagcagcaggccctgtcggtggcagcggtgtacaatgaccggccgtgtgtcgggatcgtggcctcggagcgaacaggtgtcggaaagtctctgaacgtgaagaggttgcacgaccaaat

SEQ ID NO: 514508 - DNA, 137 bp, Homo sapiens
tcctcttctatatctacagcacagttaggcaccccctaaatgggaatcagaagctatccaccccaccccacatttacacatcccacattgatctggaggcagacgagatactccagaacgccgggacagggagctga

SEQ ID NO: 514509 - DNA, 213 bp, Homo sapiens
gagctgatgctgcaggtctttctaaggatccactaaaagctcctatattacgtatgctcctcccccacagacccgcacagcacagcccagaagcgagagtgagcaaaccaagaatgagaatgaagaagacaaactcactgacatggaataaactggcttgtctgctttgcacaaaggcagtttcccaataaacgaagttctagatccaaacac

SEQ ID NO: 514510 - DNA, 319 bp, Homo sapiens
gcaactgttgcagagatggaggtactactacggagtatatgggaactgtgcctttgagtttcctcaggctgctggagtggaaactgatgactcagacaggaaaggggaggcccacagacaatggtagccctggccatgagccttgctatatgtctatattggtttctatagaggtgggatatccctatgctgcctaggttgacctttgaactcctgggctcaagcagtctacccacctcagcctcctgtgtagctgggattatagattgttgcctccatgcccagctacagagggttgttctcctagattgaccctgat

SEQ ID NO: 514511 - DNA, 887 bp, Homo sapiens
cttgcctgttgtttagtgtgttttctctttcaaacaaccctctaaaaatgtaaaaaccatgtttagcttgcagttgtacaaaaactgcctcaccagccagatgtgaccctcaggccatcattgtgccaatcactgagaattagttttggttgtcgtggttgtcgtagttattgtgacacagagtctctctctgttgccctggttgtagtgccgtggctctatctcagctcactgctacctccggctcccggtgttcaagcagttctgtctcagccttctgagtagctgggactacggtgcgtgccatcatgccctgctagatttttcgtattatttagtagagactgggggtgccaccatgattggtcaggcttatcttgaacatcctgacctcaggtgatccagctgcctctgtcctccctaagtgctgagattgacaggcataagccagtgcagccagccgagaattagtatgacatgtatggttaaaccttggagtctagccatattttatgtcataataccatgctttgtgaagagcagattcatgagtaactctgacaggtttttagatcatgatctctgcatattcttccaaactggctacattttttgtcccgactttggatgtgactcccggttgtgccgttacgagtgtctctccgacaactggcgctcctcacagttcacttttgcttgacttgtttaaaccttgagatgcgtctgccccccattcggccttaatgcttccgggttccgctctccgcgtcctaacggccccgcacgatttccacaacgctcggcgaaggcccttcctgtgagacgctcttccccataagacacctcttgttcccccatcctctctttcttctttctttgtcctcttt

SEQ ID NO: 514512 - DNA, 368 bp, Homo sapiens
ggggccagatgatgattgtggatctgcgcagcaggcatgcacctagggcggggagcgtagcagagatgcttcgaagaagagtaatgcaccgagcactctagccgagagcatacaggggtccaccactctcagcgcatcgtagtgccactgaaagagacgccacgcttcggaggagagaaagtggcagacggtggagactaggtcaggcataagtcaagccccaggggtgtccacaccatcagcctgagcggcctctcaagctcgagcagtgtctgaggctcttctgtggcgcgtccgagatgagcctgaggagtggatctggcgagactcatgtggcagatggggggtagactgggcagagttcgcgt

SEQ ID NO: 514513 - DNA, 208 bp, Homo sapiens
ccacctctgagcgagttcctccatactacaagctgggggagacaccctggaggagtggaagaggcgtatcaggagaatcaggaccctggggagagctggccacggacaacatcattctgacctgtgcctgacagcaaatcttcagtactctgtgagaacccatgagcctgctgctcctgccagctgggactgacggtgatgcatggct

SEQ ID NO: 514514 - DNA, 367 bp, Homo sapiens
aaataataggactctggttatactgtagagtgtctctgatgaatggacagaattgtcctggctaactacaagctacggttcacagtggataaatgttggcgtgctttattactttctgactttttaaaatattgcttttatatcttgcagttccaatcaattttatatgaatgctattataaaattcagcgtaaaatctttacttgactagcttaaaacttgtgtgagactagtattaatcttcaatgatttaacatttctgaaaatgtcaagttctcttcagacaataaggggggtttaaattgatctgaattttcagttttctattggtctctaatgattaggtacaatatcttgtctcagattc

SEQ ID NO: 514515 - DNA, 115 bp, Homo sapiens
caacgtcggacagtctgctgcaagtgatcccccacaatatcgctcactacgccctggctgctatgggtgcccaacgacgccatcccctacatcgccgccggtgacaaagtctatg

SEQ ID NO: 514516 - DNA, 227 bp, Homo sapiens
cccttttcaaaaaaaaattgccaaaaaaaccgaaggtttttttataaaaaaacccaggatataaatctaggaaaggggtcttctaggttttggggtggttaaacccaaaaaaacccaaatttggccggaacaaggagttgtttagttaaaattcaaaggggcccgaaagggaaaaattcccccccgtcaaaaaagggccaagaattaaaaggcctgcccccttttta

SEQ ID NO: 514517 - DNA, 848 bp, Homo sapiens
aactctttttctggcgggttcctacctaaatagtggcccacaaccttctttttctataagcaaaaatgggtgttccccccgaaatgcttttcctctacagaaagacgttttttttctacaaaccttctttactttggtgaataatttttacaacattttacacccgcatattttcttcaccgctgctgtagaataaatgtagccactctgtttaatttcacacgctactcttgttgctattgtgcaccacactatgtttgtcacacagcgcctctctcggttttttgaaaggagtatgaacaaataagtaaatatatccccccttgggaggtcttaatcattgggagacttcctagaaagtagtgggcctccccgccacacatgacattcatttgtttgtcgaatgttgaatggtaggcacacccctctgctagtcgttgtgtggcgacacgcacgttataacctcacagacgcagatcattacatatagaaggtatagttttccatcccccgccctctccatgacagaatgttattctataaaaccttctgccattacctccgggggagtattatccagtacaactcatctgctcccgccagaaattttagagaggggcccaaaatgcgtatatctctttagctgtcccgcttacaacacagtgagggtttgtcacacagccgcaagtttattgtatcgctccgctcgcttagagataggttatgtttcataccccccacatggcatttctctgtgtgagaacagagcagggtgtcattactcccctttccctctaaccgtgcagggtagaaaaaaaaacaaataggtaggggtcaaacaaaacaca

SEQ ID NO: 514518 - DNA, 1636 bp, Homo sapiens
  misc_feature (395)..(395): n is a, c, g, or t
  misc_feature (684)..(684): n is a, c, g, or t
  misc_feature (1509)..(1509): n is a, c, g, or t
tgaaactttaaaacccctcaaaaactgtttattatacaagtgagtttggattcccaatgggcttttcggtaggattttctgtggttagcgagcgcgggccaccagggcccctccaaactttttgtggactctcccagcgacaagggtctcagcttaccaggcagggtctccggctcattacgtggattgaggattgttcttttgattcctccttctctttgagaagccctctcatctccaacatatattatctcgtggtataatatatgccgccacccacgggcctttgtggaacacatgtgagacctgtgtagcggatatagccatatataatctcgtggtgccacacgctgtgtgtaccacaccacgacccctttataacacgcgcgacaacnagcggagagtgtctctatatccaccccgagaccaaaatcttcgcctctcacttttcgcccgagagaaacagcccagacacagctgtggtgctctctccagcacgagtactttgtgtcaccgtgtgtagcgcgtgtgtccgcccgtgtctctccaaatctcacactctctcccgagtgggtgcccccgcccccccgttgtactcccacctctttgtgtagtagttgagcagaacaccccctattgtgcgcgccgcgcgttattttgttgtgcgcagtgttgtgcgcccanccaacaaagcagtgtgtagtaccggcgcggttgtagtactctactcctgttgttgcgccggtacttctccgaagataaacaacaccgttgctgcacacaaaggaaaactgtcgtcgataccgaccggggcggccccccttgtgttgtgaccaccagaggcgaatgttgtggctcttccccgaaaagccggtgtttgtgccaccttttaacaccaacaaaaacacctctctaaaacaatgttgtttcgtgtgaaggggcgggcgcggcccaaactcgccaaagactcctcttctgttggtgcgagagaaaccacacaaaattttgttaaacacaaaactacaatactgggccctttgttggggaaaggtcttccccccgaaagaggaggggtccgccccccctgttgggggaggggcatacaaccaacggatagcttgtcgtcgacgtcttccgaggggcatatataacaccgttggtcgttctccaagacgcagggaagctagaacaaatcacatcacatacttgacacgcctgttgatgagaaccccccaatatttcattggtattcttttaccacacaaaaggaacaccgtgttgggggaacccccccccgtttatcctttacaacgcacgggtgttttgacaagacaccctctcccgaaagaatgctgccccgtctaacatcgatgaatctttgcccgcaaagaaacaactcctcgcggaaaggagcggggcgccagacaggtcactctcttcctgttgggaacccccccctcttccaccaagtggagtgggtgtggaccccccacacagaggtgtggtccnagtctcatcggaagcagcactcggtggcgactagatgtagatctcccccacaaatattatcttctcccggcgacaagaggagtaggtagtgtgacccccccggagcattatgaaaatattagagtgc

SEQ ID NO: 514519 - DNA, 798 bp, Homo sapiens
  misc_feature (233)..(233): n is a, c, g, or t
  misc_feature (249)..(250): n is a, c, g, or t
  misc_feature (253)..(253): n is a, c, g, or t
  misc_feature (257)..(257): n is a, c, g, or t
  misc_feature (262)..(262): n is a, c, g, or t
  misc_feature (273)..(273): n is a, c, g, or t
  misc_feature (286)..(286): n is a, c, g, or t
  misc_feature (289)..(289): n is a, c, g, or t
  misc_feature (296)..(296): n is a, c, g, or t
  misc_feature (298)..(298): n is a, c, g, or t
  misc_feature (309)..(309): n is a, c, g, or t
  misc_feature (312)..(312): n is a, c, g, or t
  misc_feature (315)..(315): n is a, c, g, or t
  misc_feature (317)..(317): n is a, c, g, or t
  misc_feature (327)..(327): n is a, c, g, or t
  misc_feature (333)..(333): n is a, c, g, or t
agcggtcatttgggatgaccctacagcaagggaggagagagcaaggcttgccagcaatttgcagtggcctagttgtccgacacaatactctgagcttcaggttgacattcaaaacttggaggattctccttttcaaaagcctttacatgattcagaaattgctaaacagggtaacaagaaagaaatctttgcatttgtttgtattaagtacatgttgacctcttaaaaataancagatgagcatgttgnngtnctcngatcngaatgtgcaancaaaaaaaacttngtngatattncnggttttggttnaanctngngccagaaaantaattngtaaattgaggtacttcatcagtaaattgaaaaacattttcataaatttggaaatttagaattgggcgtttttttctagacatggtgtctaccattgttcttttattctagctaacccttttgtgtttgtggagttaatgcttggtttttcttcctatcatcttattttcatttaagtcttttgaattctgcctagcacatacctacatttgttctttggattgtatgagtttctttctgaattctcctattttttcttcttccttgagctttaccttaaaaacaacaattttcctatctctcatcttttttcttccttttcttctttttcacattgcatgattgacctcccattagatatatacgatttatctctggttctgcttttctcccaagtgtagcaattgctctcatgtcacaaattgggttacccttaccaatgacaattcggcttcaggcaacagt

SEQ ID NO: 514520 - DNA, 197 bp, Homo sapiens
tctctaatctatcagtccggctctgaactgggttatttctggtcttctggctggctttggaattggttgctctttttctctagttctttgaattggtgatatcagggtgttcattttagatctttcctgctttctgatgggggcatttagtgatataaattcccctctaaacactgctttatctgctgatagattag

SEQ ID NO: 514521 - DNA, 536 bp, Homo sapiens
  misc_feature (19)..(19): n is a, c, g, or t
  misc_feature (28)..(28): n is a, c, g, or t
  misc_feature (145)..(145): n is a, c, g, or t
  misc_feature (237)..(237): n is a, c, g, or t
  misc_feature (272)..(272): n is a, c, g, or t
  misc_feature (368)..(368): n is a, c, g, or t
  misc_feature (411)..(411): n is a, c, g, or t
ataggcttcaaacgggttngggttattnggaggaactcattaaatattaacaaagttttggttaaataggggaataagtttttaaaatcgattgcacagcatgggacaatagttaataataatgtaatgtatatttcaaaattgntatgagagtggattttaaatgtttcatagcacatgtaaacaacataagtaagtgaggttatggatatgttaagtagcttgatttaatcattntataatacacacatacaacgcctgggtgcagtggntcatgcctgtaatcccagcactttgggaggctgaggcaggtggatcacgagatcaggagatcaagaccatcctggctaacacggtgaaaccctgtntttactaaaaatacaaaaatttagctgagcgtggtggcgggtncctttagtcccagctactcgggaggctgaggcaggagaatggtgtgaacccgggaggcggagcttgcagtgagctgagatagtgccactgcactccagcatgggcgacagagaagtctccgtctc

SEQ ID NO: 514522 - DNA, 108 bp, Homo sapiens
agaaattaccgtgtcaatgactttttacttaatttacttacgtattctctggatcctcgggacaatcactaataccagttccctttattcggcggtggtcggcggcag

SEQ ID NO: 514523 - DNA, 237 bp, Homo sapiens
ggacagtgaagggaggtgtaaacccagagcccttcagagcaactcagaaggtatttacccggcaactcggtttagaacatgatgaaaagctagtatcctatctgtctcggttacggaacatggaaaggaggaccaaacagattcaaccttgggagctaaaccgggcagaactacaggatcggcggggtcaggccaaggtattagaaagggagttaagggatctgaccacctgggtca

SEQ ID NO: 514524 - DNA, 183 bp, Homo sapiens
  misc_feature (19)..(19): n is a, c, g, or t
cacaggggaaggtcccacngggacttcaggagggcggttggtccaggacccacacctgctttcttcatgtttcctgatcccgccctgggtctgcagtcacacatttctggaaacttctctgaggtccaagacttggaggttcctctaggaccttaaggccctgactcctttctggtatctcac

SEQ ID NO: 514525 - DNA, 747 bp, Homo sapiens
ccccggccaggctgaaaacaaggaacattccagagaagatcacaaggcatgcgaactaaaactcggagcatgcacagggcatctcttgcgcgctgtaactacgcgcaggggacacacaggggcttacggggacgggtctagcccattggactcccatcaagacccaagacccaatcctgtcaccattgaccatcatccccgttatcccaccaacctctatatcttataccacacacacggcacgacacgacttgagaacccataacgtcccctcgctccataacagcacgctgcggacctcctggcattataatatacccacattcccatccttatacctcccccttacagtcccaatacgccgaagcccataacatcataggatacattgcgcccatatcaccctattcccaatggggacacaccacattcgcgttgactaacttgacacatttcccatccattccctaggaccgaggcatgaggggagcaacgctattaaacacgggcacggcaacacaacaccgcttccaagccgcccatggggccccccacggccataggaggcgggataaccccaacgcaagcgcaacagaattccccggccgacgcccaagagcggcacccaaggaccccattcggcccccccattggctaaaccgagagcttgccaaatgggaccccaaacgagaaaacgcttccgattgggccaaaatcttggattgtacgcccaccaacgtgtccccg

SEQ ID NO: 514526 - DNA, 496 bp, Homo sapiens
ccattatgccgtgtaattgtgttggtttatgatcgacctttttacccctgtgtcatgtcttgtgaattatggggatatatgatctctgcgacgctctatattgatgaggagtataagtcgaaaatgatatcacctctccttgggtccctgtgctggtgccaatgttgtgcaccgcacctgaggtgtctgtagctgcagctgatgccacttgatgagtgttgtgcgccttgaagagagtgcatggatgtgaagcgttgatggaaaataatgtatgttgggggaccacggatgttgtgataccttgccttggtttgtgcttgttggcagccctgccaatgcctatcttcctggccccaccatggtgagcatgctagcccctggatacctgccttgtgtgctgttaatggatgttaactatctactggataaattacttatacggtgatagtgataattcctgattcccagaatgccatctgatagcgctggcataaca

SEQ ID NO: 514527 - DNA, 1256 bp, Homo sapiens
atgtcattttaggctgactgttagacggtgcatgctcaggctatgtgcaccagggatataatgaaactccagtggagggactccagcacaagcttcctccgaatccgtaggttggcgtggtgcgtacaagtacacaatctaagataccctatgcatgtcgattcccacaaggctatgactctaccatgtcgacgagttaaacaaggagatacctgagggtgaatgtacattggtcgaatcgagtttttgtgcgacgagagagtcaatagcgccatggctgtactgttgatccgcgatcaagtggctgagtgaggtgcactgtgaaggtgatacatggacattgggaatattaaaatactaccatgttgtgtgtgtaccggtatcacttggctagaatgaagatcgtactgaattgcataaggactctggtatatgctggactagtaggaagttaaataattacattagggttgttgacttgactcctgagggaatgtattagtccttgcgtggatgaaaagttagagttttgctgaattagacgtctcttagcatgatttgagattgtaccatgtatgcgtaaatgcgaacgtcaactaaatgttgtgatagttgaaaagtccttcaggtctgccagagtgactgtatactggacataaactctcatgattggcatttgtgcatcgaggtggttgatctacacaatgtgcgtaatcattatacgagtggtacaacacatctacgtgcttgttactcgctagttaaacttgtatcatttttctctcttttccccaccgatgttgctgcgagactaagcttagttgcgcatatgtctagggattacaacgacacatgtggcccacactggtctgtgatctttgcctctcacctctgttcccgattcacgtagtgcgactggttgagtttcgacagtccatgtcctaggtggccgtcatctgcgtggcgtccgccgcccgctcaagccctggggctcatgcgtgacacaccgttgactgggccctgcgcccccgtaatactggccggctcaccgacgggctcattgctccaggtcccgatactgcgcacctgtgtgcacattcgcctgtggtgcgtggttcacacgctctcacagctccggtatcttctattcgccacgcctcgggtgcggcgtcgtctcgccccacatcgcggacaccgtctgagcgcgcacccccacttcctataggcgagggggactcccccgcgctgtcgtcaca

SEQ ID NO: 514528 - DNA, 204 bp, Homo sapiens
  misc_feature (2)..(2): n is a, c, g, or t
anaggatccctcttctttgggacggcgctagcagcgacttaaactggtgcggacagtggatcgactgttaattaaacaagcatcgcgaatgccgctgcggtgttgacgcgatgtgattctgcccagtgctctgaatgtccaagtgcagaaattcaatgaagcgcgggtaacacggcgggagtaaactatgactctctttagggt

SEQ ID NO: 514529 - DNA, 111 bp, Homo sapiens
tttatgacatttttctttccatcagatttcatagtgtgatatttatcagcaatgacgttcccttgtatcttatcaattagggattatggggttcatgggatctgtctttct

SEQ ID NO: 514530 - DNA, 782 bp, Homo sapiens
  misc_feature (171)..(171): n is a, c, g, or t
  misc_feature (196)..(196): n is a, c, g, or t
  misc_feature (233)..(234): n is a, c, g, or t
  misc_feature (237)..(237): n is a, c, g, or t
  misc_feature (241)..(241): n is a, c, g, or t
  misc_feature (245)..(245): n is a, c, g, or t
  misc_feature (782)..(782): n is a, c, g, or t
gcaacttccaacctttggatcggtctctccaccgtcagtttagcgtcattccaaaaccacacccgtgcaaagctttgtactccgcaccccagatgatctccaggcagctcagatctctttcctgcctttgccctgcactgttccccggtacttcctcctttattgtagcancagctccccagccaatctgtacatncctcagaggcagcgatctgatgaattggtttttgaannccngaanggancgccatggagttggcagtcatcacggtagatggcgtatgattttgctgaattttaaataaaatgaaaaccataaaaaaaaaaaaaaaaaaaaaaaaaaaaaaaaaaatataaaaaaaaaaaaaaaaaaaaaaaaaaaaaaaaaaaaaaaaaaaaaaaaaaaaaaaaaggggcacaccaccccacgaagagacaaccggcccaaacaacgcgacggcgacggaggcgtcgcggcacacaaaaaggaagacaccaacaaaaaccgccggacactcagcagcaagaggaaaagaacacgcccgcaacaaaaaacagcggggggggagacacacagaacaagaaaaacacacggagcgcggacggaaccaaaaacagagagacttcgcggagaagaacacacatcccggagtgagagagtggatagataaggcgaggcggactacacaggggcacgtctacgccaaacgagagaagttacgcccagcccgccgcgcgcgaggaaaaacaccagacgcacccgcgccccgccacggggggcn

SEQ ID NO: 514531 - DNA, 1574 bp, Homo sapiens
  misc_feature (1167)..(1167): n is a, c, g, or t
tgtgcgcctcgggggcggtcctcgggctgcgcaccggatctcttacactcggcgcctcagaagtccgtgccagtgaccggagctggaggtggaaagcgggttccttgttgggctagaagaatctttgcaaaaatgtctctctatccatctctcgaagacttgaagggtagacaaaagtaattcagggctcaaacttggcttctccgtgcaaaccccttgccaatccaagcaattttggtcacgagagcttctggctccttaattccctcacggcatggcacattcctcctatcccagacttgtattccaggagctctcatcaataaccttgggggcttgacagtctcacacttggcggcacagacaataccgttgccaaattggttgaccccggtgggatatacccatgggttgcaacccaaaatttccagggggagacacgagttgtggatacgccagagaacccttaccaaggtacataaaccacgctactaattgggtggagacatccctttgtaagcttggcgctacattggcactgttggacaaaatacggagacgcaagcccacgaaacaatttctacagcacaacagcggcgaacttcgggctggaaaaggtcccattatgctgggtgttaacggtagaatcccaaggcatgggggaccaacaccatttggggaccatcacagggactttaacacgatttccacaattcaagcatttcaacgtgggggtgcataaatttggggtcgcccaggcctaagtatcacccaagaggaggcgttaaaattatgctttcacccaaggacccttcaccatattgctgggtattaggcgcactgtagggaccgacattttctcgggtggcgggacccccacaaatggttacacctttcgaccaagaaactatccacgattgtggggtcggaaacaaacacatgtggtgtgcgcgcaaggcgagcatttgtgagacgcctcctgtggagattatacaaaagtgggcgcgacacacagtggattgttgggctcacaaagacaacgggcgtctctttgtgcagacgacccgacatgcattaccccccattgtggactccaactttccgctgggcacaagggcgcccctttttggaaaaccggagccgaaatttacccccacttcggcattnatcggggatatagccactgtggacgcccttctgttcgggcgacacgcctgttaccaacacactgtgggagacacattacagcctccacatggtgtcacaggaatacgtcctcgtgtctgcccagagacagttgtgtcttttcccaggggcacgacaacacactctgtttgtaacaccacgtcgggcagcagtgtcttttgcagatcgcaggcgcgccgccaggtgggggacaaattgtcgacacagttgtaggccgagtataactacacagacagcggcggctactatgaaaccgaaattcaaagggtggactagcaattccatagcgagtacaaacaccttagtacaaaacaaaaggcgccaagtcacacattacctacttgtacaacgacgcagtgcaacacatt

SEQ ID NO: 514532 - DNA, 1472 bp, Homo sapiens
  misc_feature (36)..(36): n is a, c, g, or t
  misc_feature (68)..(68): n is a, c, g, or t
  misc_feature (96)..(96): n is a, c, g, or t
  misc_feature (405)..(405): n is a, c, g, or t
  misc_feature (424)..(424): n is a, c, g, or t
  misc_feature (435)..(435): n is a, c, g, or t
  misc_feature (598)..(598): n is a, c, g, or t
  misc_feature (625)..(625): n is a, c, g, or t
  misc_feature (633)..(633): n is a, c, g, or t
  misc_feature (650)..(650): n is a, c, g, or t
  misc_feature (668)..(668): n is a, c, g, or t
  misc_feature (692)..(693): n is a, c, g, or t
  misc_feature (700)..(700): n is a, c, g, or t
  misc_feature (708)..(708): n is a, c, g, or t
  misc_feature (711)..(711): n is a, c, g, or t
  misc_feature (721)..(721): n is a, c, g, or t
  misc_feature (727)..(727): n is a, c, g, or t
  misc_feature (732)..(733): n is a, c, g, or t
  misc_feature (735)..(735): n is a, c, g, or t
  misc_feature (738)..(738): n is a, c, g, or t
  misc_feature (743)..(745): n is a, c, g, or t
  misc_feature (749)..(749): n is a, c, g, or t
  misc_feature (751)..(752): n is a, c, g, or t
  misc_feature (757)..(757): n is a, c, g, or t
  misc_feature (759)..(762): n is a, c, g, or t
  misc_feature (765)..(765): n is a, c, g, or t
  misc_feature (769)..(769): n is a, c, g, or t
  misc_feature (861)..(861): n is a, c, g, or t
  misc_feature (886)..(886): n is a, c, g, or t
  misc_feature (923)..(924): n is a, c, g, or t
  misc_feature (927)..(927): n is a, c, g, or t
  misc_feature (931)..(931): n is a, c, g, or t
  misc_feature (935)..(935): n is a, c, g, or t
  misc_feature (1472)..(1472): n is a, c, g, or t
cattcagctgctgcagatgaactttgccaaaatctngaaatgtaacctcaccctacagatgaagatantagagcaagaaaaagaaattgcagaacnaaagaagcagctaaacctcctttctcaagacaaaggggtgagggatgacggaaaggatgggggcgtgggatgaaagtggacttaacttttaaggtagttaactggaatgtaaatttttaatctttattagggtatagttggtacaatgcttcgttgtatttagtaagcctttacaagacttgttaaagatgtcagagtgccccaagctgccgttccttcccttcctgccccacaagctccttttcctgaatttcctacctaaatattaaccatatgcctagtctctgaaactaaaaacttggacctcancctcaattattttctcctntcaactctgtngaccctctgtctggtcttcctctagaaggtaccgcagaaattgatgtgtgcctccctgccctcgtcactgcccaagcccgggcctgcacatactcactggactgttccagttttgacagctgccagtcttcctgcccctttcacactgcagctgaagttcatnacctgaaggacgcctcatcatttcatnccttggcnccaaaccttctgctgcntctaagataaaagctcancctcctaacagcgcacagcgcgcnncccccanccccctcnccngccccccccncccccnccccnncnccnccccnnncccncnnccccncnnnnccncgcnccccccaccccagatgatctccaggcagctcagatctctttcctgcctttgccctgcactgttccccggtacttcctcctttattgtagcancagctccccagccaatctgtacatncctcagaggcagcgatctgatgaattggtttttgaannccngaanggancgccatggagttggcagtcatcacggtagatggcgtatgattttgctgaattttaaataaaatgaaaaccataaaaaaaaaaaaaaaaaaaaaaaaaaaaaaaaaaatataaaaaaaaaaaaaaaaaaaaaaaaaaaaaaaaaaaaaaaaaaaaaaaaaaaaaaaaaggggcacaccaccccacgaagagacaaccggcccaaacaacgcgacggcgacggaggcgtcgcggcacacaaaaaggaagacaccaacaaaaaccgccggacactcagcagcaagaggaaaagaacacgcccgcaacaaaaaacagcggggggggagacacacagaacaagaaaaacacacggagcgcggacggaaccaaaaacagagagacttcgcggagaagaacacacatcccggagtgagagagtggatagataaggcgaggcggactacacaggggcacgtctacgccaaacgagagaagttacgcccagcccgccgcgcgcgaggaaaaacaccagacgcacccgcgccccgccacggggggcn

SEQ ID NO: 514533 - DNA, 971 bp, Homo sapiens
gctgcatgaggggtccatatcggggttgttacttggattcccgtcgtagcttacagggaaattcacaactacaggtccggatcccttgatgtcctgcaaatgaaagaagaggatgtccttaatttccttgtcagcaggaacccacattaggtggcactcacttcttgcactgccagaatggaacaggacatctataaaaggaaaagtgatggcatgcatatgagtcgataatatgctcaaagaggacactgggcagaaggctttcatgtctggcgatgacgtcgtgcgatgtagtctgccatgtgaaaaccctgactgatgtacaggtgttatatcgctccaggaatactgggcagagggctgtgctgaagtttgctgctgacagtggaggcaactccaattgctggagcgcgttcactcctggaacctgtcactagagccagagttgcccgaggctaggccgttcccgagtgagtccagcgggcgtatcttctggtggtatactgatccccaggtcatgatgcatccgagggcgtgcctcaacggacggcatcttatgttaaccgtatggcctacctattgcgctgtgtacacacagattctcctctgcactatgtggacattgccatacccatgtcaaacaaacaagggagctcacgcagtgggttgattgtggtggatgctggctccgggaagctgggggcatggcggggcaacatggtcccgggaagcaccaaatgggaaggtcatgccgtgatgttggaactcctacaagaggaatcgtgcacgagatgaaactcgaagagggcagctggtgttgaaaagggccgcagccgggcggaactacggggcacggaaaggctcgaagacagaaacaccggtacccgcgggggtcacaacgggctcagtgcaagggccccggggaatccgacccagcaagtgggagcgggccaatgtcccgcccgagaccg

SEQ ID NO: 514534 - DNA, 120 bp, Homo sapiens
agagcttagggcctatagcttgttgataattgcagcttgtggcagtgtaaatatggctgaatgagcgtctaaatcgttgataccagtgcaactttgggtgcaaggctttgtttagggatc

SEQ ID NO: 514535 - DNA, 143 bp, Homo sapiens
gggattcgtgaaagcggcttgtgtatgcaggtgaggtgtgtgggggattgggcggggttatggtggatttgtatcaacgtgcagtcgagggatgaggtagtggagggggaaggcctggagcgatcgatacacaagccgcttca

SEQ ID NO: 514536 - DNA, 186 bp, Homo sapiens
  misc_feature (78)..(78): n is a, c, g, or t
agttccgggtcccccacgtgacaagcgcagatacgccacaaataccacggggtcaaaggctttcaagatatatgtgtngggggaaactattttttaaacacgggggaatacacgggaaatcttcagggaaaaacacatttaaacactttttttttttttttttttttttttttttttttttttttt

SEQ ID NO: 514537 - DNA, 108 bp, Homo sapiens
gagagatggccagcaggaaggcgggacccggggcaaggtgtgcagccaccaagaaggcccaacgtggttcttccaacgtgttttccatgtttgaaacaagccccagat

SEQ ID NO: 514538 - DNA, 355 bp, Homo sapiens
  misc_feature (281)..(281): n is a, c, g, or t
  misc_feature (346)..(346): n is a, c, g, or t
tgtcattttgaaactgtagagtccctatttcggtgtgatgaatcactgttgcctttgaaaaatcctcattatttctgggccgggcatggtggctcacccctgtaatcccagcactttgggaggccaaggcgggtggatcatgaggtcaggagatcaagaccatcctggctaacatggtgataccccgtctctactaaaaatacaaaaaaattagttgggcatggtggcatgcacctgtagtcccagctccctgggaggctgaggcaggagaattgcttgancctgggaggcagaggttgcagtgagccaaaatcatgccactgcactcccgcctggcaacagagcnagagtctgt

SEQ ID NO: 514539 - DNA, 1224 bp, Homo sapiens
ggtgccgcggacgcccgggcagccacggcggcggggccgcggcgggcgcctggctcagtccggccctttctccctgccgtcctctcccgccccgctccgcgcgccgtcgcgcgggcgtcgtgtcagcgtcccgtcagctgtcctggcctgatgtgcgcaggtagtactgcttgtagcgcggctgcctgcaggtccggagtagcatccagcggtcctggggtccttagcgttccttgcttgcaggaccccggctcgtgccgatttctcgcctctgtctcttccagcgttcttcattgaaggcccgcttggctcgatgttcgtccgtcggacggccccggcggccgggcaagggggacccaggtgcgccgccgacaatctgtaccgacgaaagaattatgcgctacaacacaacacttatctgcagggagaagcctgcttcgatgattgaacacggacagaaacccagaatttccacagttattaggtgaacctttagttgagaaaagtcacagttacaaggaaaggaagacgagtgggtaccaacgttgggagaataaacgcgaatcaggttatatttaagagaaggggcaaattgggaatcaagagcaaatgggctggcgcaagtggcgtcgagcaacgcaaatacacagtgccgtaggcatttgacgtgggggatttccaaccgcaacaattcaaggaacaaacctttcaagggattggaacacaagacccaattggactgcggaagcgcccgaattgctactctattcccggtttcatccatatttagtggaccatgtaaattaatggaagaattgtggaattggaggcgaattgtccttgacgaagggggcaacaggagtaagtggttagggaggtagattgaaaaatcaggagcaaagaagtattgaacgaaggaaggaatttcagaacgttaacctttcaggggtcacgcgcaagaaggccaaatatcattgcaccttcatatggcacgcaaactggtgtcgcaaacagtcaaggaccaccccggacgggccggaccaaacgagagacacaaggcggatagacgccaacactgtgccacagttatcggaaccagggcccggacaccacaccccggacacaacccgggacagcaccgccgaacaaacggcgcaaaacggcagcaccaaggaaccacgagtgacgggcaccaccgaacgcgaacacccccacacacgagag

SEQ ID NO: 514540 - DNA, 723 bp, Homo sapiens
acccgcgaattcggccattatggccggggtctatgcctcaggcctgttttaagagcgctctgggagaccaagactatgacggcaaacaagatggaccgcttgatcacggtcatgaagatccacgtactcgcggacaactatctctactccctgcccatgaacgaactcacgtgcattgctatgattctactagactctatcaatgacgcggtgatcaacattagtccagagcagcagtcgacccgtatctcagagctcacaaggttccagtcattacatggtaccagttacaagaatcttcacgtgaacgcggataacaagggcaacatggatctggacgacgacatctgcaaggacatcagcctggccaagcgctacaacgatctgtgcgcaaagactactagagccacaagagcgtccagcccgacactaacccatgaatgcagtctgaccatttcccttctacggtgagaagactcatgcattcagacaaagtaccagcaattgcttcagcaaagtgggctaatatgctagtcggaccttgggtacagagctcgggtcaaccgagcccttaaatgcaccgtcatcctggccactataggacccaccttgtttgctaagagccactttaacacacccctagaccctttaacgatccggctcaaccaattaacttttaccagctaccaacaccccgtcagggcctccagcgctctatgcgcg

SEQ ID NO: 514541 - DNA, 133 bp, Homo sapiens
cttggcggacatacttggggtgggcgctgtggggcaactttacgatcaaatcagggagctgcatgcacttgaaaggcatggcctgtctactcactggagtgcgaggtccatgcaccaaagcgctgttctgatg

SEQ ID NO: 514542 - DNA, 428 bp, Homo sapiens
  misc_feature (27)..(27): n is a, c, g, or t
  misc_feature (80)..(80): n is a, c, g, or t
caagctcactgcaagccttgaccttcngcgaggttccccaaagtagctgggacccacaggtacatgcccacccatgtccnagctttttgtatttttgtcaagatggggttttgactttgcccatgttgcccaggctgttatacaactcctgggttcaagaaatctacctgcttcagcctcccaaagtgctgggattacaagcgtaagccaccgtgcctggccctgtgcaggtttttaacctgatgtaatcccattcgttcatttttgctttggttgcctgtgcttgtagggcattattcaaaaaatctttacccaatccaatgtcctggaaagtttctgcactgttttcttttctttttttgagagatgggtctcactctgtcaccccggctggagtgcaatgggcaacaagagcaaaactctgtctc

SEQ ID NO: 514543 - DNA, 1464 bp, Homo sapiens
  misc_feature (628)..(628): n is a, c, g, or t
  misc_feature (653)..(653): n is a, c, g, or t
  misc_feature (747)..(747): n is a, c, g, or t
  misc_feature (885)..(885): n is a, c, g, or t
  misc_feature (962)..(962): n is a, c, g, or t
gtgtgtgttgatgtcctcaatcctaccaccttgttctagtagcctcgctggtgccttctttcgcggggatgtcacaaagatggggggatatgtgatcgtttctccgttggccaccaaggggacgtcgggttgtcaccacgaccccggcgttgtggtgggcacaccccgttggcccagcaggcaacacgtttacaccccgggaatggttaaatttcccttctgcggaaatggtcgcccccctatggagccttttttggatgtagaagcctcttctttctcccgggggggaaccaacatgggggggcccttcaccaaaaggccccaaaggaaaggggtgcccgtccaaagggaaatgttttctctcggtgggcaaagaggtgtgcgcggggtgcgaccacgcccaagaagaagtgggaccccccgcccaatgggggagagaccagacctggggctttccaacctaggcttacaaagggtggaatattaattcccttggggacccaacatcccaacgagccccacaaattataagcgtcctctcggccttaattggcgccccccggtatttggggaattgccccacacccccgcggcttacacacacttggcaacagccaagagttttgtncttcgaggactcgtaacagcgaganagaagactttgtagttccccgctgcttctgggtgataaaaacgacctgcgagaagagttgggcccgcttagaaaagtttctctttggagaaagntctttgtgctgagattagtcgttggcccaccattgtggtttgagaaaaaatggggtttctacctggggcacaagcccacacatgggtgctgttgttgagagagagccttttctttcacagagacgtatatccaacccncttttggtgggtctctcgctctttgcacactgtgtttctgtgagattaataggagagacacacagacacacagtttntccccggtttgggtcgtgtgtcactccccaaagcgccacagtgtgggacacacacagagaagggctctgtctcgggagagctcgggcgcacacaggtgcacaccacacagtgtctctgcccacacgagaaagtctctcacagagagggctaaaatgagatatgtattccctcatatatcctcgccacaccccacacttcttaaatacacgtggcgtggagaaagaccggtgtctcacgagaactcgttttgtgttcacacttggccactttaaagtttaagtagtataaagagcctggttaaatgagtaacacaatgcacatctgtaaaccttcacgagaaggaaaaggaggaaatgttttgtggagccacctttggttttcttttttgcgtgtggcagttttaagttaattatgtttttaaatcagtactttttaatgggaaccacttgacccaaaatttgtcccagaattttgagaccccatttaaaaagttaaatgaga

SEQ ID NO: 514544 - DNA, 657 bp, Homo sapiens
  misc_feature (3)..(3): n is a, c, g, or t
  misc_feature (81)..(81): n is a, c, g, or t
  misc_feature (87)..(87): n is a, c, g, or t
  misc_feature (137)..(137): n is a, c, g, or t
  misc_feature (159)..(159): n is a, c, g, or t
  misc_feature (260)..(261): n is a, c, g, or t
  misc_feature (265)..(265): n is a, c, g, or t
  misc_feature (270)..(270): n is a, c, g, or t
  misc_feature (294)..(294): n is a, c, g, or t
  misc_feature (296)..(296): n is a, c, g, or t
  misc_feature (309)..(309): n is a, c, g, or t
  misc_feature (335)..(335): n is a, c, g, or t
  misc_feature (337)..(338): n is a, c, g, or t
  misc_feature (347)..(347): n is a, c, g, or t
  misc_feature (352)..(352): n is a, c, g, or t
  misc_feature (354)..(354): n is a, c, g, or t
  misc_feature (386)..(386): n is a, c, g, or t
  misc_feature (453)..(453): n is a, c, g, or t
  misc_feature (470)..(470): n is a, c, g, or t
  misc_feature (511)..(511): n is a, c, g, or t
  misc_feature (544)..(544): n is a, c, g, or t
  misc_feature (556)..(556): n is a, c, g, or t
  misc_feature (566)..(566): n is a, c, g, or t
  misc_feature (593)..(593): n is a, c, g, or t
  misc_feature (612)..(612): n is a, c, g, or t
  misc_feature (614)..(614): n is a, c, g, or t
atntaatcatgcagaaagtgaatttcctaaggtcttatgctcaatgtatactacaaatctagcaaagctaaatgataaganaatagnaaggacaatttatttctatataacagagcatatactcccaatttgctgcnacttcaaagagcacttttagantcatctaacttttacacggctctttcaagtgaagttcatgcgacgcactgagttattaatcctatcatcaagacaaatagtaacgcaacagaagaaatatnncgcnaagcnaagcattctgttaaaaaaaaaagngntaaaagctaaccncagaatagtgtcagttttggtttgcngnnaacccctgngattntntaaaccaaaggcgttaagacaccaaatagtcngaggtaaattactaagagaattacattcatacatggtgtcatcacgcagcttatcttttagaaggtnctttgttaccatccagnaagcgttaactgcttgggttttttcgaggaaatatgtggantattaagatgtttctaaaaaattatcttttccntttgaaaatgtntctcatttgnagatagtagaattacaataaactttcnatcacggcactgctaattntnctagaacagcaacgaatgacttttaagcctatcggttatttcc

SEQ ID NO: 514545 - DNA, 211 bp, Homo sapiens
caccgagtatatggtcacaagaccggtccgtgacgatctaacgtaaacacgtacagtacagcccggcacaatggccagattgcaggcccggagcaggcgcgttcgtccacgatccctccacggacacagatcaccacacgcacccccttattgcactgagcaaaggtgtagtcatacagcaagcctgtcgaggagggcaggagacggagtg

SEQ ID NO: 514546 - DNA, 241 bp, Homo sapiens
  misc_feature (233)..(233): n is a, c, g, or t
tggacctctccctacgtatctacctgcagagcagaggagatgtatggctttatcaatgtcttggtaacactccgctgataaggccatagaaagtatgttgctctttgatcacgtcatctaaagatttaaacttgcatgatatgctgcactggtccacacaatctcctcttgtggcaatgcgcatctcatcgtgtaacattagcagaacactgtgggctcggacacaagtagcnctttattc

SEQ ID NO: 514547 - DNA, 355 bp, Homo sapiens
tgagatgaagtctcactcttgtctcccaggctgcagtgtgatggcatgatcttggctcactgcaacctccacctcccgggttcaagagattctcctgcctcagcctcccaagtagctgggattacagcacctgccaccatgcccagctaatgtttgtatttttagtcgagtcgggtttcaccatgttggccaggctggtcttgaactcctgacctcaggtgatccactcgcctcagcctcccaaagtgctgggattacaggcatgagtcaccgtgccccgcctggtgtttctttcctctttaactctcacattagtaacttcatcttcttttcttttttttttgagatgtcgccc

SEQ ID NO: 514548 - DNA, 148 bp, Homo sapiens
tctgctacctctttctggccacgcaggtagacaccagctgctgcaggcgaaggagacccagggggagaatcgcttgaatccgcgaggcagaggttgcagtgactcgagatcaccaccattccattgcactctagctcgggcgggcgtc

SEQ ID NO: 514549 - DNA, 136 bp, Homo sapiens
ggaccattgagtaacaggatctcattctacccagatgtcacgagaaatgaacaggaacctatcaatgtgaaataagggaacgatataggtggcataccgcagtgacccagtcaccctgacatgtcctactataggt

SEQ ID NO: 514550 - DNA, 138 bp, Homo sapiens
gatgatgtgcagaagggaggaagggaaggaaggaagaggaagaaaagggatttctggagatgtagagagcgtagcatttgttctgaacctccttggagtagctgatagaaagaatgaaagcttctttctcctggctgt

SEQ ID NO: 514551 - DNA, 424 bp, Homo sapiens
ccgcagtctggggcttggcagcgtgggctgcggtcactggtcccaggccgcttggggagtcgctgcactgatcgctcacgatcctgccacgctgcaggccattgtacttcatacggccattgtatgtgctcgtaccaggccagctgcctcattgaggagcgctaaaaatgcagctggtccatccggggaccctgaggagcccagcagcggcttgcccaggtggcttaagcagtgacccaggctctgtaaccgctgtgtccgctgcctacctggccagcgcgatttgaataatgccctaatggcctgtttggattatgccacgcatgcgactcctgacctcacttgcctcctcctagcactggcacatttcacgaagctcacagccggttgatatatcctgctgctgtgctgaatcaggccgccc

SEQ ID NO: 514552 - DNA, 120 bp, Homo sapiens
agctattcaggtgactgaggtgggaagatgacttgagcccctgaagcagaagttgcagtgagccaagatcacgccactgtactccagtcctgggtagagagagccagacgctgtctatag

SEQ ID NO: 514553 - DNA, 165 bp, Homo sapiens
caattgtatgttttatccaatacagtaatgtacagttgctatatcgcccagactccatactgtagccctttaacctaaagaagaatgttatacaacagcctgagcaggacatttttcatgggatactaatgctggagtgacccttagaggtctaatatgcaatca
